United States Patent Application Publication US 2012/0159672 A1 - sequence listing, part 2

SEQ ID NO: 1882 - DNA, 1494 bp, Arabidopsis thaliana
  misc_feature (1)..(1494): Ceres Seq. ID no. 13621916
cattatggtgctgataagtatattgcatcgatggcaaatatgcttaactatcctaacaacgtgctgaacaacggtggaaggctaaggacggttttcgatgttggttgtggtgttgcgagttttggaggttatcttttatcatcggatattctcacaatgtccttggctccaaatgatgtgcatcagaaccaaatccaatttgctcttgagagagggattcctgcctccctcggtgttttagggacaaagaggctcccatacccaagcagatcttttgaactttctcactgttcacgttgcagaatcgattggctacaaagagacgggattcttcttctcgagctagacagagtacttagacctggtggttattttgcatattcatctccagaggcatatgcacaagatgaagaggatcttagaatctggagagaaatgagtgctcttgtggagcgcatgtgttggaagatcgcggcaaaaaggaatcaaaccgttatttggcagaaacctttgacaaatgattgttatctagaaagagaacctggaactcagcctcctctttgccgttctgataatgaccctgatgctgtgtggggcgtaaacatggaagcttgcattacttcttacagtgaccatgaccacaaaaccaagggaagtggattagctccatggccagctcggttaacctctcctcctcccagacttgctgattttggatattcaacgggcatgtttgagaaggacacggaactttggaggcagagagtagatacttattgggatctcttgagtccaagaatcgaatcagatacagtgaggaacataatggacatgaaagcaagcatgggctcttttgctgctgctctgaaagaaaaagatgtctgggtaatgaatgttgttcctgaggacggacctaacacgcttaaactgatatatgacagaggtttaatgggcgcggttcatagctggtgtgaagcattctcgacatatccaaggacatatgatctcctccatgcttgggatattatatcggatatcaagaaaaaaggatgtagtgaagtggatttgttactggagatggatcgaatactgcgcccgagcgggtttataatcataagggataaacaaagagtggtggattttgtgaagaagtatctaaaggcattgcattgggaagaagtaggtaccaagacagactcagattcagatcaagattcagacaatgttgtattcattgtccagaagaagctgtggttgactagtgaaagccttagagatatggagtgatgagtaagccacacgatacacaaaaattacgaccaatgatcatacaaccaacaaatttcattattgtagtagcaacattatttattaacgttgtttttaatttttctaattattgtatctttcttacattcttataagtgatgttgtttgtatgattttggtagagaagagaagacacgtataagtaaagaacgatagattcttttg

SEQ ID NO: 1883 - protein, 428 aa, Arabidopsis thaliana
  peptide (1)..(428): Ceres Seq. ID no. 13621917
  misc_feature (1)..(415): Pfam Name: Pfam Description:  Putative methyltransferase
  misc_feature (1)..(428): NCBI GI NO: 18414198 NR Description: dehydration-induced protein-related
  misc_feature (1)..(428): NCBI GI NO: 7488052 NR Description: probable ankyrin - Arabidopsis thaliana
  misc_feature (1)..(428): NCBI GI NO: 22331280 NR Description: dehydration-induced protein-related
  misc_feature (1)..(428): NCBI GI NO: 18390392 NR Description: dehydration-induced protein-related
  misc_feature (1)..(428): NCBI GI NO: 21536697 NR Description: ankyrin-like protein [Arabidopsis thaliana]
  misc_feature (1)..(428): NCBI GI NO: 14423548 NR Description: Unknown protein [Arabidopsis thaliana]
  misc_feature (213)..(428): NCBI GI NO: 25406781 NR Description: hypothetical protein
  misc_feature (1)..(210): NCBI GI NO: 25406781 NR Description: hypothetical protein
  misc_feature (53)..(428): NCBI GI NO: 24030225 NR Description: unknown protein [Arabidopsis thaliana]
  misc_feature (1)..(418): NCBI GI NO: 37535372 NR Description: hypothetical protein
HYGADKYIASMANMLNYPNNVLNNGGRLRTVFDVGCGVASFGGYLLSSDILTMSLAPNDVHQNQIQFALERGIPASLGVLGTKRLPYPSRSFELSHCSRCRIDWLQRDGILLLELDRVLRPGGYFAYSSPEAYAQDEEDLRIWREMSALVERMCWKIAAKRNQTVIWQKPLTNDCYLEREPGTQPPLCRSDNDPDAVWGVNMEACITSYSDHDHKTKGSGLAPWPARLTSPPPRLADFGYSTGMFEKDTELWRQRVDTYWDLLSPRIESDTVRNIMDMKASMGSFAAALKEKDVWVMNVVPEDGPNTLKLIYDRGLMGAVHSWCEAFSTYPRTYDLLHAWDIISDIKKKGCSEVDLLLEMDRILRPSGFIIIRDKQRVVDFVKKYLKALHWEEVGTKTDSDSDQDSDNVVFIVQKKLWLTSESLRDME

SEQ ID NO: 1884 - protein, 418 aa, Arabidopsis thaliana
  peptide (1)..(418): Ceres Seq. ID no. 13621918
  misc_feature (1)..(405): Pfam Name: Pfam Description:  Putative methyltransferase
  misc_feature (1)..(418): NCBI GI NO: 18414198 NR Description: dehydration-induced protein-related
  misc_feature (1)..(418): NCBI GI NO: 7488052 NR Description: probable ankyrin - Arabidopsis thaliana
  misc_feature (1)..(418): NCBI GI NO: 22331280 NR Description: dehydration-induced protein-related
  misc_feature (1)..(418): NCBI GI NO: 18390392 NR Description: dehydration-induced protein-related
  misc_feature (1)..(418): NCBI GI NO: 21536697 NR Description: ankyrin-like protein [Arabidopsis thaliana]
  misc_feature (1)..(418): NCBI GI NO: 14423548 NR Description: Unknown protein [Arabidopsis thaliana]
  misc_feature (203)..(418): NCBI GI NO: 25406781 NR Description: hypothetical protein
  misc_feature (1)..(200): NCBI GI NO: 25406781 NR Description: hypothetical protein
  misc_feature (43)..(418): NCBI GI NO: 24030225 NR Description: unknown protein [Arabidopsis thaliana]
  misc_feature (1)..(408): NCBI GI NO: 37535372 NR Description: hypothetical protein
MANMLNYPNNVLNNGGRLRTVFDVGCGVASFGGYLLSSDILTMSLAPNDVHQNQIQFALERGIPASLGVLGTKRLPYPSRSFELSHCSRCRIDWLQRDGILLLELDRVLRPGGYFAYSSPEAYAQDEEDLRIWREMSALVERMCWKIAAKRNQTVIWQKPLTNDCYLEREPGTQPPLCRSDNDPDAVWGVNMEACITSYSDHDHKTKGSGLAPWPARLTSPPPRLADFGYSTGMFEKDTELWRQRVDTYWDLLSPRIESDTVRNIMDMKASMGSFAAALKEKDVWVMNVVPEDGPNTLKLIYDRGLMGAVHSWCEAFSTYPRTYDLLHAWDIISDIKKKGCSEVDLLLEMDRILRPSGFIIIRDKQRVVDFVKKYLKALHWEEVGTKTDSDSDQDSDNVVFIVQKKLWLTSESLRDME

SEQ ID NO: 1885 - protein, 415 aa, Arabidopsis thaliana
  peptide (1)..(415): Ceres Seq. ID no. 13621919
  misc_feature (1)..(402): Pfam Name: Pfam Description:  Putative methyltransferase
  misc_feature (1)..(415): NCBI GI NO: 18414198 NR Description: dehydration-induced protein-related
  misc_feature (1)..(415): NCBI GI NO: 7488052 NR Description: probable ankyrin - Arabidopsis thaliana
  misc_feature (1)..(415): NCBI GI NO: 22331280 NR Description: dehydration-induced protein-related
  misc_feature (1)..(415): NCBI GI NO: 18390392 NR Description: dehydration-induced protein-related
  misc_feature (1)..(415): NCBI GI NO: 21536697 NR Description: ankyrin-like protein [Arabidopsis thaliana]
  misc_feature (1)..(415): NCBI GI NO: 14423548 NR Description: Unknown protein [Arabidopsis thaliana]
  misc_feature (200)..(415): NCBI GI NO: 25406781 NR Description: hypothetical protein
  misc_feature (1)..(197): NCBI GI NO: 25406781 NR Description: hypothetical protein
  misc_feature (40)..(415): NCBI GI NO: 24030225 NR Description: unknown protein [Arabidopsis thaliana]
  misc_feature (1)..(405): NCBI GI NO: 37535372 NR Description: hypothetical protein
MLNYPNNVLNNGGRLRTVFDVGCGVASFGGYLLSSDILTMSLAPNDVHQNQIQFALERGIPASLGVLGTKRLPYPSRSFELSHCSRCRIDWLQRDGILLLELDRVLRPGGYFAYSSPEAYAQDEEDLRIWREMSALVERMCWKIAAKRNQTVIWQKPLTNDCYLEREPGTQPPLCRSDNDPDAVWGVNMEACITSYSDHDHKTKGSGLAPWPARLTSPPPRLADFGYSTGMFEKDTELWRQRVDTYWDLLSPRIESDTVRNIMDMKASMGSFAAALKEKDVWVMNVVPEDGPNTLKLIYDRGLMGAVHSWCEAFSTYPRTYDLLHAWDIISDIKKKGCSEVDLLLEMDRILRPSGFIIIRDKQRVVDFVKKYLKALHWEEVGTKTDSDSDQDSDNVVFIVQKKLWLTSESLRDME

SEQ ID NO: 1886 - DNA, 592 bp, Arabidopsis thaliana
  misc_feature (1)..(592): Ceres Seq. ID no. 12421280
attcttcatttcctctgcctctttctcagatcacaaaaccctaatttcgaatctttattcttcagaatggctttctgtaacaaactcggtggtctattgagacaaaacatttcttctaacggaaatgttccggttacgtctatgctcggatctctccggttgatgtctaccaagcttttcatcggaggtctctcatggggaaccgatgacgcatccttaagggatgcttttgctcacttcggtgacgttgttgatgctaaagttatcgttgatagagagacaggaagatcaagggggtttggatttgtcaacttcaatgatgagggcgctgcaactgctgccatatcagagatggacggaaaggaactgaatggtcgtcacatccgagtgaatcctgctaatggatagaccagtggcagctacggtggtggtgatggtggtggttactaaacagaggatgtggttgtgaagaagagttaatggttctgtttagttggtttcttctattgaatcttatgttagtacaaaacctgaatgggatttgctgaaaactcattactcttttttttttggttaccaatcaatttggttg

SEQ ID NO: 1887 - protein, 135 aa, Arabidopsis thaliana
  peptide (1)..(135): Ceres Seq. ID no. 12421281
  misc_feature (59)..(130): Pfam Name: a.k.a. RRM, RBD, or RNP domain Pfam Description: RNA recognition motif.
  misc_feature (23)..(135): NCBI GI NO: 2826811 NR Description: AtGRP2 [Arabidopsis thaliana]
  misc_feature (23)..(135): NCBI GI NO: 15236359 NR Description: glycine-rich RNA-binding protein AtGRP2
  misc_feature (23)..(135): NCBI GI NO: 30682622 NR Description: glycine-rich RNA-binding protein (AtGRP2)
  misc_feature (42)..(135): NCBI GI NO: 322514 NR Description: glycine-rich RNA-binding protein
  misc_feature (23)..(135): NCBI GI NO: 15229525 NR Description: glycine-rich RNA-binding protein
  misc_feature (23)..(135): NCBI GI NO: 21553972 NR Description: glycine-rich RNA binding protein, putative
  misc_feature (23)..(135): NCBI GI NO: 7439995 NR Description: RNA binding protein 3 - wood tobacco
  misc_feature (23)..(135): NCBI GI NO: 7439994 NR Description: glycine-rich RNA-binding protein - garden pea
  misc_feature (23)..(135): NCBI GI NO: 7489099 NR Description: RNA-binding protein RGP-3 - wood tobacco
  misc_feature (23)..(135): NCBI GI NO: 1084415 NR Description: RNA-binding protein - wood tobacco
ILHFLCLFLRSQNPNFESLFFRMAFCNKLGGLLRQNISSNGNVPVTSMLGSLRLMSTKLFIGGLSWGTDDASLRDAFAHFGDVVDAKVIVDRETGRSRGFGFVNFNDEGAATAAISEMDGKELNGRHIRVNPANG

SEQ ID NO: 1888 - protein, 113 aa, Arabidopsis thaliana
  peptide (1)..(113): Ceres Seq. ID no. 12421282
  misc_feature (37)..(108): Pfam Name: a.k.a. RRM, RBD, or RNP domain Pfam Description: RNA recognition motif.
  misc_feature (1)..(113): NCBI GI NO: 2826811 NR Description: AtGRP2 [Arabidopsis thaliana]
  misc_feature (1)..(113): NCBI GI NO: 15236359 NR Description: glycine-rich RNA-binding protein AtGRP2
  misc_feature (1)..(113): NCBI GI NO: 30682622 NR Description: glycine-rich RNA-binding protein (AtGRP2)
  misc_feature (20)..(113): NCBI GI NO: 322514 NR Description: glycine-rich RNA-binding protein
  misc_feature (1)..(113): NCBI GI NO: 15229525 NR Description: glycine-rich RNA-binding protein
  misc_feature (1)..(113): NCBI GI NO: 21553972 NR Description: glycine-rich RNA binding protein, putative
  misc_feature (1)..(113): NCBI GI NO: 7439995 NR Description: RNA binding protein 3 - wood tobacco
  misc_feature (1)..(113): NCBI GI NO: 7439994 NR Description: glycine-rich RNA-binding protein - garden pea
  misc_feature (1)..(113): NCBI GI NO: 7489099 NR Description: RNA-binding protein RGP-3 - wood tobacco
  misc_feature (1)..(113): NCBI GI NO: 1084415 NR Description: RNA-binding protein - wood tobacco
MAFCNKLGGLLRQNISSNGNVPVTSMLGSLRLMSTKLFIGGLSWGTDDASLRDAFAHFGDVVDAKVIVDRETGRSRGFGFVNFNDEGAATAAISEMDGKELNGRHIRVNPANG

SEQ ID NO: 1889 - protein, 88 aa, Arabidopsis thaliana
  peptide (1)..(88): Ceres Seq. ID no. 12421283
  misc_feature (12)..(83): Pfam Name: a.k.a. RRM, RBD, or RNP domain Pfam Description: RNA recognition motif.
  misc_feature (1)..(88): NCBI GI NO: 2826811 NR Description: AtGRP2 [Arabidopsis thaliana]
  misc_feature (1)..(88): NCBI GI NO: 15236359 NR Description: glycine-rich RNA-binding protein AtGRP2
  misc_feature (1)..(88): NCBI GI NO: 30682622 NR Description: glycine-rich RNA-binding protein (AtGRP2)
  misc_feature (1)..(88): NCBI GI NO: 322514 NR Description: glycine-rich RNA-binding protein
  misc_feature (1)..(88): NCBI GI NO: 15229525 NR Description: glycine-rich RNA-binding protein
  misc_feature (1)..(88): NCBI GI NO: 21553972 NR Description: glycine-rich RNA binding protein, putative
  misc_feature (1)..(88): NCBI GI NO: 7439995 NR Description: RNA binding protein 3 - wood tobacco
  misc_feature (1)..(88): NCBI GI NO: 7439994 NR Description: glycine-rich RNA-binding protein - garden pea
  misc_feature (1)..(88): NCBI GI NO: 7489099 NR Description: RNA-binding protein RGP-3 - wood tobacco
  misc_feature (1)..(88): NCBI GI NO: 1084415 NR Description: RNA-binding protein - wood tobacco
MLGSLRLMSTKLFIGGLSWGTDDASLRDAFAHFGDVVDAKVIVDRETGRSRGFGFVNFNDEGAATAAISEMDGKELNGRHIRVNPANG

SEQ ID NO: 1890 - DNA, 1030 bp, Arabidopsis thaliana
  misc_feature (1)..(1030): Ceres Seq. ID no. 13576627
accgttaaagatgacgacgacgactgcttctctggttaagacttttctgtttcggtgcgactcgttttcatctttcaaattcaaatgcaaattcgaatctcccgcgaaaacgcgattgctctctccggcgaccgagaaacatgttgtcagatcgtcaagagcctggcgtattcgttgcttatccgatgatcctggttcgagtcatgttttcgttgcaagtagaaggaaaatggtagtcttgttgtcgacggtgcagcttctgtctcatatgcttccgcaaaacgggaacgcagctgagatttatccggtgatgcaaaacgaaataaggaaagtggtgacaaagggcaaggctgctggtgtgcttcgtttagtgtttcatgatgctggaacctttgaactggacgatcattctggtggcatcaacggatctattgcttatgaacttgagagacctgagaacataggtttgaagaaatccttaaaggcactaaatccctctcttttatctgttggcgttctagcgaaagcaaaggttaaggttgacgagatacaaccagtgtcttgggcggatatgatctctgtcgctgggtctgaagcagtttcaatatgtggcggcccaacaattccagtagttttgggaagacttgattcagcgcaacctgatccagaaggcaagctacctccagaaaccctgagtgcctcgggattgaaagaatgcttcaaaagaaaaggattttcgacccaggagcttgttgccttatctggggcacatacgattgggagtaaaggctttggagatccgacagtttttgacaatgcatactacaaaatccttcttgaaaaaccatggacgtcaacttctaagatgacgagcatggtcgggcttccttcggatcatgctttagtgcaggatgatgagtgcttaaggtgggtgaaacggtatgcagaagaccaagacaagttcttcgaagacttcacaaatgcttatatcaaactagtaaattctggggccaaatggaatatgttatga

SEQ ID NO: 1891 - protein, 342 aa, Arabidopsis thaliana
  peptide (1)..(342): Ceres Seq. ID no. 13576628
  misc_feature (108)..(317): Pfam Name: Pfam Description:  Peroxidase
  misc_feature (4)..(342): NCBI GI NO: 30689347 NR Description: ascorbate peroxidase family [Arabidopsis thaliana]
  misc_feature (186)..(284): NCBI GI NO: 7487935 NR Description: L-ascorbate peroxidase homolog F10M6
  misc_feature (104)..(137): NCBI GI NO: 7487935 NR Description: L-ascorbate peroxidase homolog F10M6
  misc_feature (310)..(342): NCBI GI NO: 7487935 NR Description: L-ascorbate peroxidase homolog F10M6
  misc_feature (82)..(339): NCBI GI NO: 27817866 NR Description: OJ1081_B12.15
  misc_feature (38)..(267): NCBI GI NO: 24496465 NR Description: stromal ascorbate peroxidase [Retama raetam]
  misc_feature (270)..(340): NCBI GI NO: 24496465 NR Description: stromal ascorbate peroxidase [Retama raetam]
  misc_feature (105)..(336): NCBI GI NO: 6682242 NR Description: putative ascorbate peroxidase
  misc_feature (105)..(336): NCBI GI NO: 30680940 NR Description: ascorbate peroxidase (APX) [Arabidopsis thaliana]
  misc_feature (105)..(336): NCBI GI NO: 555576 NR Description: ascorbate peroxidase [Arabidopsis thaliana]
PLKMTTTTASLVKTFLFRCDSFSSFKFKCKFESPAKTRLLSPATEKHVVRSSRAWRIRCLSDDPGSSHVFVASRRKMVVLLSTVQLLSHMLPQNGNAAEIYPVMQNEIRKVVTKGKAAGVLRLVFHDAGTFELDDHSGGINGSIAYELERPENIGLKKSLKALNPSLLSVGVLAKAKVKVDEIQPVSWADMISVAGSEAVSICGGPTIPVVLGRLDSAQPDPEGKLPPETLSASGLKECFKRKGFSTQELVALSGAHTIGSKGFGDPTVFDNAYYKILLEKPWTSTSKMTSMVGLPSDHALVQDDECLRWVKRYAEDQDKFFEDFTNAYIKLVNSGAKWNML

SEQ ID NO: 1892 - protein, 339 aa, Arabidopsis thaliana
  peptide (1)..(339): Ceres Seq. ID no. 13576629
  misc_feature (105)..(314): Pfam Name: Pfam Description:  Peroxidase
  misc_feature (1)..(339): NCBI GI NO: 30689347 NR Description: ascorbate peroxidase family [Arabidopsis thaliana]
  misc_feature (183)..(281): NCBI GI NO: 7487935 NR Description: L-ascorbate peroxidase homolog F10M6
  misc_feature (101)..(134): NCBI GI NO: 7487935 NR Description: L-ascorbate peroxidase homolog F10M6
  misc_feature (307)..(339): NCBI GI NO: 7487935 NR Description: L-ascorbate peroxidase homolog F10M6
  misc_feature (79)..(336): NCBI GI NO: 27817866 NR Description: OJ1081_B12.15
  misc_feature (35)..(264): NCBI GI NO: 24496465 NR Description: stromal ascorbate peroxidase [Retama raetam]
  misc_feature (267)..(337): NCBI GI NO: 24496465 NR Description: stromal ascorbate peroxidase [Retama raetam]
  misc_feature (102)..(333): NCBI GI NO: 6682242 NR Description: putative ascorbate peroxidase
  misc_feature (102)..(333): NCBI GI NO: 30680940 NR Description: ascorbate peroxidase (APX) [Arabidopsis thaliana]
  misc_feature (102)..(333): NCBI GI NO: 555576 NR Description: ascorbate peroxidase [Arabidopsis thaliana]
MTTTTASLVKTFLFRCDSFSSFKFKCKFESPAKTRLLSPATEKHVVRSSRAWRIRCLSDDPGSSHVFVASRRKMVVLLSTVQLLSHMLPQNGNAAEIYPVMQNEIRKVVTKGKAAGVLRLVFHDAGTFELDDHSGGINGSIAYELERPENIGLKKSLKALNPSLLSVGVLAKAKVKVDEIQPVSWADMISVAGSEAVSICGGPTIPVVLGRLDSAQPDPEGKLPPETLSASGLKECFKRKGFSTQELVALSGAHTIGSKGFGDPTVFDNAYYKILLEKPWTSTSKMTSMVGLPSDHALVQDDECLRWVKRYAEDQDKFFEDFTNAYIKLVNSGAKWNML

SEQ ID NO: 1893 - protein, 266 aa, Arabidopsis thaliana
  peptide (1)..(266): Ceres Seq. ID no. 13576630
  misc_feature (32)..(241): Pfam Name: Pfam Description:  Peroxidase
  misc_feature (1)..(266): NCBI GI NO: 30689347 NR Description: ascorbate peroxidase family [Arabidopsis thaliana]
  misc_feature (110)..(208): NCBI GI NO: 7487935 NR Description: L-ascorbate peroxidase homolog F10M6
  misc_feature (28)..(61): NCBI GI NO: 7487935 NR Description: L-ascorbate peroxidase homolog F10M6
  misc_feature (234)..(266): NCBI GI NO: 7487935 NR Description: L-ascorbate peroxidase homolog F10M6
  misc_feature (6)..(263): NCBI GI NO: 27817866 NR Description: OJ1081_B12.15
  misc_feature (1)..(191): NCBI GI NO: 24496465 NR Description: stromal ascorbate peroxidase [Retama raetam]
  misc_feature (194)..(264): NCBI GI NO: 24496465 NR Description: stromal ascorbate peroxidase [Retama raetam]
  misc_feature (29)..(260): NCBI GI NO: 6682242 NR Description: putative ascorbate peroxidase
  misc_feature (29)..(260): NCBI GI NO: 30680940 NR Description: ascorbate peroxidase (APX) [Arabidopsis thaliana]
  misc_feature (29)..(260): NCBI GI NO: 555576 NR Description: ascorbate peroxidase [Arabidopsis thaliana]
MVVLLSTVQLLSHMLPQNGNAAEIYPVMQNEIRKVVTKGKAAGVLRLVFHDAGTFELDDHSGGINGSIAYELERPENIGLKKSLKALNPSLLSVGVLAKAKVKVDEIQPVSWADMISVAGSEAVSICGGPTIPVVLGRLDSAQPDPEGKLPPETLSASGLKECFKRKGFSTQELVALSGAHTIGSKGFGDPTVFDNAYYKILLEKPWTSTSKMTSMVGLPSDHALVQDDECLRWVKRYAEDQDKFFEDFTNAYIKLVNSGAKWNML

SEQ ID NO: 1894 - DNA, 1228 bp, Arabidopsis thaliana
  misc_feature (1)..(1228): Ceres Seq. ID no. 12337565
ttcagaaagtgttcataactggtgtccccaaactcaaaagatctgagattgaagctgcttgtgaagattttagtaatgtcattgggtcttgccccattggtacattgttcaaagggacgctatcaagtggggtggagatagctgtggcttctgttgctactgcgtctgccaaagaatggacaaataacatagaaatgcagttcagaaagaagatcgaaatgttatccaagataaaccacaagaattttgtcaaccttcttggttactgtgaagaagaagaacctttcactaggatcttggtctttgaatatgcatcaaacggaacagtctttgaacatttacactataaagaatcagaacacttggactgggtaatgcggctaagaatagccatgggcatagcttattgccttgaccatatgcacggactcaagccacctatagtccacagcaatcttctctcatcatcagttcaactcacagaggactatgcagtcaaaattgcggatttcaattttggatacctaaaaggcccatccgagacagaaagcagcaccaatgcactcatagatacaaacatctcagaaacaacacaagaagacaatgttcacagcttcgggttgctgttgtttgaactgatgacaggaaaactcccggagtcggttaaaaaaggcgactcgatagataccggattggctgtcttcttgagaggaaagacattaagggagatggtggatccgacaattgaaagctttgacgagaagattgagaatataggtgaagtgatcaaaagctgcataagagcagacgcgaaacagagaccgataatgaaggaagtcacagggagattacgagagatcactggattatcaccagacgacactatcccaaaactttcaccgctctggtgggcagagctggaagttctgtccactgcgtgaagagacaactactgaacttcacaaaaaaatctgtaagtattaatatgaagatttgagtgaggtttttgagtctcttagaagctcttggcttctctttaggctactttcatctatcaatctatatataagtatggaacttagtttatataacggctttaaaattcggtggatctatttggtcgtttatgtcgtaaacagaaaacggtaatacccctttttggtgtgcataatgttggtgggtggttactgtctttgtaaattagtgttactatgttcttgatatgttt

SEQ ID NO: 1895 - protein, 312 aa, Arabidopsis thaliana
  peptide (1)..(312): Ceres Seq. ID no. 12337566
  misc_feature (1)..(312): NCBI GI NO: 15228810 NR Description: putative protein kinase; protein id: At3g56050
  misc_feature (1)..(312): NCBI GI NO: 4588001 NR Description: hypothetical Ser-Thr protein kinase
  misc_feature (1)..(312): NCBI GI NO: 18405327 NR Description: putative protein kinase; protein id: At2g40270
  misc_feature (1)..(311): NCBI GI NO: 28916446 NR Description: ser-thr protein kinase [Gossypium hirsutum]
  misc_feature (73)..(312): NCBI GI NO: 25408681 NR Description: probable protein kinase
  misc_feature (1)..(311): NCBI GI NO: 7486276 NR Description: hypothetical protein F28A21
  misc_feature (1)..(311): NCBI GI NO: 7268658 NR Description: putative protein (fragment) [Arabidopsis thaliana]
  misc_feature (1)..(311): NCBI GI NO: 30684487 NR Description: leucine-rich repeat transmembrane protein kinase
  misc_feature (1)..(311): NCBI GI NO: 15242513 NR Description: leucine-rich repeat transmembrane protein kinase
  misc_feature (1)..(310): NCBI GI NO: 34898222 NR Description: P0034A04.22
QKVFITGVPKLKRSEIEAACEDFSNVIGSCPIGTLFKGTLSSGVEIAVASVATASAKEWTNNIEMQFRKKIEMLSKINHKNFVNLLGYCEEEEPFTRILVFEYASNGTVFEHLHYKESEHLDWVMRLRIAMGIAYCLDHMHGLKPPIVHSNLLSSSVQLTEDYAVKIADFNFGYLKGPSETESSTNALIDTNISETTQEDNVHSFGLLLFELMTGKLPESVKKGDSIDTGLAVFLRGKTLREMVDPTIESFDEKIENIGEVIKSCIRADAKQRPIMKEVTGRLREITGLSPDDTIPKLSPLWWAELEVLSTA

SEQ ID NO: 1896 - protein, 248 aa, Arabidopsis thaliana
  peptide (1)..(248): Ceres Seq. ID no. 12337567
  misc_feature (1)..(248): NCBI GI NO: 15228810 NR Description: putative protein kinase; protein id: At3g56050
  misc_feature (1)..(248): NCBI GI NO: 4588001 NR Description: hypothetical Ser-Thr protein kinase
  misc_feature (1)..(248): NCBI GI NO: 18405327 NR Description: putative protein kinase; protein id: At2g40270
  misc_feature (1)..(247): NCBI GI NO: 28916446 NR Description: ser-thr protein kinase [Gossypium hirsutum]
  misc_feature (9)..(248): NCBI GI NO: 25408681 NR Description: probable protein kinase
  misc_feature (1)..(247): NCBI GI NO: 7486276 NR Description: hypothetical protein F28A21
  misc_feature (1)..(247): NCBI GI NO: 7268658 NR Description: putative protein (fragment) [Arabidopsis thaliana]
  misc_feature (1)..(247): NCBI GI NO: 30684487 NR Description: leucine-rich repeat transmembrane protein kinase
  misc_feature (1)..(247): NCBI GI NO: 15242513 NR Description: leucine-rich repeat transmembrane protein kinase
  misc_feature (1)..(246): NCBI GI NO: 34898222 NR Description: P0034A04.22
MQFRKKIEMLSKINHKNFVNLLGYCEEEEPFTRILVFEYASNGTVFEHLHYKESEHLDWVMRLRIAMGIAYCLDHMHGLKPPIVHSNLLSSSVQLTEDYAVKIADFNFGYLKGPSETESSTNALIDTNISETTQEDNVHSFGLLLFELMTGKLPESVKKGDSIDTGLAVFLRGKTLREMVDPTIESFDEKIENIGEVIKSCIRADAKQRPIMKEVTGRLREITGLSPDDTIPKLSPLWWAELEVLSTA

SEQ ID NO: 1897 - protein, 240 aa, Arabidopsis thaliana
  peptide (1)..(240): Ceres Seq. ID no. 12337568
  misc_feature (1)..(240): NCBI GI NO: 15228810 NR Description: putative protein kinase; protein id: At3g56050
  misc_feature (1)..(240): NCBI GI NO: 4588001 NR Description: hypothetical Ser-Thr protein kinase
  misc_feature (1)..(240): NCBI GI NO: 18405327 NR Description: putative protein kinase; protein id: At2g40270
  misc_feature (1)..(239): NCBI GI NO: 28916446 NR Description: ser-thr protein kinase [Gossypium hirsutum]
  misc_feature (1)..(240): NCBI GI NO: 25408681 NR Description: probable protein kinase
  misc_feature (1)..(239): NCBI GI NO: 7486276 NR Description: hypothetical protein F28A21
  misc_feature (1)..(239): NCBI GI NO: 7268658 NR Description: putative protein (fragment) [Arabidopsis thaliana]
  misc_feature (1)..(239): NCBI GI NO: 30684487 NR Description: leucine-rich repeat transmembrane protein kinase
  misc_feature (1)..(239): NCBI GI NO: 15242513 NR Description: leucine-rich repeat transmembrane protein kinase
  misc_feature (1)..(238): NCBI GI NO: 34898222 NR Description: P0034A04.22
MLSKINHKNFVNLLGYCEEEEPFTRILVFEYASNGTVFEHLHYKESEHLDWVMRLRIAMGIAYCLDHMHGLKPPIVHSNLLSSSVQLTEDYAVKIADFNFGYLKGPSETESSTNALIDTNISETTQEDNVHSFGLLLFELMTGKLPESVKKGDSIDTGLAVFLRGKTLREMVDPTIESFDEKIENIGEVIKSCIRADAKQRPIMKEVTGRLREITGLSPDDTIPKLSPLWWAELEVLSTA

SEQ ID NO: 1898 - DNA, 950 bp, Arabidopsis thaliana
  misc_feature (1)..(950): Ceres Seq. ID no. 13491028
actcttactctgttctcgctacagaatctcctgggaaaaaaaaaagaaacttgatccacccgaattccccaaatcttcacaatttctggaaactctctcgatcgtgaagcagaaaagtgaggttccaaatgggttctgtttcgggtcaaacccgaattacaacgatgaacctctcgctctcaacagcagagaagaaccctaatttccgctcgtcgcttctcaattctaagaacgcaatttcagatactttaggggtctcttccaaatgcagtacattcctcaggggtcaatttcaaagaatacatttttcttggctacaacacactcgacctttgagaaaacgaacagtatttggtcacgtgagctgcgtcatgccgttaacggaagagaatgtggagagagtgttagacgaagtacgaccatctctaatggccgacggaggaaacgtggcgttgcacgaaatcgacggacttgtggtggttttaaagctacaaggagcttgtggttcgtgtcctagctcatcaatgacgttgaagatgggaatcgagagtcgtcttcgagacaagattccagagatcatgtccgttgagcagtttcttgaatccgagacaggaggtttagagctgaacgatgagaacattgagaaggttctctctgagttaaggccgtacctatccggtactggaggtggggggcttgagttagttgagattgatggttacgtggtcaaggttcgactcactggaccagctgctggagtcatgactgttcgtgtcgcgttgactcaaaaactgagggaaacaattccttctataggtgcagtccagcttctagagtgacattaacctttttattttgtaacttatatacaaggcctatttttgattcaatatattttatttccaattatataattagtacaactaatacaataaccatttctgttgaag

SEQ ID NO: 1899 - protein, 236 aa, Arabidopsis thaliana
  peptide (1)..(236): Ceres Seq. ID no. 13491029
  misc_feature (89)..(156): Pfam Name: Pfam Description:  NifU-like domain
  misc_feature (1)..(236): NCBI GI NO: 18416645 NR Description: nitrogen fixation protein, putative  (NifU)
  misc_feature (1)..(236): NCBI GI NO: 21554503 NR Description: nitrogen fixation like protein
  misc_feature (13)..(236): NCBI GI NO: 7485833 NR Description: hypothetical protein F20B18
  misc_feature (23)..(235): NCBI GI NO: 18423084 NR Description: expressed protein [Arabidopsis thaliana]
  misc_feature (65)..(235): NCBI GI NO: 30698492 NR Description: NifU1 [Oryza sativa (japonica cultivar-group)]
  misc_feature (23)..(230): NCBI GI NO: 8777425 NR Description: gene_id:K9P8
  misc_feature (70)..(157): NCBI GI NO: 22298836 NR Description: ORF_ID:tsl1293~similar to NifU protein
  misc_feature (82)..(157): NCBI GI NO: 16332125 NR Description: NifU protein [Synechocystis sp. PCC 6803]
  misc_feature (82)..(157): NCBI GI NO: 33239869 NR Description: Thioredoxin family protein
  misc_feature (81)..(157): NCBI GI NO: 37522446 NR Description: gsl2877 [Gloeobacter violaceus]
MGSVSGQTRITTMNLSLSTAEKNPNFRSSLLNSKNAISDTLGVSSKCSTFLRGQFQRIHFSWLQHTRPLRKRTVFGHVSCVMPLTEENVERVLDEVRPSLMADGGNVALHEIDGLVVVLKLQGACGSCPSSSMTLKMGIESRLRDKIPEIMSVEQFLESETGGLELNDENIEKVLSELRPYLSGTGGGGLELVEIDGYVVKVRLTGPAAGVMTVRVALTQKLRETIPSIGAVQLLE

SEQ ID NO: 1900 - protein, 224 aa, Arabidopsis thaliana
  peptide (1)..(224): Ceres Seq. ID no. 13491030
  misc_feature (77)..(144): Pfam Name: Pfam Description:  NifU-like domain
  misc_feature (1)..(224): NCBI GI NO: 18416645 NR Description: nitrogen fixation protein, putative  (NifU)
  misc_feature (1)..(224): NCBI GI NO: 21554503 NR Description: nitrogen fixation like protein
  misc_feature (1)..(224): NCBI GI NO: 7485833 NR Description: hypothetical protein F20B18
  misc_feature (11)..(223): NCBI GI NO: 18423084 NR Description: expressed protein [Arabidopsis thaliana]
  misc_feature (53)..(223): NCBI GI NO: 30698492 NR Description: NifU1 [Oryza sativa (japonica cultivar-group)]
  misc_feature (11)..(218): NCBI GI NO: 8777425 NR Description: gene_id:K9P8
  misc_feature (58)..(145): NCBI GI NO: 22298836 NR Description: ORF_ID:tsl1293~similar to NifU protein
  misc_feature (70)..(145): NCBI GI NO: 16332125 NR Description: NifU protein [Synechocystis sp. PCC 6803]
  misc_feature (70)..(145): NCBI GI NO: 33239869 NR Description: Thioredoxin family protein
  misc_feature (69)..(145): NCBI GI NO: 37522446 NR Description: gsl2877 [Gloeobacter violaceus]
MNLSLSTAEKNPNFRSSLLNSKNAISDTLGVSSKCSTFLRGQFQRIHFSWLQHTRPLRKRTVFGHVSCVMPLTEENVERVLDEVRPSLMADGGNVALHEIDGLVVVLKLQGACGSCPSSSMTLKMGIESRLRDKIPEIMSVEQFLESETGGLELNDENIEKVLSELRPYLSGTGGGGLELVEIDGYVVKVRLTGPAAGVMTVRVALTQKLRETIPSIGAVQLLE

SEQ ID NO: 1901 - protein, 155 aa, Arabidopsis thaliana
  peptide (1)..(155): Ceres Seq. ID no. 13491031
  misc_feature (8)..(75): Pfam Name: Pfam Description:  NifU-like domain
  misc_feature (1)..(155): NCBI GI NO: 18416645 NR Description: nitrogen fixation protein, putative  (NifU)
  misc_feature (1)..(155): NCBI GI NO: 21554503 NR Description: nitrogen fixation like protein
  misc_feature (1)..(155): NCBI GI NO: 7485833 NR Description: hypothetical protein F20B18
  misc_feature (1)..(154): NCBI GI NO: 18423084 NR Description: expressed protein [Arabidopsis thaliana]
  misc_feature (1)..(154): NCBI GI NO: 30698492 NR Description: NifU1 [Oryza sativa (japonica cultivar-group)]
  misc_feature (1)..(149): NCBI GI NO: 8777425 NR Description: gene_id:K9P8
  misc_feature (1)..(76): NCBI GI NO: 22298836 NR Description: ORF_ID:tsl1293~similar to NifU protein
  misc_feature (1)..(76): NCBI GI NO: 16332125 NR Description: NifU protein [Synechocystis sp. PCC 6803]
  misc_feature (1)..(76): NCBI GI NO: 33239869 NR Description: Thioredoxin family protein
  misc_feature (1)..(76): NCBI GI NO: 37522446 NR Description: gsl2877 [Gloeobacter violaceus]
MPLTEENVERVLDEVRPSLMADGGNVALHEIDGLVVVLKLQGACGSCPSSSMTLKMGIESRLRDKIPEIMSVEQFLESETGGLELNDENIEKVLSELRPYLSGTGGGGLELVEIDGYVVKVRLTGPAAGVMTVRVALTQKLRETIPSIGAVQLLE

SEQ ID NO: 1902 - DNA, 1080 bp, Arabidopsis thaliana
  misc_feature (1)..(1080): Ceres Seq. ID no. 12337138
gatcacaaaaaattagaatcatggaggtcgagagagaccagcacaagcctccgttgtctctacaaaacaacaaaatcccatcatcacaaaacttcccagtcgtcgacctaagcaacaccaatggggagctcgtggcgcgtaaagtggcaaaggcgagcgaagagtggggaatttttcaggtagttaaccacgggatcccaaccgaactaatccggaggttgcacaaggtggatacacagttctttgagctcccagagtccaagaaagaagccgtggccaaaccagcgaactccaaagagatacaaggatatgagatggatgatgtacaaggtagaaggagtcatatcttccataatctatatccatcatcgtcagtcaattatgcattctggcctaagaatcctcctgaatacagagaggtgactgaggagtttgcaaagcatgcaaagcagctagcggaagagatcctcggtttgctatccgaagggttaggtttacaacgtgagatgttgaagttagcattcggggacgatagtgctggttatcttatgaagatcaactattaccggccgtgtccagagccagattgggtcatgggaataaaagcccacactgatttcaatgaactcacacttctcattcccaatgaaattttcggacttcaagtgttcaaggaagaccgctggcttgatgtagattatatatatcccgcggttattatcatcatcggagatcagatcatgaagatgagcaacggaaggtacaacaatgtgttgcatagaaccttgatggataaaaagaaaacgaggatgtcgtcggtggttcatatcaagcctccttatgatatggttgtgaagccatttcccgaactcaccagcggcgataatcctcccaagttcgagcctttaacttaccaggattacatagacattgaagtccccaagctttctcgactgatcaagaattgacttctttgtcgttgtatgtatgttgtttgttgttgctctgtttcatttggccgtttggcattgttgtaaccggtttctattaattgaagttcaaacaaaaaaaatttgactc

SEQ ID NO: 1903 - protein, 321 aa, Arabidopsis thaliana
  peptide (1)..(321): Ceres Seq. ID no. 12337139
  misc_feature (179)..(278): Pfam Name: II Pfam Description: 2OG-Fe
  misc_feature (7)..(288): NCBI GI NO: 22328029 NR Description: similar to 1-aminocyclopropane-1-carboxylic acid oxidase-like protein
  misc_feature (1)..(315): NCBI GI NO: 15242339 NR Description: flavonol synthase
  misc_feature (18)..(319): NCBI GI NO: 15242827 NR Description: flavonol synthase; protein id: At5g63590
  misc_feature (18)..(319): NCBI GI NO: 21554244 NR Description: flavonol synthase [Arabidopsis thaliana]
  misc_feature (7)..(312): NCBI GI NO: 15242828 NR Description: 1-aminocyclopropane-1-carboxylic acid oxidase-like
  misc_feature (7)..(307): NCBI GI NO: 10177039 NR Description: flavonol synthase [Arabidopsis thaliana]
  misc_feature (32)..(308): NCBI GI NO: 6015164 NR Description: Flavonol synthase (FLS)
  misc_feature (8)..(315): NCBI GI NO: 14916566 NR Description: Flavonol synthase (FLS) (CitFLS)
  misc_feature (9)..(315): NCBI GI NO: 29123532 NR Description: flavonol synthase [Allium cepa]
  misc_feature (32)..(315): NCBI GI NO: 14916564 NR Description: Flavonol synthase (FLS)
SQKIRIMEVERDQHKPPLSLQNNKIPSSQNFPVVDLSNTNGELVARKVAKASEEWGIFQVVNHGIPTELIRRLHKVDTQFFELPESKKEAVAKPANSKEIQGYEMDDVQGRRSHIFHNLYPSSSVNYAFWPKNPPEYREVTEEFAKHAKQLAEEILGLLSEGLGLQREMLKLAFGDDSAGYLMKINYYRPCPEPDWVMGIKAHTDFNELTLLIPNEIFGLQVFKEDRWLDVDYIYPAVIIIIGDQIMKMSNGRYNNVLHRTLMDKKKTRMSSVVHIKPPYDMVVKPFPELTSGDNPPKFEPLTYQDYIDIEVPKLSRLIKN

SEQ ID NO: 1904 - protein, 315 aa, Arabidopsis thaliana
  peptide (1)..(315): Ceres Seq. ID no. 12337140
  misc_feature (173)..(272): Pfam Name: II Pfam Description: 2OG-Fe
  misc_feature (1)..(282): NCBI GI NO: 22328029 NR Description: similar to 1-aminocyclopropane-1-carboxylic acid oxidase-like protein
  misc_feature (1)..(309): NCBI GI NO: 15242339 NR Description: flavonol synthase
  misc_feature (12)..(313): NCBI GI NO: 15242827 NR Description: flavonol synthase; protein id: At5g63590
  misc_feature (12)..(313): NCBI GI NO: 21554244 NR Description: flavonol synthase [Arabidopsis thaliana]
  misc_feature (1)..(306): NCBI GI NO: 15242828 NR Description: 1-aminocyclopropane-1-carboxylic acid oxidase-like
  misc_feature (1)..(301): NCBI GI NO: 10177039 NR Description: flavonol synthase [Arabidopsis thaliana]
  misc_feature (26)..(302): NCBI GI NO: 6015164 NR Description: Flavonol synthase (FLS)
  misc_feature (2)..(309): NCBI GI NO: 14916566 NR Description: Flavonol synthase (FLS) (CitFLS)
  misc_feature (3)..(309): NCBI GI NO: 29123532 NR Description: flavonol synthase [Allium cepa]
  misc_feature (26)..(309): NCBI GI NO: 14916564 NR Description: Flavonol synthase (FLS)
MEVERDQHKPPLSLQNNKIPSSQNFPVVDLSNTNGELVARKVAKASEEWGIFQVVNHGIPTELIRRLHKVDTQFFELPESKKEAVAKPANSKEIQGYEMDDVQGRRSHIFHNLYPSSSVNYAFWPKNPPEYREVTEEFAKHAKQLAEEILGLLSEGLGLQREMLKLAFGDDSAGYLMKINYYRPCPEPDWVMGIKAHTDFNELTLLIPNEIFGLQVFKEDRWLDVDYIYPAVIIIIGDQIMKMSNGRYNNVLHRTLMDKKKTRMSSVVHIKPPYDMVVKPFPELTSGDNPPKFEPLTYQDYIDIEVPKLSRLIKN

SEQ ID NO: 1905 - protein, 217 aa, Arabidopsis thaliana
  peptide (1)..(217): Ceres Seq. ID no. 12337141
  misc_feature (75)..(174): Pfam Name: II Pfam Description: 2OG-Fe
  misc_feature (1)..(184): NCBI GI NO: 22328029 NR Description: similar to 1-aminocyclopropane-1-carboxylic acid oxidase-like protein
  misc_feature (1)..(211): NCBI GI NO: 15242339 NR Description: flavonol synthase
  misc_feature (1)..(215): NCBI GI NO: 15242827 NR Description: flavonol synthase; protein id: At5g63590
  misc_feature (1)..(215): NCBI GI NO: 21554244 NR Description: flavonol synthase [Arabidopsis thaliana]
  misc_feature (1)..(208): NCBI GI NO: 15242828 NR Description: 1-aminocyclopropane-1-carboxylic acid oxidase-like
  misc_feature (1)..(203): NCBI GI NO: 10177039 NR Description: flavonol synthase [Arabidopsis thaliana]
  misc_feature (1)..(204): NCBI GI NO: 6015164 NR Description: Flavonol synthase (FLS)
  misc_feature (1)..(211): NCBI GI NO: 14916566 NR Description: Flavonol synthase (FLS) (CitFLS)
  misc_feature (1)..(211): NCBI GI NO: 29123532 NR Description: flavonol synthase [Allium cepa]
  misc_feature (1)..(211): NCBI GI NO: 14916564 NR Description: Flavonol synthase (FLS)
MDDVQGRRSHIFHNLYPSSSVNYAFWPKNPPEYREVTEEFAKHAKQLAEEILGLLSEGLGLQREMLKLAFGDDSAGYLMKINYYRPCPEPDWVMGIKAHTDFNELTLLIPNEIFGLQVFKEDRWLDVDYIYPAVIIIIGDQIMKMSNGRYNNVLHRTLMDKKKTRMSSVVHIKPPYDMVVKPFPELTSGDNPPKFEPLTYQDYIDIEVPKLSRLIKN

SEQ ID NO: 1906 - DNA, 1717 bp, Arabidopsis thaliana
  misc_feature (1)..(1717): Ceres Seq. ID no. 13621936
aaagaaagagaaagagaagagctggattcacatggtcttgttctttctctctccttcttttctcatcttgcggcttccctttctctctctatcgccacaatgatcattaccaaccaaactgattgaaactcatttgttctctctctctcaaatccactctctctctttcttttctcttctcctctctgtgtctctatcgccatggctgatgataaggagatgcctgctgctgtagttgatggacatgatcaagtcactggtcatattatttccaccacaatcggtggcaaaaatggtgaaccaaaacagacaattagttacatggcggagcgagttgttggtacaggctcgttcgggatcgttttccaagcaaaatgtttggagactggagaaaccgtggcgataaagaaggttttgcaagatagaagatacaagaaccgagaacttcagttgatgcgtgtgatggatcatccgaatgtggtttgtttgaagcattgcttcttttcgactacaagtaaagacgagcttttcttgaacttggttatggagtatgtccctgagagcttgtatcgagttctgaaacattatagtagtgcaaaccaaagaatgcctcttgtctatgttaaactttacatgtatcagatcttccggggacttgcttacattcacaatgttgctggagtttgtcacagagatctaaagcctcaaaatcttctggttgatcctcttactcatcaagtcaaaatctgtgactttggcagtgcgaaacagctcgttaaaggtgaagccaacatttcttacatctgctcacgattctaccgtgcacccgagctcatatttggtgccactgagtacacaacttctattgatatctggtctgctggttgtgttcttgctgagcttcttcttggtcagccattatttcccggagaaaatgctgtggatcagctcgttgaaattataaaagttcttggtacaccaactcgagaagaaatccgttgtatgaatccacattacacagatttcaggtttccacagataaaggcacatccctggcacaagatcttccacaaaaggatgcccccagaagcgattgattttgcatcaaggctgcttcaatactctccaagtctaagatgcacagcgctcgaagcttgtgcacatccgttctttgatgaactcagagaaccaaacgctcgtttaccaaatggacggcctttcccgcctctcttcaacttcaaacaagaagtagctggatcatcacctgaactggtcaacaagttgattccagaccatatcaagagacaattgggtctaagcttcttgaatcaatctggaacttaaaagggatcctgcaaaagacaactacttttttatatataatgtaccattacacgagccacaaggtcgtagttgaaggcaaacgtggaggacacaattcaaagtttttcctcctcaaactcgttcagacaaagccagctgctagcaaaaccaactacccaaatctgcgaaaacaaaaactctccagtgttgtatctgcttatttctcttctcttttcaagtttggtgaaaaacacagtctcctctttgcttcatttcttctttctttcccccttatgtaaatgagtttagtcagaagtttttttatatagtaaagtttgggcagaaggtgaagaatgtaatcaaagtgatactctttcaacgaggagcttctttc

SEQ ID NO: 1907 - protein, 380 aa, Arabidopsis thaliana
  peptide (1)..(380): Ceres Seq. ID no. 13621937
  misc_feature (40)..(324): Pfam Name: Pfam Description:  Protein kinase domain
  misc_feature (1)..(380): NCBI GI NO: 15233984 NR Description: shaggy-related protein kinase etha (EC 2.7.1.-)
  misc_feature (1)..(380): NCBI GI NO: 18700188 NR Description: AT4g18710/F28A21_120 [Arabidopsis thaliana]
  misc_feature (1)..(380): NCBI GI NO: 12643751 NR Description: Shaggy-related protein kinase eta (ASK-eta)
  misc_feature (3)..(379): NCBI GI NO: 15224593 NR Description: shaggy-related protein kinase dzeta
  misc_feature (3)..(379): NCBI GI NO: 21593135 NR Description: putative shaggy-like protein kinase dzeta
  misc_feature (3)..(379): NCBI GI NO: 12643750 NR Description: Shaggy-related protein kinase delta
  misc_feature (4)..(376): NCBI GI NO: 15221476 NR Description: shaggy-related kinase [Arabidopsis thaliana]
  misc_feature (1)..(371): NCBI GI NO: 7434281 NR Description: probable shaggy-like protein kinase etha (EC 2
  misc_feature (3)..(375): NCBI GI NO: 22326813 NR Description: serine/threonine protein kinase, Msk family
  misc_feature (1)..(365): NCBI GI NO: 15236918 NR Description: Shaggy related protein kinase tetha
MADDKEMPAAVVDGHDQVTGHIISTTIGGKNGEPKQTISYMAERVVGTGSFGIVFQAKCLETGETVAIKKVLQDRRYKNRELQLMRVMDHPNVVCLKHCFFSTTSKDELFLNLVMEYVPESLYRVLKHYSSANQRMPLVYVKLYMYQIFRGLAYIHNVAGVCHRDLKPQNLLVDPLTHQVKICDFGSAKQLVKGEANISYICSRFYRAPELIFGATEYTTSIDIWSAGCVLAELLLGQPLFPGENAVDQLVEIIKVLGTPTREEIRCMNPHYTDFRFPQIKAHPWHKIFHKRMPPEAIDFASRLLQYSPSLRCTALEACAHPFFDELREPNARLPNGRPFPPLFNFKQEVAGSSPELVNKLIPDHIKRQLGLSFLNQSGT

SEQ ID NO: 1908 - protein, 374 aa, Arabidopsis thaliana
  peptide (1)..(374): Ceres Seq. ID no. 13621938
  misc_feature (34)..(318): Pfam Name: Pfam Description:  Protein kinase domain
  misc_feature (1)..(374): NCBI GI NO: 15233984 NR Description: shaggy-related protein kinase etha (EC 2.7.1.-)
  misc_feature (1)..(374): NCBI GI NO: 18700188 NR Description: AT4g18710/F28A21_120 [Arabidopsis thaliana]
  misc_feature (1)..(374): NCBI GI NO: 12643751 NR Description: Shaggy-related protein kinase eta (ASK-eta)
  misc_feature (1)..(373): NCBI GI NO: 15224593 NR Description: shaggy-related protein kinase dzeta
  misc_feature (1)..(373): NCBI GI NO: 21593135 NR Description: putative shaggy-like protein kinase dzeta
  misc_feature (1)..(373): NCBI GI NO: 12643750 NR Description: Shaggy-related protein kinase delta
  misc_feature (1)..(370): NCBI GI NO: 15221476 NR Description: shaggy-related kinase [Arabidopsis thaliana]
  misc_feature (1)..(365): NCBI GI NO: 7434281 NR Description: probable shaggy-like protein kinase etha (EC 2
  misc_feature (1)..(369): NCBI GI NO: 22326813 NR Description: serine/threonine protein kinase, Msk family
  misc_feature (1)..(359): NCBI GI NO: 15236918 NR Description: Shaggy related protein kinase tetha
MPAAVVDGHDQVTGHIISTTIGGKNGEPKQTISYMAERVVGTGSFGIVFQAKCLETGETVAIKKVLQDRRYKNRELQLMRVMDHPNVVCLKHCFFSTTSKDELFLNLVMEYVPESLYRVLKHYSSANQRMPLVYVKLYMYQIFRGLAYIHNVAGVCHRDLKPQNLLVDPLTHQVKICDFGSAKQLVKGEANISYICSRFYRAPELIFGATEYTTSIDIWSAGCVLAELLLGQPLFPGENAVDQLVEIIKVLGTPTREEIRCMNPHYTDFRFPQIKAHPWHKIFHKRMPPEAIDFASRLLQYSPSLRCTALEACAHPFFDELREPNARLPNGRPFPPLFNFKQEVAGSSPELVNKLIPDHIKRQLGLSFLNQSGT

SEQ ID NO: 1909 - protein, 340 aa, Arabidopsis thaliana
  peptide (1)..(340): Ceres Seq. ID no. 13621939
  misc_feature (1)..(284): Pfam Name: Pfam Description:  Protein kinase domain
  misc_feature (1)..(340): NCBI GI NO: 15233984 NR Description: shaggy-related protein kinase etha (EC 2.7.1.-)
  misc_feature (1)..(340): NCBI GI NO: 18700188 NR Description: AT4g18710/F28A21_120 [Arabidopsis thaliana]
  misc_feature (1)..(340): NCBI GI NO: 12643751 NR Description: Shaggy-related protein kinase eta (ASK-eta)
  misc_feature (1)..(339): NCBI GI NO: 15224593 NR Description: shaggy-related protein kinase dzeta
  misc_feature (1)..(339): NCBI GI NO: 21593135 NR Description: putative shaggy-like protein kinase dzeta
  misc_feature (1)..(339): NCBI GI NO: 12643750 NR Description: Shaggy-related protein kinase delta
  misc_feature (1)..(336): NCBI GI NO: 15221476 NR Description: shaggy-related kinase [Arabidopsis thaliana]
  misc_feature (1)..(331): NCBI GI NO: 7434281 NR Description: probable shaggy-like protein kinase etha (EC 2
  misc_feature (1)..(335): NCBI GI NO: 22326813 NR Description: serine/threonine protein kinase, Msk family
  misc_feature (1)..(325): NCBI GI NO: 15236918 NR Description: Shaggy related protein kinase tetha
MAERVVGTGSFGIVFQAKCLETGETVAIKKVLQDRRYKNRELQLMRVMDHPNVVCLKHCFFSTTSKDELFLNLVMEYVPESLYRVLKHYSSANQRMPLVYVKLYMYQIFRGLAYIHNVAGVCHRDLKPQNLLVDPLTHQVKICDFGSAKQLVKGEANISYICSRFYRAPELIFGATEYTTSIDIWSAGCVLAELLLGQPLFPGENAVDQLVEIIKVLGTPTREEIRCMNPHYTDFRFPQIKAHPWHKIFHKRMPPEAIDFASRLLQYSPSLRCTALEACAHPFFDELREPNARLPNGRPFPPLFNFKQEVAGSSPELVNKLIPDHIKRQLGLSFLNQSGT

SEQ ID NO: 1910 - DNA, 1217 bp, Arabidopsis thaliana
  misc_feature (1)..(1217): Ceres Seq. ID no. 12421348
acatctcccaccaatctcactcaaaagaaaatctaagaaaagattcttaattttctgaagtgaatgcaaagatgatgatggaagagaaacttgtgatcaacgaattggaactagggaaagagcttgctaaccgattgatgaacaatctcaaacacacttcttctgtcgattccaacaaaaccttgatctctgatatcctccgtatttaccagaatgccattttcatgttgagcttcaaccaagacaagaacatccttaagcgaagccttgagatcgatggaaaagattctaaaaacgtcttcaaaaagaggaaagtatcggagaagaacacagagaaagttaaggtttttgttgcaacagaacaagaaaatggctctattgatgatggtcactgctggagaaaatatgggcaaaaagagattcatggatccaaaaatcctagagcatattacagatgcacgcatcgattcacacaagactgtttagcagtgaagcaagttcagaaatcagacacagatccttcccttttcgaagtgaagtatctcggaaaccacacttgtaacaacatcacatccccgaagacgacgacgaacttctctgtttcattgacgaacacgaacatctttgaaggaaacagagtacatgttacagagcaatcggaagacatgaaaccgaccaagtccgaagaagtgatgataagccttgaagatctggagaacaagaagaacattttcagaacgttttctttctctaaccatgagattgagaacggtgtgtggaaaagtaaccttttcttgggaaatttcgtggaagatctttctcctgcaacatcagggtctgcaattaccagcgaggttttatctgcacctgctgctgttgagaattccgaaactgcagattcgtatttctcgtctttggacaatattatcgatttcggacaggattggttgtggtcgtagctttgaataattgatttggtgaatgtaatgtctctctcttaatggcagtaattatagatggtcagtttaatttaagggttattagttattacttattagtatagtaaaaattatttttgccgatggataaaaattggcttataggactaaagttacatgattttggcctttttcattgtttttcagcagggtttatgaattatgatttccctatgaagttggattgtactttatgacaattaataaagaaaggatttt

SEQ ID NO: 1911 - protein, 295 aa, Arabidopsis thaliana
  peptide (1)..(295): Ceres Seq. ID no. 12421349
  misc_feature (103)..(165): Pfam Name: Pfam Description:  WRKY DNA -binding domain
  misc_feature (1)..(295): NCBI GI NO: 15225975 NR Description: WRKY family transcription factor
  misc_feature (78)..(163): NCBI GI NO: 40253471 NR Description: putative transcription factor WRKY5
  misc_feature (78)..(234): NCBI GI NO: 15236622 NR Description: WRKY family transcription factor
  misc_feature (78)..(163): NCBI GI NO: 34911952 NR Description: P0694A04.6
  misc_feature (45)..(190): NCBI GI NO: 15226739 NR Description: WRKY family transcription factor
  misc_feature (5)..(173): NCBI GI NO: 15228907 NR Description: WRKY family transcription factor
  misc_feature (5)..(173): NCBI GI NO: 21592990 NR Description: DNA-binding protein-like [Arabidopsis thaliana]
  misc_feature (9)..(278): NCBI GI NO: 18420751 NR Description: WRKY family transcription factor
  misc_feature (5)..(172): NCBI GI NO: 11358951 NR Description: DNA-binding protein 4
  misc_feature (78)..(184): NCBI GI NO: 15237039 NR Description: WRKY family transcription factor
MMMEEKLVINELELGKELANRLMNNLKHTSSVDSNKTLISDILRIYQNAIFMLSFNQDKNILKRSLEIDGKDSKNVFKKRKVSEKNTEKVKVFVATEQENGSIDDGHCWRKYGQKEIHGSKNPRAYYRCTHRFTQDCLAVKQVQKSDTDPSLFEVKYLGNHTCNNITSPKTTTNFSVSLTNTNIFEGNRVHVTEQSEDMKPTKSEEVMISLEDLENKKNIFRTFSFSNHEIENGVWKSNLFLGNFVEDLSPATSGSAITSEVLSAPAAVENSETADSYFSSLDNIIDFGQDWLWS

SEQ ID NO: 1912 - protein, 294 aa, Arabidopsis thaliana
  peptide (1)..(294): Ceres Seq. ID no. 12421350
  misc_feature (102)..(164): Pfam Name: Pfam Description:  WRKY DNA -binding domain
  misc_feature (1)..(294): NCBI GI NO: 15225975 NR Description: WRKY family transcription factor
  misc_feature (77)..(162): NCBI GI NO: 40253471 NR Description: putative transcription factor WRKY5
  misc_feature (77)..(233): NCBI GI NO: 15236622 NR Description: WRKY family transcription factor
  misc_feature (77)..(162): NCBI GI NO: 34911952 NR Description: P0694A04.6
  misc_feature (44)..(189): NCBI GI NO: 15226739 NR Description: WRKY family transcription factor
  misc_feature (4)..(172): NCBI GI NO: 15228907 NR Description: WRKY family transcription factor
  misc_feature (4)..(172): NCBI GI NO: 21592990 NR Description: DNA-binding protein-like [Arabidopsis thaliana]
  misc_feature (8)..(277): NCBI GI NO: 18420751 NR Description: WRKY family transcription factor
  misc_feature (4)..(171): NCBI GI NO: 11358951 NR Description: DNA-binding protein 4
  misc_feature (77)..(183): NCBI GI NO: 15237039 NR Description: WRKY family transcription factor
MMEEKLVINELELGKELANRLMNNLKHTSSVDSNKTLISDILRIYQNAIFMLSFNQDKNILKRSLEIDGKDSKNVFKKRKVSEKNTEKVKVFVATEQENGSIDDGHCWRKYGQKEIHGSKNPRAYYRCTHRFTQDCLAVKQVQKSDTDPSLFEVKYLGNHTCNNITSPKTTTNFSVSLTNTNIFEGNRVHVTEQSEDMKPTKSEEVMISLEDLENKKNIFRTFSFSNHEIENGVWKSNLFLGNFVEDLSPATSGSAITSEVLSAPAAVENSETADSYFSSLDNIIDFGQDWLWS

SEQ ID NO: 1913 - protein, 293 aa, Arabidopsis thaliana
  peptide (1)..(293): Ceres Seq. ID no. 12421351
  misc_feature (101)..(163): Pfam Name: Pfam Description:  WRKY DNA -binding domain
  misc_feature (1)..(293): NCBI GI NO: 15225975 NR Description: WRKY family transcription factor
  misc_feature (76)..(161): NCBI GI NO: 40253471 NR Description: putative transcription factor WRKY5
  misc_feature (76)..(232): NCBI GI NO: 15236622 NR Description: WRKY family transcription factor
  misc_feature (76)..(161): NCBI GI NO: 34911952 NR Description: P0694A04.6
  misc_feature (43)..(188): NCBI GI NO: 15226739 NR Description: WRKY family transcription factor
  misc_feature (3)..(171): NCBI GI NO: 15228907 NR Description: WRKY family transcription factor
  misc_feature (3)..(171): NCBI GI NO: 21592990 NR Description: DNA-binding protein-like [Arabidopsis thaliana]
  misc_feature (7)..(276): NCBI GI NO: 18420751 NR Description: WRKY family transcription factor
  misc_feature (3)..(170): NCBI GI NO: 11358951 NR Description: DNA-binding protein 4
  misc_feature (76)..(182): NCBI GI NO: 15237039 NR Description: WRKY family transcription factor
MEEKLVINELELGKELANRLMNNLKHTSSVDSNKTLISDILRIYQNAIFMLSFNQDKNILKRSLEIDGKDSKNVFKKRKVSEKNTEKVKVFVATEQENGSIDDGHCWRKYGQKEIHGSKNPRAYYRCTHRFTQDCLAVKQVQKSDTDPSLFEVKYLGNHTCNNITSPKTTTNFSVSLTNTNIFEGNRVHVTEQSEDMKPTKSEEVMISLEDLENKKNIFRTFSFSNHEIENGVWKSNLFLGNFVEDLSPATSGSAITSEVLSAPAAVENSETADSYFSSLDNIIDFGQDWLWS

SEQ ID NO: 1914 - DNA, 1079 bp, Arabidopsis thaliana
  misc_feature (1)..(1079): Ceres Seq. ID no. 12394591
atctcataaaaacaaaaacaacaacacacatttcaaagaactctgaaatggcaaaccaaaaagggttacatgtagtgatgatgatcatcactgtttggcttctttatgcagcacctaatatccatggatggggaaaagaaggtcatgaaatcatctgtaaaatcgctcagactaggttggatgaaacagcagcaaaggccgtgaaagagctgttacctgaatctgcagaaggagacctctcaagcttgtgtctttgggctgatcgtgtcaagttcagataccactggtcttctcctcttcattacatcaacactcctgatgcatgctcataccaatacaatagggactgcaaggacgaatctggagagaaaggaagatgtgttgcgggagccatttacaactacaccacacagcttctttcctacaaaactgcagcttcatctcagtcacaatacaacttaaccgaggccctgctcttcgtgtccccatttcatgggtgatatccatcagcctctacatgtgagttatgcttcagacaaaggaggtaacaccatcgaagtacattggtacacgagaaaagctaacctccaccatatatgggattccaacattatcgaaacagctgaagcagatctctataactctgcactagaaggaatggtggatgcactcaaaaagaatatcacgacagaatgggcagatcaagttaagagatgggatacctgcacaaagaagacagcatgtccagacatatacgcatccgaaggaattcaagcagcctgtgactgggcatacaagggggtaacggaaggagacactctagaagatgaatacttctattcacgtctaccgatagtgtatcagcggttagcacagggaggggtgagactagcagctaccctaaacaggattttcggttgaagctgaagttacagcataatgattggtctaagcctgtcttcatattagattaaaaactgcattattgaaacaaggaaatagcaatcacaagccccgaacacggcaatgctctttcattatcaaacaaaataaattatgtttactcacaaagtttcttc

SEQ ID NO: 1915 - protein, 165 aa, Arabidopsis thaliana
  peptide (1)..(165): Ceres Seq. ID no. 12394592
  misc_feature (43)..(165): Pfam Name: Pfam Description:  S1/P1 Nuclease
  misc_feature (16)..(165): NCBI GI NO: 21554516 NR Description: putative bifunctional nuclease
  misc_feature (16)..(165): NCBI GI NO: 15221343 NR Description: putative bifunctional nuclease
  misc_feature (26)..(165): NCBI GI NO: 4099833 NR Description: bifunctional nuclease [Zinnia elegans]
  misc_feature (30)..(165): NCBI GI NO: 4099835 NR Description: bifunctional nuclease [Zinnia elegans]
  misc_feature (29)..(165): NCBI GI NO: 9558456 NR Description: unnamed protein product
  misc_feature (29)..(165): NCBI GI NO: 34895514 NR Description: putative bifunctional nuclease
  misc_feature (43)..(165): NCBI GI NO: 22328857 NR Description: expressed protein; protein id: At4g21585.1
  misc_feature (33)..(165): NCBI GI NO: 3551956 NR Description: senescence-associated protein 6
  misc_feature (22)..(165): NCBI GI NO: 38345900 NR Description: OSJNBa0060D06.10
  misc_feature (25)..(165): NCBI GI NO: 15220307 NR Description: bifunctional nuclease bfn1; protein id: At1g11190
LIKTKTTTHISKNSEMANQKGLHVVMMIITVWLLYAAPNIHGWGKEGHEIICKIAQTRLDETAAKAVKELLPESAEGDLSSLCLWADRVKFRYHWSSPLHYINTPDACSYQYNRDCKDESGEKGRCVAGAIYNYTTQLLSYKTAASSQSQYNLTEALLFVSPFHG

SEQ ID NO: 1916 - protein, 150 aa, Arabidopsis thaliana
  peptide (1)..(150): Ceres Seq. ID no. 12394593
  misc_feature (28)..(150): Pfam Name: Pfam Description:  S1/P1 Nuclease
  misc_feature (1)..(150): NCBI GI NO: 21554516 NR Description: putative bifunctional nuclease
  misc_feature (1)..(150): NCBI GI NO: 15221343 NR Description: putative bifunctional nuclease
  misc_feature (11)..(150): NCBI GI NO: 4099833 NR Description: bifunctional nuclease [Zinnia elegans]
  misc_feature (15)..(150): NCBI GI NO: 4099835 NR Description: bifunctional nuclease [Zinnia elegans]
  misc_feature (14)..(150): NCBI GI NO: 9558456 NR Description: unnamed protein product
  misc_feature (14)..(150): NCBI GI NO: 34895514 NR Description: putative bifunctional nuclease
  misc_feature (28)..(150): NCBI GI NO: 22328857 NR Description: expressed protein; protein id: At4g21585.1
  misc_feature (18)..(150): NCBI GI NO: 3551956 NR Description: senescence-associated protein 6
  misc_feature (7)..(150): NCBI GI NO: 38345900 NR Description: OSJNBa0060D06.10
  misc_feature (10)..(150): NCBI GI NO: 15220307 NR Description: bifunctional nuclease bfn1; protein id: At1g11190
MANQKGLHVVMMIITVWLLYAAPNIHGWGKEGHEIICKIAQTRLDETAAKAVKELLPESAEGDLSSLCLWADRVKFRYHWSSPLHYINTPDACSYQYNRDCKDESGEKGRCVAGAIYNYTTQLLSYKTAASSQSQYNLTEALLFVSPFHG

SEQ ID NO: 1917 - protein, 142 aa, Arabidopsis thaliana
  peptide (1)..(142): Ceres Seq. ID no. 12394594
  misc_feature (1)..(142): Pfam Name: Pfam Description:  S1/P1 Nuclease
  misc_feature (1)..(142): NCBI GI NO: 21554516 NR Description: putative bifunctional nuclease
  misc_feature (1)..(142): NCBI GI NO: 15221343 NR Description: putative bifunctional nuclease
  misc_feature (1)..(142): NCBI GI NO: 4099833 NR Description: bifunctional nuclease [Zinnia elegans]
  misc_feature (1)..(141): NCBI GI NO: 4099835 NR Description: bifunctional nuclease [Zinnia elegans]
  misc_feature (1)..(142): NCBI GI NO: 9558456 NR Description: unnamed protein product
  misc_feature (1)..(142): NCBI GI NO: 34895514 NR Description: putative bifunctional nuclease
  misc_feature (1)..(141): NCBI GI NO: 22328857 NR Description: expressed protein; protein id: At4g21585.1
  misc_feature (1)..(141): NCBI GI NO: 3551956 NR Description: senescence-associated protein 6
  misc_feature (1)..(141): NCBI GI NO: 38345900 NR Description: OSJNBa0060D06.10
  misc_feature (1)..(141): NCBI GI NO: 15220307 NR Description: bifunctional nuclease bfn1; protein id: At1g11190
MGDIHQPLHVSYASDKGGNTIEVHWYTRKANLHHIWDSNIIETAEADLYNSALEGMVDALKKNITTEWADQVKRWDTCTKKTACPDIYASEGIQAACDWAYKGVTEGDTLEDEYFYSRLPIVYQRLAQGGVRLAATLNRIFG

SEQ ID NO: 1918 - DNA, 1841 bp, Arabidopsis thaliana
  misc_feature (1)..(1841): Ceres Seq. ID no. 12336394
cattaggattttgaatttccaaatacattttcagaaaaaaaagaattaaaagatcccattgttgttatcctcacagtaaatgcttttgcttgagagagagtctgttagaggttttttgtttgtttctgtttccttctgtcacccagaaaactaaaaagcaaacaaattcaagaagagagagagagagatagcctcaaaaccaagtcctaaccattgttgatagaagagaaagcttttcttttcttgttgcttatggtgaaagaatgaaagagagagaggaggagaagtaagaagcagagaaagtgtttagagctttgcatgttcctttctctccaagtttatatcttcatcggtttcacaagttcacttaaaaagttgaaaagagtctttcttcttcaactattgtaaatgcgaaatggatcgaagagatgcaatgggattatccgggtcaggttcttactatatccatagaggattacccgggtcgggtcctccaacgtttcatggatcaccacagcaacagcaaggtcttcgtcacttacctaatcaaaactctccattcgggtcaggctccactggtttcggatctccttctttacacggtgatccttctctggcaacagcagccggaggagccggagctcttcctcatcatatcggcgttaatatgattgctcctcctccacctcccagtgaaactccgatgaaacgaaagagaggacggcctagaaaatacggtcaagacggctctgtttctttggctctgtcgtcttcctctgtttcgaccattactcccaacaactctaacaaacgcggccgtggtcgacctccgggctccggcaagaaacagagaatggcttccgttggtgaactgatgccttcatcttctggaatgagcttcacgccacatgttatcgcggtttcaataggagaagatattgcatcaaaggttatagctttctctcaacaaggtccgagagccatttgcgttttatctgcaagtggtgcagtctctactgcaacacttattcaaccatcagcatctcccggagccattaaatacgagggccggtttgaaatcctagcgttatcaacatcttatatagtggcaactgatggaagcttccgtaaccgaactggaaacttatcggtttcgcttgctagccccgatgggcgtgtgattggcggtgccattggtgggcctttaatagctgcaagtcctgttcaggttattgtagggagctttatatgggcagctccaaagatcaagagcaagaaacgagaagaagaagcttctgaagttgttcaagaaactgatgatcaccacgttctggacaataataacaacacgatttcgcctgtccctcagcagcagccaaaccaaaacctgatttggtcaacaggttcaaggcaaatggatatgcgtcatgctcatgctgatattgatttaatgcgcggttgatgatagcgagaaagaactctgtgtatataaagcatggaatctaggaagaagaagaaggaatataagctaacctctgaacaaaagtatgtggaaatgttagggaaaaagattaactctattagtgtacctctcatatctctaagcttgtttggttttactgtttctgtgactctgaagatttgcagagttcctttctttctctgttttagattgttcagtctttatgtaatttgcttgcaattctgattctacagcttagattcagtacattgtgtagaagtttacatgggaacctgaaaattgggcatttcatgggccttcatatgatccaatttattttcatcaaatttgtattagtacataattaattttgtttttt

SEQ ID NO: 1919 - protein, 348 aa, Arabidopsis thaliana
  peptide (1)..(348): Ceres Seq. ID no. 12336395
  misc_feature (1)..(348): NCBI GI NO: 15225902 NR Description: putative AT-hook DNA-binding protein
  misc_feature (1)..(348): NCBI GI NO: 30695388 NR Description: DNA-binding protein -related
  misc_feature (7)..(348): NCBI GI NO: 11281387 NR Description: probable DNA-binding protein - Arabidopsis thaliana
  misc_feature (1)..(348): NCBI GI NO: 7488825 NR Description: probable DNA-binding protein - garden pea
  misc_feature (1)..(337): NCBI GI NO: 2213534 NR Description: DNA-binding PD1-like protein [Pisum sativum]
  misc_feature (1)..(348): NCBI GI NO: 30696854 NR Description: DNA-binding protein -related
  misc_feature (1)..(321): NCBI GI NO: 6633838 NR Description: F2K11.15 [Arabidopsis thaliana]
  misc_feature (1)..(348): NCBI GI NO: 22330402 NR Description: DNA-binding protein, putative
  misc_feature (1)..(317): NCBI GI NO: 6633838 NR Description: F2K11.15 [Arabidopsis thaliana]
  misc_feature (89)..(348): NCBI GI NO: 6633838 NR Description: F2K11.15 [Arabidopsis thaliana]
MDRRDAMGLSGSGSYYIHRGLPGSGPPTFHGSPQQQQGLRHLPNQNSPFGSGSTGFGSPSLHGDPSLATAAGGAGALPHHIGVNMIAPPPPPSETPMKRKRGRPRKYGQDGSVSLALSSSSVSTITPNNSNKRGRGRPPGSGKKQRMASVGELMPSSSGMSFTPHVIAVSIGEDIASKVIAFSQQGPRAICVLSASGAVSTATLIQPSASPGAIKYEGRFEILALSTSYIVATDGSFRNRTGNLSVSLASPDGRVIGGAIGGPLIAASPVQVIVGSFIWAAPKIKSKKREEEASEVVQETDDHHVLDNNNNTISPVPQQQPNQNLIWSTGSRQMDMRHAHADIDLMRG

SEQ ID NO: 1920 - protein, 342 aa, Arabidopsis thaliana
  peptide (1)..(342): Ceres Seq. ID no. 12336396
  misc_feature (1)..(342): NCBI GI NO: 15225902 NR Description: putative AT-hook DNA-binding protein
  misc_feature (1)..(342): NCBI GI NO: 30695388 NR Description: DNA-binding protein -related
  misc_feature (1)..(342): NCBI GI NO: 11281387 NR Description: probable DNA-binding protein - Arabidopsis thaliana
  misc_feature (1)..(342): NCBI GI NO: 7488825 NR Description: probable DNA-binding protein - garden pea
  misc_feature (1)..(331): NCBI GI NO: 2213534 NR Description: DNA-binding PD1-like protein [Pisum sativum]
  misc_feature (1)..(342): NCBI GI NO: 30696854 NR Description: DNA-binding protein -related
  misc_feature (1)..(315): NCBI GI NO: 6633838 NR Description: F2K11.15 [Arabidopsis thaliana]
  misc_feature (1)..(342): NCBI GI NO: 22330402 NR Description: DNA-binding protein, putative
  misc_feature (1)..(311): NCBI GI NO: 6633838 NR Description: F2K11.15 [Arabidopsis thaliana]
  misc_feature (83)..(342): NCBI GI NO: 6633838 NR Description: F2K11.15 [Arabidopsis thaliana]
MGLSGSGSYYIHRGLPGSGPPTFHGSPQQQQGLRHLPNQNSPFGSGSTGFGSPSLHGDPSLATAAGGAGALPHHIGVNMIAPPPPPSETPMKRKRGRPRKYGQDGSVSLALSSSSVSTITPNNSNKRGRGRPPGSGKKQRMASVGELMPSSSGMSFTPHVIAVSIGEDIASKVIAFSQQGPRAICVLSASGAVSTATLIQPSASPGAIKYEGRFEILALSTSYIVATDGSFRNRTGNLSVSLASPDGRVIGGAIGGPLIAASPVQVIVGSFIWAAPKIKSKKREEEASEVVQETDDHHVLDNNNNTISPVPQQQPNQNLIWSTGSRQMDMRHAHADIDLMRG

SEQ ID NO: 1921 - protein, 264 aa, Arabidopsis thaliana; identical to SEQ ID NO: 1865
  peptide (1)..(264): Ceres Seq. ID no. 12336397
  misc_feature (1)..(264): NCBI GI NO: 15225902 NR Description: putative AT-hook DNA-binding protein
  misc_feature (1)..(264): NCBI GI NO: 30695388 NR Description: DNA-binding protein -related
  misc_feature (1)..(264): NCBI GI NO: 11281387 NR Description: probable DNA-binding protein - Arabidopsis thaliana
  misc_feature (1)..(264): NCBI GI NO: 7488825 NR Description: probable DNA-binding protein - garden pea
  misc_feature (1)..(253): NCBI GI NO: 2213534 NR Description: DNA-binding PD1-like protein [Pisum sativum]
  misc_feature (1)..(264): NCBI GI NO: 30696854 NR Description: DNA-binding protein -related
  misc_feature (1)..(237): NCBI GI NO: 6633838 NR Description: F2K11.15 [Arabidopsis thaliana]
  misc_feature (1)..(264): NCBI GI NO: 22330402 NR Description: DNA-binding protein, putative
  misc_feature (1)..(233): NCBI GI NO: 6633838 NR Description: F2K11.15 [Arabidopsis thaliana]
  misc_feature (5)..(264): NCBI GI NO: 6633838 NR Description: F2K11.15 [Arabidopsis thaliana]

SEQ ID NO: 1922 - DNA, 1778 bp, Arabidopsis thaliana
  misc_feature (1)..(1778): Ceres Seq. ID no. 12488347
aaacccacttcgcagattcactcttcaccatcttcacctctcaaagaaacccctttcttcctcttctctgttcctctgctccgccgcaaaaatgaacgaccatatccaccgtgttccggctctcaccgaggaagagattgactccgtcgccataaaaacatttgagagatacgcattaccttcttcttcctccgttaagagaaaggggaaaggagtaacgattctctggttcagaaacgatctcagagttcttgacaatgacgcattgtacaaagcttggtcttcctctgataccattttgcctgtttactgtctcgatcctcgtctctttcacactactcatttcttcaacttccctaaaaccggagctttaagaggcggttttcttatggaatgtttggttgatttgagaaagaatcttatgaaacgaggattgaatcttcttattagaagtggtaaaccagaagagattcttccttctcttgctaaagattttggagctcgtacagtttttgcgcataaagaaacgtgtagtgaggaggtagacgttgaaagacttgtgaatcaaggtttgaaaagggttggaaatagtactaagcttgagctcatttggggaagtactatgtatcacaaagatgatcttccttttgatgtttttgacttgcctgatgtctacactcagtttcgtaagtcggtggaagctaagtgtagtatcagaagctctactcgcattccactatctctagggccaacaccttctgttgatgattggggagatgttccaactcttgagaaacttggggttgagcctcaagaggtaaccagaggaatgcgattcgttggtggtgaaagtgcaggagtaggcagagtatttgagtacttttggaaaaaggatctattgaaagtatacaaagagacgaggaacggaatgttaggacctgattattcgacgaaattctctccttggcttgcctttgggtgtatctctcctcgttttatctatgaagaggtccaaagatatgaaaaggaaagagtagcaaataattcaacatactgggtactttttgaactaatatggagagattacttcaggtttctttcaattaagtgtggaaactcactttttcatctaggtggcccgagaaatgtgcaagggaagtggagccaagatcagaaactatttgagtcttggagagatgccaagacagggtatcctcttatagatgcaaacatgaaggagttatccactacaggtttcatgtcaaatcgaggccgacagattgtttgttcgtttcttgtccgggacatggggttggattggcgtatgggtgcagaatggtttgagacatgtctattagactatgatccttgttctaattatggaaactggacctatggagcaggagttggaaatgatccacgggaagaccggtacttcagcattcccaagcaagcacaaaactatgatccagaaggagaatacgttgcgttttggctgcagcagctacgtcggcttccgaaagagaaaagacattggccagggagattgatgtatatggacacagttgtgccattgaagcatggtaatggtccaatggctggagggtcaaagtctgggggtggcttcagagggagtcacagtgggagacgttctagacacaatggtccttagagagaaactattctttacacgaacttgtatcttatttttatttctgtgattcttcattcttgtgcacaaggatctctgattctctcggtctaaattacattgactt

SEQ ID NO: 1923 - protein, 556 aa, Arabidopsis thaliana
  peptide (1)..(556): Ceres Seq. ID no. 12488348
  misc_feature (280)..(540): Pfam Name: Pfam Description:  FAD binding domain of DNA photolyase
  misc_feature (31)..(556): NCBI GI NO: 22327046 NR Description: DNA photolyase - like protein
  misc_feature (32)..(556): NCBI GI NO: 28971609 NR Description: cryptochrome dash [Arabidopsis thaliana]
  misc_feature (70)..(517): NCBI GI NO: 23040111 NR Description: hypothetical protein
  misc_feature (74)..(513): NCBI GI NO: 28374085 NR Description: Chain A
  misc_feature (102)..(513): NCBI GI NO: 16330358 NR Description: DNA photolyase [Synechocystis sp. PCC 6803]
  misc_feature (74)..(517): NCBI GI NO: 37520404 NR Description: probable bacterial cryptochrome
  misc_feature (74)..(516): NCBI GI NO: 32477278 NR Description: DNA photolyase [Pirellula sp.]
  misc_feature (73)..(500): NCBI GI NO: 23135973 NR Description: hypothetical protein [Cytophaga hutchinsonii]
  misc_feature (70)..(498): NCBI GI NO: 15641816 NR Description: deoxyribodipyrimidine photolyase [Vibrio cholerae]
  misc_feature (70)..(498): NCBI GI NO: 28900058 NR Description: deoxyribodipyrimidine photolyase
NPLRRFTLHHLHLSKKPLSSSSLFLCSAAKMNDHIHRVPALTEEEIDSVAIKTFERYALPSSSSVKRKGKGVTILWFRNDLRVLDNDALYKAWSSSDTILPVYCLDPRLFHTTHFFNFPKTGALRGGFLMECLVDLRKNLMKRGLNLLIRSGKPEEILPSLAKDFGARTVFAHKETCSEEVDVERLVNQGLKRVGNSTKLELIWGSTMYHKDDLPFDVFDLPDVYTQFRKSVEAKCSIRSSTRIPLSLGPTPSVDDWGDVPTLEKLGVEPQEVTRGMRFVGGESAGVGRVFEYFWKKDLLKVYKETRNGMLGPDYSTKFSPWLAFGCISPRFIYEEVQRYEKERVANNSTYWVLFELIWRDYFRFLSIKCGNSLFHLGGPRNVQGKWSQDQKLFESWRDAKTGYPLIDANMKELSTTGFMSNRGRQIVCSFLVRDMGLDWRMGAEWFETCLLDYDPCSNYGNWTYGAGVGNDPREDRYFSIPKQAQNYDPEGEYVAFWLQQLRRLPKEKRHWPGRLMYMDTVVPLKHGNGPMAGGSKSGGGFRGSHSGRRSRHNGP

SEQ ID NO: 1924 - protein, 526 aa, Arabidopsis thaliana
  peptide (1)..(526): Ceres Seq. ID no. 12488349
  misc_feature (250)..(510): Pfam Name: Pfam Description:  FAD binding domain of DNA photolyase
  misc_feature (1)..(526): NCBI GI NO: 22327046 NR Description: DNA photolyase - like protein
  misc_feature (2)..(526): NCBI GI NO: 28971609 NR Description: cryptochrome dash [Arabidopsis thaliana]
  misc_feature (40)..(487): NCBI GI NO: 23040111 NR Description: hypothetical protein
  misc_feature (44)..(483): NCBI GI NO: 28374085 NR Description: Chain A
  misc_feature (72)..(483): NCBI GI NO: 16330358 NR Description: DNA photolyase [Synechocystis sp. PCC 6803]
  misc_feature (44)..(487): NCBI GI NO: 37520404 NR Description: probable bacterial cryptochrome
  misc_feature (44)..(486): NCBI GI NO: 32477278 NR Description: DNA photolyase [Pirellula sp.]
  misc_feature (43)..(470): NCBI GI NO: 23135973 NR Description: hypothetical protein [Cytophaga hutchinsonii]
  misc_feature (40)..(468): NCBI GI NO: 15641816 NR Description: deoxyribodipyrimidine photolyase [Vibrio cholerae]
  misc_feature (40)..(468): NCBI GI NO: 28900058 NR Description: deoxyribodipyrimidine photolyase
MNDHIHRVPALTEEEIDSVAIKTFERYALPSSSSVKRKGKGVTILWFRNDLRVLDNDALYKAWSSSDTILPVYCLDPRLFHTTHFFNFPKTGALRGGFLMECLVDLRKNLMKRGLNLLIRSGKPEEILPSLAKDFGARTVFAHKETCSEEVDVERLVNQGLKRVGNSTKLELIWGSTMYHKDDLPFDVFDLPDVYTQFRKSVEAKCSIRSSTRIPLSLGPTPSVDDWGDVPTLEKLGVEPQEVTRGMRFVGGESAGVGRVFEYFWKKDLLKVYKETRNGMLGPDYSTKFSPWLAFGCISPRFIYEEVQRYEKERVANNSTYWVLFELIWRDYFRFLSIKCGNSLFHLGGPRNVQGKWSQDQKLFESWRDAKTGYPLIDANMKELSTTGFMSNRGRQIVCSFLVRDMGLDWRMGAEWFETCLLDYDPCSNYGNWTYGAGVGNDPREDRYFSIPKQAQNYDPEGEYVAFWLQQLRRLPKEKRHWPGRLMYMDTVVPLKHGNGPMAGGSKSGGGFRGSHSGRRSRHNGP

SEQ ID NO: 1925 - protein, 427 aa, Arabidopsis thaliana
  peptide (1)..(427): Ceres Seq. ID no. 12488350
  misc_feature (151)..(411): Pfam Name: Pfam Description:  FAD binding domain of DNA photolyase
  misc_feature (1)..(427): NCBI GI NO: 22327046 NR Description: DNA photolyase - like protein
  misc_feature (1)..(427): NCBI GI NO: 28971609 NR Description: cryptochrome dash [Arabidopsis thaliana]
  misc_feature (1)..(388): NCBI GI NO: 23040111 NR Description: hypothetical protein
  misc_feature (1)..(384): NCBI GI NO: 28374085 NR Description: Chain A
  misc_feature (1)..(384): NCBI GI NO: 16330358 NR Description: DNA photolyase [Synechocystis sp. PCC 6803]
  misc_feature (1)..(388): NCBI GI NO: 37520404 NR Description: probable bacterial cryptochrome
  misc_feature (1)..(387): NCBI GI NO: 32477278 NR Description: DNA photolyase [Pirellula sp.]
  misc_feature (1)..(371): NCBI GI NO: 23135973 NR Description: hypothetical protein [Cytophaga hutchinsonii]
  misc_feature (1)..(369): NCBI GI NO: 15641816 NR Description: deoxyribodipyrimidine photolyase [Vibrio cholerae]
  misc_feature (1)..(369): NCBI GI NO: 28900058 NR Description: deoxyribodipyrimidine photolyase
MECLVDLRKNLMKRGLNLLIRSGKPEEILPSLAKDFGARTVFAHKETCSEEVDVERLVNQGLKRVGNSTKLELIWGSTMYHKDDLPFDVFDLPDVYTQFRKSVEAKCSIRSSTRIPLSLGPTPSVDDWGDVPTLEKLGVEPQEVTRGMRFVGGESAGVGRVFEYFWKKDLLKVYKETRNGMLGPDYSTKFSPWLAFGCISPRFIYEEVQRYEKERVANNSTYWVLFELIWRDYFRFLSIKCGNSLFHLGGPRNVQGKWSQDQKLFESWRDAKTGYPLIDANMKELSTTGFMSNRGRQIVCSFLVRDMGLDWRMGAEWFETCLLDYDPCSNYGNWTYGAGVGNDPREDRYFSIPKQAQNYDPEGEYVAFWLQQLRRLPKEKRHWPGRLMYMDTVVPLKHGNGPMAGGSKSGGGFRGSHSGRRSRHNGP

SEQ ID NO: 1926 - DNA, 1272 bp, Arabidopsis thaliana
  misc_feature (1)..(1272): Ceres Seq. ID no. 13491032
accatctacaactttcattcttccactacatttctctccttgagtatcttcttatcctattttccaaattccaaaacaattcacaaaatggctacatgctggcctgagccgattgtttccgtgcaatccttgtcccaaaccggtgtaccaactgtaccaaaccgctatgtgaagccggctcatcagagaccggtctttaacaccacccaatccgatgctgggatagaaatccctgttctagacatgaacgacgtttgggggaaaccagaggggctaaggctcgtgaggagcgcgtgtgaggagtggggtttcttccaaatggtgaaccatggtgtgacccactcgttgatggagagagtgagaggagcgtggcgagagttcttcgagctaccgctagaggagaaacggaagtatgcaaactcaccggacacgtacgagggatatggaagccgccttggggttgtgaaagatgctaaattagattggagtgattatttcttcctcaattacttgccttcttccataagaaacccttccaagtggccatctcagcctcctaagatcagagaattgatcgaaaagtacggagaagaagtgagaaaactgtgcgaaaggctaacagagacgttgtcagagagtttaggtttaaaaccaaacaagctcatgcaggctttaggaggaggcgacaaagtcggagcttctctgaggacaaacttctacccaaaatgccctcagccgcagctcactttaggtctctcttctcattctgaccctggaggcatcaccattcttctcccggacgagaaggtcgctggccttcaggtccgtcgtggtgatggctgggtcaccattaaatcagtccctaatgctttgatcgttaacattggagatcaacttcagatacttagcaatggaatttacaaaagcgtggaacatcaagtgatcgttaattccggtatggaacgagtctctttggcattcttctataacccgagaagtgatatcccggttggaccaatcgaagaactagtaactgcaaaccgacctgctctttataaaccaatcaggttcgacgagtaccgttctctgataaggcaaaagggtccttgtggaaaaaaccaagtcgactcactgttattaactagataataattgataaacattccaagtattatctgttattcctatgtccttgatatagtcgttactaaataatatgtaaaccgtatcttcactttttcttattatattgctgctctctcttgaggtttg

SEQ ID NO: 1927 - protein, 382 aa, Arabidopsis thaliana
  peptide (1)..(382): Ceres Seq. ID no. 13491033
  misc_feature (231)..(331): Pfam Name: II Pfam Description: 2OG-Fe
  misc_feature (30)..(382): NCBI GI NO: 15224472 NR Description: oxidoreductase, 2OG-Fe(II) oxygenase family
  misc_feature (30)..(382): NCBI GI NO: 21554535 NR Description: putative anthocyanidin synthase
  misc_feature (34)..(382): NCBI GI NO: 15239179 NR Description: oxidoreductase, 2OG-Fe(II) oxygenase family
  misc_feature (34)..(382): NCBI GI NO: 21537324 NR Description: leucoanthocyanidin dioxygenase-like protein
  misc_feature (34)..(382): NCBI GI NO: 15229694 NR Description: oxidoreductase, 2OG-Fe(II) oxygenase family
  misc_feature (30)..(302): NCBI GI NO: 34907994 NR Description: leucoanthocyanidin dioxygenase-like protein
  misc_feature (297)..(378): NCBI GI NO: 34907994 NR Description: leucoanthocyanidin dioxygenase-like protein
  misc_feature (34)..(378): NCBI GI NO: 15228785 NR Description: oxidoreductase, 2OG-Fe(II) oxygenase family
  misc_feature (41)..(360): NCBI GI NO: 34907194 NR Description: putative ethylene-forming enzyme
  misc_feature (29)..(378): NCBI GI NO: 15219988 NR Description: oxidoreductase, 2OG-Fe(II) oxygenase family
TIYNFHSSTTFLSLSIFLSYFPNSKTIHKMATCWPEPIVSVQSLSQTGVPTVPNRYVKPAHQRPVFNTTQSDAGIEIPVLDMNDVWGKPEGLRLVRSACEEWGFFQMVNHGVTHSLMERVRGAWREFFELPLEEKRKYANSPDTYEGYGSRLGVVKDAKLDWSDYFFLNYLPSSIRNPSKWPSQPPKIRELIEKYGEEVRKLCERLTETLSESLGLKPNKLMQALGGGDKVGASLRTNFYPKCPQPQLTLGLSSHSDPGGITILLPDEKVAGLQVRRGDGWVTIKSVPNALIVNIGDQLQILSNGIYKSVEHQVIVNSGMERVSLAFFYNPRSDIPVGPIEELVTANRPALYKPIRFDEYRSLIRQKGPCGKNQVDSLLLTR

SEQ ID NO: 1928 - protein, 353 aa, Arabidopsis thaliana
  peptide (1)..(353): Ceres Seq. ID no. 13491034
  misc_feature (202)..(302): Pfam Name: II Pfam Description: 2OG-Fe
  misc_feature (1)..(353): NCBI GI NO: 15224472 NR Description: oxidoreductase, 2OG-Fe(II) oxygenase family
  misc_feature (1)..(353): NCBI GI NO: 21554535 NR Description: putative anthocyanidin synthase
  misc_feature (5)..(353): NCBI GI NO: 15239179 NR Description: oxidoreductase, 2OG-Fe(II) oxygenase family
  misc_feature (5)..(353): NCBI GI NO: 21537324 NR Description: leucoanthocyanidin dioxygenase-like protein
  misc_feature (5)..(353): NCBI GI NO: 15229694 NR Description: oxidoreductase, 2OG-Fe(II) oxygenase family
  misc_feature (1)..(273): NCBI GI NO: 34907994 NR Description: leucoanthocyanidin dioxygenase-like protein
  misc_feature (268)..(349): NCBI GI NO: 34907994 NR Description: leucoanthocyanidin dioxygenase-like protein
  misc_feature (5)..(349): NCBI GI NO: 15228785 NR Description: oxidoreductase, 2OG-Fe(II) oxygenase family
  misc_feature (12)..(331): NCBI GI NO: 34907194 NR Description: putative ethylene-forming enzyme
  misc_feature (1)..(349): NCBI GI NO: 15219988 NR Description: oxidoreductase, 2OG-Fe(II) oxygenase family
MATCWPEPIVSVQSLSQTGVPTVPNRYVKPAHQRPVFNTTQSDAGIEIPVLDMNDVWGKPEGLRLVRSACEEWGFFQMVNHGVTHSLMERVRGAWREFFELPLEEKRKYANSPDTYEGYGSRLGVVKDAKLDWSDYFFLNYLPSSIRNPSKWPSQPPKIRELIEKYGEEVRKLCERLTETLSESLGLKPNKLMQALGGGDKVGASLRTNFYPKCPQPQLTLGLSSHSDPGGITILLPDEKVAGLQVRRGDGWVTIKSVPNALIVNIGDQLQILSNGIYKSVEHQVIVNSGMERVSLAFFYNPRSDIPVGPIEELVTANRPALYKPIRFDEYRSLIRQKGPCGKNQVDSLLLTR

SEQ ID NO: 1929 - protein, 301 aa, Arabidopsis thaliana
  peptide (1)..(301): Ceres Seq. ID no. 13491035
  misc_feature (150)..(250): Pfam Name: II Pfam Description: 2OG-Fe
  misc_feature (1)..(301): NCBI GI NO: 15224472 NR Description: oxidoreductase, 2OG-Fe(II) oxygenase family
  misc_feature (1)..(301): NCBI GI NO: 21554535 NR Description: putative anthocyanidin synthase
  misc_feature (1)..(301): NCBI GI NO: 15239179 NR Description: oxidoreductase, 2OG-Fe(II) oxygenase family
  misc_feature (1)..(301): NCBI GI NO: 21537324 NR Description: leucoanthocyanidin dioxygenase-like protein
  misc_feature (1)..(301): NCBI GI NO: 15229694 NR Description: oxidoreductase, 2OG-Fe(II) oxygenase family
  misc_feature (1)..(221): NCBI GI NO: 34907994 NR Description: leucoanthocyanidin dioxygenase-like protein
  misc_feature (216)..(297): NCBI GI NO: 34907994 NR Description: leucoanthocyanidin dioxygenase-like protein
  misc_feature (1)..(297): NCBI GI NO: 15228785 NR Description: oxidoreductase, 2OG-Fe(II) oxygenase family
  misc_feature (1)..(279): NCBI GI NO: 34907194 NR Description: putative ethylene-forming enzyme
  misc_feature (1)..(297): NCBI GI NO: 15219988 NR Description: oxidoreductase, 2OG-Fe(II) oxygenase family
MNDVWGKPEGLRLVRSACEEWGFFQMVNHGVTHSLMERVRGAWREFFELPLEEKRKYANSPDTYEGYGSRLGVVKDAKLDWSDYFFLNYLPSSIRNPSKWPSQPPKIRELIEKYGEEVRKLCERLTETLSESLGLKPNKLMQALGGGDKVGASLRTNFYPKCPQPQLTLGLSSHSDPGGITILLPDEKVAGLQVRRGDGWVTIKSVPNALIVNIGDQLQILSNGIYKSVEHQVIVNSGMERVSLAFFYNPRSDIPVGPIEELVTANRPALYKPIRFDEYRSLIRQKGPCGKNQVDSLLLTR

SEQ ID NO: 1930 - DNA, 1333 bp, Arabidopsis thaliana
  misc_feature (1)..(1333): Ceres Seq. ID no. 13493836
gatctgccaatcacaaattaacagaaaacacaactaaattgcgatttgaatttattaaatcgtaaaactgagatcttctctgagatttttctcctcctaaagtttgaaactttgaacataaaaattgtattttttttttttttttgaagtttccagcaaaaaaaaaattgaaactttcagtgattggaattttaatttgtgttttagtttggtgggtttctttatcgggatcgttgtcgtggatttttgtttgtagcagcttgaaagacgatgtcgtcgtcgccggacattgccggaatcttagataatacgaaggagcttgatcggttaagaaaagaacaagaggaagttcttgtggagattaataagatgcataagaagcttcaagctacgccggagatagttgagaagcctggtgatatttcattgtcaaagcttaaaaatttgtacattcaagcaaaagagctttcagaaagtgaagtaaccgtttcaaatattctgcttactcagttggattctctgcttccatctggaccaactgggcaacaacgcagaaaattagtggcagaaggcaacgaacagaagagaaagagaatgaaagtagatacagatgtaacaagagtttctccttccatgagaaatcaaatcgaggcatatgctagtctaaagggtgaacaggttgctgcaagagtcacagctgaagatgccgagaaggatgaatggtttgtggtgaaagttattcacttcgacagagaaacaaaagaagttgaagtacttgatgaagaaccaggagatgatgaagaaggaggtggccagaggacgtataaactatcaatgtcatgtattttaccgtttccaaaacggaatgatccttcaagcacacaagagtttataccagggaaacacgtcttagctgtatatccaggaaccacagccctctacaaggcaactgttataagtaccccacgaaagaggaaatctgacgagtacttgctagaatttgatgatgatgaagaagacggagcattacctcaaagaacagtgccattccacaaagtggtagctttaccagaaggccatcgccagtaattttagatggatacaatgaaataagagacgatttctttgggccagagtgtaagttaagagttgttgcctttgtttgtgatgatgactttgaagaataaaaaggtatgttttaactttttattatttcaatttgtggcaaaactactctagcaacatttgtaacatttaaatgtgtatatatgaatggaaccatgggtatgtatatcatattgagacacaatttaaaaaaaaattacatttttct

SEQ ID NO: 1931 - protein, 272 aa, Arabidopsis thaliana
  peptide (1)..(272): Ceres Seq. ID no. 13493837
  misc_feature (1)..(272): NCBI GI NO: 22331369 NR Description: expressed protein [Arabidopsis thaliana]
  misc_feature (1)..(272): NCBI GI NO: 7939518 NR Description: gene_id:K1G2.17~unknown protein
  misc_feature (3)..(272): NCBI GI NO: 30693623 NR Description: expressed protein [Arabidopsis thaliana]
  misc_feature (3)..(234): NCBI GI NO: 9758081 NR Description: dbj|BAA95721
  misc_feature (240)..(272): NCBI GI NO: 9758081 NR Description: dbj|BAA95721
  misc_feature (134)..(269): NCBI GI NO: 28828907 NR Description: similar to Plasmodium falciparum
  misc_feature (129)..(268): NCBI GI NO: 34859208 NR Description: similar to hypothetical protein BC011981
  misc_feature (129)..(268): NCBI GI NO: 19923935 NR Description: hypothetical protein BC011981 [Homo sapiens]
  misc_feature (129)..(268): NCBI GI NO: 16552568 NR Description: unnamed protein product [Homo sapiens]
MSSSPDIAGILDNTKELDRLRKEQEEVLVEINKMHKKLQATPEIVEKPGDISLSKLKNLYIQAKELSESEVTVSNILLTQLDSLLPSGPTGQQRRKLVAEGNEQKRKRMKVDTDVTRVSPSMRNQIEAYASLKGEQVAARVTAEDAEKDEWFVVKVIHFDRETKEVEVLDEEPGDDEEGGGQRTYKLSMSCILPFPKRNDPSSTQEFIPGKHVLAVYPGTTALYKATVISTPRKRKSDEYLLEFDDDEEDGALPQRTVPFHKVVALPEGHRQ

SEQ ID NO: 1932 - protein, 239 aa, Arabidopsis thaliana
  peptide (1)..(239): Ceres Seq. ID no. 13493838
  misc_feature (1)..(239): NCBI GI NO: 22331369 NR Description: expressed protein [Arabidopsis thaliana]
  misc_feature (1)..(239): NCBI GI NO: 7939518 NR Description: gene_id:K1G2.17~unknown protein
  misc_feature (1)..(239): NCBI GI NO: 30693623 NR Description: expressed protein [Arabidopsis thaliana]
  misc_feature (1)..(201): NCBI GI NO: 9758081 NR Description: dbj|BAA95721
  misc_feature (207)..(239): NCBI GI NO: 9758081 NR Description: dbj|BAA95721
  misc_feature (101)..(236): NCBI GI NO: 28828907 NR Description: similar to Plasmodium falciparum
  misc_feature (96)..(235): NCBI GI NO: 34859208 NR Description: similar to hypothetical protein BC011981
  misc_feature (96)..(235): NCBI GI NO: 19923935 NR Description: hypothetical protein BC011981 [Homo sapiens]
  misc_feature (96)..(235): NCBI GI NO: 16552568 NR Description: unnamed protein product [Homo sapiens]
MHKKLQATPEIVEKPGDISLSKLKNLYIQAKELSESEVTVSNILLTQLDSLLPSGPTGQQRRKLVAEGNEQKRKRMKVDTDVTRVSPSMRNQIEAYASLKGEQVAARVTAEDAEKDEWFVVKVIHFDRETKEVEVLDEEPGDDEEGGGQRTYKLSMSCILPFPKRNDPSSTQEFIPGKHVLAVYPGTTALYKATVISTPRKRKSDEYLLEFDDDEEDGALPQRTVPFHKVVALPEGHRQ

SEQ ID NO: 1933 - protein, 164 aa, Arabidopsis thaliana
  peptide (1)..(164): Ceres Seq. ID no. 13493839
  misc_feature (1)..(164): NCBI GI NO: 22331369 NR Description: expressed protein [Arabidopsis thaliana]
  misc_feature (1)..(164): NCBI GI NO: 7939518 NR Description: gene_id:K1G2.17~unknown protein
  misc_feature (1)..(164): NCBI GI NO: 30693623 NR Description: expressed protein [Arabidopsis thaliana]
  misc_feature (1)..(126): NCBI GI NO: 9758081 NR Description: dbj|BAA95721
  misc_feature (132)..(164): NCBI GI NO: 9758081 NR Description: dbj|BAA95721
  misc_feature (26)..(161): NCBI GI NO: 28828907 NR Description: similar to Plasmodium falciparum
  misc_feature (21)..(160): NCBI GI NO: 34859208 NR Description: similar to hypothetical protein BC011981
  misc_feature (21)..(160): NCBI GI NO: 19923935 NR Description: hypothetical protein BC011981 [Homo sapiens]
  misc_feature (21)..(160): NCBI GI NO: 16552568 NR Description: unnamed protein product [Homo sapiens]
MKVDTDVTRVSPSMRNQIEAYASLKGEQVAARVTAEDAEKDEWFVVKVIHFDRETKEVEVLDEEPGDDEEGGGQRTYKLSMSCILPFPKRNDPSSTQEFIPGKHVLAVYPGTTALYKATVISTPRKRKSDEYLLEFDDDEEDGALPQRTVPFHKVVALPEGHRQ

SEQ ID NO: 1934 - DNA, 1457 bp, Arabidopsis thaliana
  misc_feature (1)..(1457): Ceres Seq. ID no. 12394548
acttaagctcaatggtggttggtggtgattcggtgttaggtgaagaacctctgtttcttcctcttcttcttcagggtcggtgttaggtgatgaagctccgttttttcgttttcgtcttcttcttcttcaaggtctcttcgttttgtgcttgaaattagggtttttgattgagaaattctgtagcggcggtggcatggcgtgctggtgagccattggttatggaggaagttgaagtgagtccacctcaaccacttgagatcagaattaaagttgtatgtacatctctctgtcgtagtgatctctctgcttgggaatctcagtctcttttgcctcgaatatttggccatgaagctgcaggtatagtggagagcattggagaaggtgtaactgagtttgaaaaaggagatcatgtgcttgctgtattcactggagaatgtgggtcatgtcggcattgcatatctgggaaaagtaacatgtgtcaggttcttggaatggagaggaaaggtttgatgcatagtgatcagaagacacgcttctccatcaaaggcaaacctgtttaccattactgcgcggtttcaagtttcagcgagtacactgtggttcactctggctgtgctgtcaaagtcgatccactggcacctctgcataaaatttgtcttctaagctgtggagtagctgcaggtcttggtgcagcatggaatgttgctgatgtacaaaaaggttcaagtgttgtgatatttggtcttggaactgtcggtctttctgttgctcaaggtgccaaacttagaggagcagctcaaatacttggggttgatataaatcccgctaaggctgaacaagcaaagacatttggtgtcacggatttcatcaattcaaatgacctctctgaacctataccccaggtgatcaaaagaatgacaggaggaggtgcagatttctcatttgaatgtgttggtgatacaggaatagctacaactgctttacaatcgtgctcggatggatggggaatgacggttactctaggtgtaccgaaagctaagcctgaagtttcagctcattacggacttttcctttctgggaaatctttaaaagggactctttttggtggttggaagcctaaatctgatcttccttcactcattgacaagtacatgaacaaggagattatgatcgatgaatttattacgcataacctgtcatttgatgaaatcaacaaagcttttgttcttatgagagaaggaaaatgtttgcgttgtgttcttcacatgccaaagtaatgtctcggaaaacacatgtcacagattcaagaaagattaacgagagctctgtatattctacagctgagttgttgtataaaacaaaagtgatggttttctatagagttatgagacttttttttttcttttggtttgttgtgaagtgatcgttcatacattataaagatggattctcacatg

SEQ ID NO: 1935 - protein, 352 aa, Arabidopsis thaliana
  peptide (1)..(352): Ceres Seq. ID no. 12394549
  misc_feature (1)..(352): NCBI GI NO: 18420834 NR Description: alcohol dehydrogenase - like protein
  misc_feature (1)..(352): NCBI GI NO: 21553654 NR Description: alcohol dehydrogenase-like protein
  misc_feature (1)..(352): NCBI GI NO: 10129655 NR Description: alcohol dehydrogenase-like protein
  misc_feature (1)..(350): NCBI GI NO: 7264740 NR Description: alcohol dehydrogenase 6 [Vitis vinifera]
  misc_feature (1)..(350): NCBI GI NO: 113379 NR Description: ALCOHOL DEHYDROGENASE 2
  misc_feature (1)..(350): NCBI GI NO: 113386 NR Description: ALCOHOL DEHYDROGENASE 3
  misc_feature (1)..(350): NCBI GI NO: 9885274 NR Description: alcohol dehydrogenase 2 [Vitis vinifera]
  misc_feature (1)..(350): NCBI GI NO: 1840425 NR Description: alcohol dehydrogenase
  misc_feature (1)..(350): NCBI GI NO: 7427629 NR Description: alcohol dehydrogenase (EC 1.1.1.1) - potato
  misc_feature (1)..(350): NCBI GI NO: 113365 NR Description: Alcohol dehydrogenase 1
MEEVEVSPPQPLEIRIKVVCTSLCRSDLSAWESQSLLPRIFGHEAAGIVESIGEGVTEFEKGDHVLAVFTGECGSCRHCISGKSNMCQVLGMERKGLMHSDQKTRFSIKGKPVYHYCAVSSFSEYTVVHSGCAVKVDPLAPLHKICLLSCGVAAGLGAAWNVADVQKGSSVVIFGLGTVGLSVAQGAKLRGAAQILGVDINPAKAEQAKTFGVTDFINSNDLSEPIPQVIKRMTGGGADFSFECVGDTGIATTALQSCSDGWGMTVTLGVPKAKPEVSAHYGLFLSGKSLKGTLFGGWKPKSDLPSLIDKYMNKEIMIDEFITHNLSFDEINKAFVLMREGKCLRCVLHMPK

SEQ ID NO: 1936 - protein, 267 aa, Arabidopsis thaliana
  peptide (1)..(267): Ceres Seq. ID no. 12394550
  misc_feature (1)..(267): NCBI GI NO: 18420834 NR Description: alcohol dehydrogenase - like protein
  misc_feature (1)..(267): NCBI GI NO: 21553654 NR Description: alcohol dehydrogenase-like protein
  misc_feature (1)..(267): NCBI GI NO: 10129655 NR Description: alcohol dehydrogenase-like protein
  misc_feature (1)..(265): NCBI GI NO: 7264740 NR Description: alcohol dehydrogenase 6 [Vitis vinifera]
  misc_feature (1)..(265): NCBI GI NO: 113379 NR Description: ALCOHOL DEHYDROGENASE 2
  misc_feature (1)..(265): NCBI GI NO: 113386 NR Description: ALCOHOL DEHYDROGENASE 3
  misc_feature (1)..(265): NCBI GI NO: 9885274 NR Description: alcohol dehydrogenase 2 [Vitis vinifera]
  misc_feature (1)..(265): NCBI GI NO: 1840425 NR Description: alcohol dehydrogenase
  misc_feature (1)..(265): NCBI GI NO: 7427629 NR Description: alcohol dehydrogenase (EC 1.1.1.1) - potato
  misc_feature (1)..(265): NCBI GI NO: 113365 NR Description: Alcohol dehydrogenase 1
MCQVLGMERKGLMHSDQKTRFSIKGKPVYHYCAVSSFSEYTVVHSGCAVKVDPLAPLHKICLLSCGVAAGLGAAWNVADVQKGSSVVIFGLGTVGLSVAQGAKLRGAAQILGVDINPAKAEQAKTFGVTDFINSNDLSEPIPQVIKRMTGGGADFSFECVGDTGIATTALQSCSDGWGMTVTLGVPKAKPEVSAHYGLFLSGKSLKGTLFGGWKPKSDLPSLIDKYMNKEIMIDEFITHNLSFDEINKAFVLMREGKCLRCVLHMPK

SEQ ID NO: 1937 - protein, 261 aa, Arabidopsis thaliana
  peptide (1)..(261): Ceres Seq. ID no. 12394551
  misc_feature (1)..(261): NCBI GI NO: 18420834 NR Description: alcohol dehydrogenase - like protein
  misc_feature (1)..(261): NCBI GI NO: 21553654 NR Description: alcohol dehydrogenase-like protein
  misc_feature (1)..(261): NCBI GI NO: 10129655 NR Description: alcohol dehydrogenase-like protein
  misc_feature (1)..(259): NCBI GI NO: 7264740 NR Description: alcohol dehydrogenase 6 [Vitis vinifera]
  misc_feature (1)..(259): NCBI GI NO: 113379 NR Description: ALCOHOL DEHYDROGENASE 2
  misc_feature (1)..(259): NCBI GI NO: 113386 NR Description: ALCOHOL DEHYDROGENASE 3
  misc_feature (1)..(259): NCBI GI NO: 9885274 NR Description: alcohol dehydrogenase 2 [Vitis vinifera]
  misc_feature (1)..(259): NCBI GI NO: 1840425 NR Description: alcohol dehydrogenase
  misc_feature (1)..(259): NCBI GI NO: 7427629 NR Description: alcohol dehydrogenase (EC 1.1.1.1) - potato
  misc_feature (1)..(259): NCBI GI NO: 113365 NR Description: Alcohol dehydrogenase 1
MERKGLMHSDQKTRFSIKGKPVYHYCAVSSFSEYTVVHSGCAVKVDPLAPLHKICLLSCGVAAGLGAAWNVADVQKGSSVVIFGLGTVGLSVAQGAKLRGAAQILGVDINPAKAEQAKTFGVTDFINSNDLSEPIPQVIKRMTGGGADFSFECVGDTGIATTALQSCSDGWGMTVTLGVPKAKPEVSAHYGLFLSGKSLKGTLFGGWKPKSDLPSLIDKYMNKEIMIDEFITHNLSFDEINKAFVLMREGKCLRCVLHMPK

SEQ ID NO: 1938 - DNA, 1397 bp, Arabidopsis thaliana
  misc_feature (1)..(1397): Ceres Seq. ID no. 12562342
acaacataaacccaatctctcactcagactaagacagagtcagaaacaatggcgaaatctccagaaacagagcatccgaacaaagtctttggttggggtgctagagacaaatccggtgttctctctccttttcacttctctagaagagacaatggtgaaaatgatgtgacagtgaagatcttgttctgtggagtttgccacactgatttacacaccatcaaaaacgactggggatactcgtattacccagtagttccagggcatgaaatcgttgggatcgctacaaaagttggtaagaacgtgactaaattcaaagaaggagatcgtgtcggagtaggagtgatcagtggctcgtgccaatcttgcgaatcttgtgaccaagatcttgaaaactactgtcctcaaatgtctttcacatacaatgcgattggatccgatggaaccaagaattacggtggctattcggagaacattgtggttgatcaacggtttgttttgcggtttccggagaatttaccgagcgattcgggtgcgccgttgctgtgtgctggaatcactgtgtatagtccaatgaagtattatggtatgactgaggcagggaagcatttaggggttgctggacttggtgggcttggtcatgttgctgttaagattggtaaagcttttggtttgaaagttactgtcattagttcttcttctacgaaagcagaggaagccattaatcatcttggtgctgattcgtttcttgtcacaactgatcctcagaaaatgaaggctgcaattggaacaatggactacattatcgatacgatatcagcagtacatgctctgtatccgttgctcggtttactcaaagtcaacggaaagctcattgctttaggcttacctgagaagcctctcgagctaccaatgttccctcttgttctcggaaggaaaatggttggaggaagtgacgtgggagggatgaaggagacacaagagatgcttgatttctgcgctaagcacaacattacagctgatattgaattgattaagatggatgagattaacactgcgatggagaggcttgctaagtctgatgttaggtacaggttcgtgatcgacgtggctaactccttgagccctccatgaatgatccggatctaagaattgagcattgaggaggctttaaatctatgtcataatcttggtgtttgtttgtgtctctcgagttatcttcgttttctgctttcggtttgagaatcggtttcttctcagacaagttaccttatttcgttgttttcttctcatgttctgtttcctgagagaaactctttctgattccagataagactttgatccattttcagtttgctaataatataaagatgggtctaaaacctaaacagctttaaact

SEQ ID NO: 1939 - protein, 360 aa, Arabidopsis thaliana
  peptide (1)..(360): Ceres Seq. ID no. 12562343
  misc_feature (1)..(360): NCBI GI NO: 15235022 NR Description: cinnamyl-alcohol dehydrogenase CAD1
  misc_feature (1)..(360): NCBI GI NO: 21592964 NR Description: cinnamyl-alcohol dehydrogenase CAD1
  misc_feature (1)..(360): NCBI GI NO: 1168728 NR Description: Probable mannitol dehydrogenase
  misc_feature (5)..(360): NCBI GI NO: 2146727 NR Description: cinnamyl-alcohol dehydrogenase (EC 1
  misc_feature (1)..(358): NCBI GI NO: 22475166 NR Description: putative sinapyl alcohol dehydrogenase
  misc_feature (11)..(359): NCBI GI NO: 15227091 NR Description: putative cinnamyl-alcohol dehydrogenase
  misc_feature (11)..(359): NCBI GI NO: 15227106 NR Description: putative cinnamyl-alcohol dehydrogenase
  misc_feature (1)..(358): NCBI GI NO: 10720088 NR Description: Probable mannitol dehydrogenase
  misc_feature (11)..(358): NCBI GI NO: 3913193 NR Description: Probable mannitol dehydrogenase 1
  misc_feature (1)..(358): NCBI GI NO: 14279694 NR Description: sinapyl alcohol dehydrogenase
MAKSPETEHPNKVFGWGARDKSGVLSPFHFSRRDNGENDVTVKILFCGVCHTDLHTIKNDWGYSYYPVVPGHEIVGIATKVGKNVTKFKEGDRVGVGVISGSCQSCESCDQDLENYCPQMSFTYNAIGSDGTKNYGGYSENIVVDQRFVLRFPENLPSDSGAPLLCAGITVYSPMKYYGMTEAGKHLGVAGLGGLGHVAVKIGKAFGLKVTVISSSSTKAEEAINHLGADSFLVTTDPQKMKAAIGTMDYIIDTISAVHALYPLLGLLKVNGKLIALGLPEKPLELPMFPLVLGRKMVGGSDVGGMKETQEMLDFCAKHNITADIELIKMDEINTAMERLAKSDVRYRFVIDVANSLSPP

SEQ ID NO: 1940 - protein, 241 aa, Arabidopsis thaliana
  peptide (1)..(241): Ceres Seq. ID no. 12562344
  misc_feature (1)..(241): NCBI GI NO: 15235022 NR Description: cinnamyl-alcohol dehydrogenase CAD1
  misc_feature (1)..(241): NCBI GI NO: 21592964 NR Description: cinnamyl-alcohol dehydrogenase CAD1
  misc_feature (1)..(241): NCBI GI NO: 1168728 NR Description: Probable mannitol dehydrogenase
  misc_feature (1)..(241): NCBI GI NO: 2146727 NR Description: cinnamyl-alcohol dehydrogenase (EC 1
  misc_feature (1)..(239): NCBI GI NO: 22475166 NR Description: putative sinapyl alcohol dehydrogenase
  misc_feature (1)..(240): NCBI GI NO: 15227091 NR Description: putative cinnamyl-alcohol dehydrogenase
  misc_feature (1)..(240): NCBI GI NO: 15227106 NR Description: putative cinnamyl-alcohol dehydrogenase
  misc_feature (1)..(239): NCBI GI NO: 10720088 NR Description: Probable mannitol dehydrogenase
  misc_feature (1)..(239): NCBI GI NO: 3913193 NR Description: Probable mannitol dehydrogenase 1
  misc_feature (1)..(239): NCBI GI NO: 14279694 NR Description: sinapyl alcohol dehydrogenase
MSFTYNAIGSDGTKNYGGYSENIVVDQRFVLRFPENLPSDSGAPLLCAGITVYSPMKYYGMTEAGKHLGVAGLGGLGHVAVKIGKAFGLKVTVISSSSTKAEEAINHLGADSFLVTTDPQKMKAAIGTMDYIIDTISAVHALYPLLGLLKVNGKLIALGLPEKPLELPMFPLVLGRKMVGGSDVGGMKETQEMLDFCAKHNITADIELIKMDEINTAMERLAKSDVRYRFVIDVANSLSPP

SEQ ID NO: 1941 - protein, 186 aa, Arabidopsis thaliana
  peptide (1)..(186): Ceres Seq. ID no. 12562345
  misc_feature (1)..(186): NCBI GI NO: 15235022 NR Description: cinnamyl-alcohol dehydrogenase CAD1
  misc_feature (1)..(186): NCBI GI NO: 21592964 NR Description: cinnamyl-alcohol dehydrogenase CAD1
  misc_feature (1)..(186): NCBI GI NO: 1168728 NR Description: Probable mannitol dehydrogenase
  misc_feature (1)..(186): NCBI GI NO: 2146727 NR Description: cinnamyl-alcohol dehydrogenase (EC 1
  misc_feature (1)..(184): NCBI GI NO: 22475166 NR Description: putative sinapyl alcohol dehydrogenase
  misc_feature (1)..(185): NCBI GI NO: 15227091 NR Description: putative cinnamyl-alcohol dehydrogenase
  misc_feature (1)..(185): NCBI GI NO: 15227106 NR Description: putative cinnamyl-alcohol dehydrogenase
  misc_feature (1)..(184): NCBI GI NO: 10720088 NR Description: Probable mannitol dehydrogenase
  misc_feature (1)..(184): NCBI GI NO: 3913193 NR Description: Probable mannitol dehydrogenase 1
  misc_feature (1)..(184): NCBI GI NO: 14279694 NR Description: sinapyl alcohol dehydrogenase
MKYYGMTEAGKHLGVAGLGGLGHVAVKIGKAFGLKVTVISSSSTKAEEAINHLGADSFLVTTDPQKMKAAIGTMDYIIDTISAVHALYPLLGLLKVNGKLIALGLPEKPLELPMFPLVLGRKMVGGSDVGGMKETQEMLDFCAKHNITADIELIKMDEINTAMERLAKSDVRYRFVIDVANSLSPP

SEQ ID NO: 1942 - DNA, 1502 bp, Arabidopsis thaliana
  misc_feature (1)..(1502): Ceres Seq. ID no. 12562346
gtacctttttttgttgtaatttttccatacacccaatttcccgtggaagaaaaggagtcagctttttcgtttgctttaaagcttgaatctttacatagttccagttactttctatagagcttcataatccctagttgcccaaaaggattctgggttttgtgagaatgatgacgtcatgtcggaatatagatttaggtacgatgatgatggcatgtggttgtggccgtcgtcagtttccttcattagcgaagactgtttgtaagtttactagcagcaatagaagctatggcggtctggtggggagttgcaaagcggtgccaacgaaatcaaaggagatctctttgctcaatggtattggtcaatctcaaacagtgagttttgatttgaaacaagagtcaaaacagcctatttcgttggtgactctgtttgagctagtagctgttgatctgcagactttgaatgacaatcttttatcgattgttggtgcggaaaatccggttttgatatctgcggctgagcagattttcggagctggtggtaaaagaatgagaccgggtttggtattccttgtatcacatgccacggcggaattagcaggcctaaaggaactaacaacagaacaccggcgtttggctgagatcatcgagatgatacacactgcaagcttgatacacgacgatgtgttagacgagagtgacatgcgaagaggaaaggaaacagttcatgagcttttcggcacaagagtagcggtgctagctggagatttcatgtttgctcaagcgtcatggtacttagcaaatctcgagaatcttgaagttattaagctcatcagtcaggtgatcaaagactttgcaagcggagagataaagcaggcgtccagcttatttgactgcgacaccaagctcgacgagtacttactcaaaagtttctacaagacagcctctttagtggctgcgagcaccaaaggagctgccattttcagcagagttgagcctgatgtgacagaacaaatgtacgagtttgggaagaatctcggtctctctttccagatagttgatgatattttggatttcactcagtcgacagagcagctcgggaagccagcagggagtgatttggctaaaggtaacttaacagcacctgtgattttcgctctggagagggagccaaggctaagagagatcattgagtcagagttttgtgaggcgggttctctggaagaagcgattgaagcggtgacaaaaggtggggggattaagagagcacaagaattggctagggagaaagctgatgacgctataaagaatctacagtgtctacctcgaagtggcttcaggtcggctctagaagatatggtgttgtataacctcgaaagaattgattagctttccaaaagaagttggaaacactgagacatgcttatagacttatagtacagtaaaacacacacaaaagaggaatgattgtaactcctatttcaaaagtaataacacatgatttcg

SEQ ID NO: 1943 - protein, 406 aa, Arabidopsis thaliana
  peptide (1)..(406): Ceres Seq. ID no. 12562347
  misc_feature (113)..(360): Pfam Name: Pfam Description:  Polyprenyl synthetase
  misc_feature (1)..(406): NCBI GI NO: 30699332 NR Description: geranyl diphosphate synthase
  misc_feature (63)..(406): NCBI GI NO: 25314331 NR Description: hypothetical protein T30F21.15
  misc_feature (1)..(406): NCBI GI NO: 22329620 NR Description: geranyl diphosphate synthase
  misc_feature (45)..(406): NCBI GI NO: 25314280 NR Description: prenyl transferase homolog
  misc_feature (86)..(406): NCBI GI NO: 28393675 NR Description: putative geranyl diphosphate synthase
  misc_feature (82)..(405): NCBI GI NO: 16329171 NR Description: solanesyl diphosphate synthase
  misc_feature (83)..(405): NCBI GI NO: 22299300 NR Description: solanesyl diphosphate synthase
  misc_feature (86)..(405): NCBI GI NO: 23125555 NR Description: hypothetical protein [Nostoc punctiforme]
  misc_feature (86)..(405): NCBI GI NO: 17227592 NR Description: solanesyl diphosphate synthase
  misc_feature (94)..(404): NCBI GI NO: 30468171 NR Description: prenyl transferase [Cyanidioschyzon merolae]
MMTSCRNIDLGTMMMACGCGRRQFPSLAKTVCKFTSSNRSYGGLVGSCKAVPTKSKEISLLNGIGQSQTVSFDLKQESKQPISLVTLFELVAVDLQTLNDNLLSIVGAENPVLISAAEQIFGAGGKRMRPGLVFLVSHATAELAGLKELTTEHRRLAEIIEMIHTASLIHDDVLDESDMRRGKETVHELFGTRVAVLAGDFMFAQASWYLANLENLEVIKLISQVIKDFASGEIKQASSLFDCDTKLDEYLLKSFYKTASLVAASTKGAAIFSRVEPDVTEQMYEFGKNLGLSFQIVDDILDFTQSTEQLGKPAGSDLAKGNLTAPVIFALEREPRLREIIESEFCEAGSLEEAIEAVTKGGGIKRAQELAREKADDAIKNLQCLPRSGFRSALEDMVLYNLERID

SEQ ID NO: 1944 - protein, 405 aa, Arabidopsis thaliana
  peptide (1)..(405): Ceres Seq. ID no. 12562348
  misc_feature (112)..(359): Pfam Name: Pfam Description:  Polyprenyl synthetase
  misc_feature (1)..(405): NCBI GI NO: 30699332 NR Description: geranyl diphosphate synthase
  misc_feature (62)..(405): NCBI GI NO: 25314331 NR Description: hypothetical protein T30F21.15
  misc_feature (1)..(405): NCBI GI NO: 22329620 NR Description: geranyl diphosphate synthase
  misc_feature (44)..(405): NCBI GI NO: 25314280 NR Description: prenyl transferase homolog
  misc_feature (85)..(405): NCBI GI NO: 28393675 NR Description: putative geranyl diphosphate synthase
  misc_feature (81)..(404): NCBI GI NO: 16329171 NR Description: solanesyl diphosphate synthase
  misc_feature (82)..(404): NCBI GI NO: 22299300 NR Description: solanesyl diphosphate synthase
  misc_feature (85)..(404): NCBI GI NO: 23125555 NR Description: hypothetical protein [Nostoc punctiforme]
  misc_feature (85)..(404): NCBI GI NO: 17227592 NR Description: solanesyl diphosphate synthase
  misc_feature (93)..(403): NCBI GI NO: 30468171 NR Description: prenyl transferase [Cyanidioschyzon merolae]
MTSCRNIDLGTMMMACGCGRRQFPSLAKTVCKFTSSNRSYGGLVGSCKAVPTKSKEISLLNGIGQSQTVSFDLKQESKQPISLVTLFELVAVDLQTLNDNLLSIVGAENPVLISAAEQIFGAGGKRMRPGLVFLVSHATAELAGLKELTTEHRRLAEIIEMIHTASLIHDDVLDESDMRRGKETVHELFGTRVAVLAGDFMFAQASWYLANLENLEVIKLISQVIKDFASGEIKQASSLFDCDTKLDEYLLKSFYKTASLVAASTKGAAIFSRVEPDVTEQMYEFGKNLGLSFQIVDDILDFTQSTEQLGKPAGSDLAKGNLTAPVIFALEREPRLREIIESEFCEAGSLEEAIEAVTKGGGIKRAQELAREKADDAIKNLQCLPRSGFRSALEDMVLYNLERID

SEQ ID NO: 1945 - protein, 394 aa, Arabidopsis thaliana
  peptide (1)..(394): Ceres Seq. ID no. 12562349
  misc_feature (101)..(348): Pfam Name: Pfam Description:  Polyprenyl synthetase
  misc_feature (1)..(394): NCBI GI NO: 30699332 NR Description: geranyl diphosphate synthase
  misc_feature (51)..(394): NCBI GI NO: 25314331 NR Description: hypothetical protein T30F21.15
  misc_feature (1)..(394): NCBI GI NO: 22329620 NR Description: geranyl diphosphate synthase
  misc_feature (33)..(394): NCBI GI NO: 25314280 NR Description: prenyl transferase homolog
  misc_feature (74)..(394): NCBI GI NO: 28393675 NR Description: putative geranyl diphosphate synthase
  misc_feature (70)..(393): NCBI GI NO: 16329171 NR Description: solanesyl diphosphate synthase
  misc_feature (71)..(393): NCBI GI NO: 22299300 NR Description: solanesyl diphosphate synthase
  misc_feature (74)..(393): NCBI GI NO: 23125555 NR Description: hypothetical protein [Nostoc punctiforme]
  misc_feature (74)..(393): NCBI GI NO: 17227592 NR Description: solanesyl diphosphate synthase
  misc_feature (82)..(392): NCBI GI NO: 30468171 NR Description: prenyl transferase [Cyanidioschyzon merolae]
MMMACGCGRRQFPSLAKTVCKFTSSNRSYGGLVGSCKAVPTKSKEISLLNGIGQSQTVSFDLKQESKQPISLVTLFELVAVDLQTLNDNLLSIVGAENPVLISAAEQIFGAGGKRMRPGLVFLVSHATAELAGLKELTTEHRRLAEIIEMIHTASLIHDDVLDESDMRRGKETVHELFGTRVAVLAGDFMFAQASWYLANLENLEVIKLISQVIKDFASGEIKQASSLFDCDTKLDEYLLKSFYKTASLVAASTKGAAIFSRVEPDVTEQMYEFGKNLGLSFQIVDDILDFTQSTEQLGKPAGSDLAKGNLTAPVIFALEREPRLREIIESEFCEAGSLEEAIEAVTKGGGIKRAQELAREKADDAIKNLQCLPRSGFRSALEDMVLYNLERID

SEQ ID NO: 1946 - DNA, 1121 bp, Arabidopsis thaliana
  misc_feature (1)..(1121): Ceres Seq. ID no. 13592128
aaatgaaaagccagtgaattagggctttctctcacttgttgaagccgcttcttcttcttcctcactgtagctcgtcgtcgctacaccatctagaagacccttaaccatggctgtcgggaagaacaagaggatttcaaagggtaggaaaggaggaaagaagaaggctgttgatcccttctccaagaaggattggtatgacgtgaaggctcctggttctttcacgaacaggaatgttgggaagactcttgtttccaggactcagggtaccaagattgcctctgagggactgaaacacagggtgtttgaggtttctcttgctgatctacaaaatgatgaggataatgcctacaggaagatccgtcttagagctgaagatgttcagggaaggaatgtgttgacccagttctggggtatggatttcacaaccgacaagctaaggtcattggtgaagaagtggcagactttgattgaagcccatgtcgatgtgaaaaccacagacggctacaccttgaggatgttctgcatcgccttcacaaagagacgtgctaaccaagtgaagcgtacctgttacgctcaatccagccaaatccgtcagatccgcagaaagatgagtgagattatggtgaaggaggcttcatcttgtgacctcaaggagctagtggccaagttcatcccagaggccattggaagagagattgagaaggcaacacagggcatctacccgttgcagaatgtgttcatccgtaaagtgaagatcctaaaggctcccaagtttgaccttggaaagctcatggaggtgcatggagattacacagcagaggatgttggtgtgaaggtagacaggccagctgatgagacaatggttgaggagccaacagaaatcatcggagcttaggggattatagatttgtttgttttttcgctggcaaaaaaaaaaaagaacctaatgttatgtcgccattggtgtgactggttttggactcgtttttgatggatgatctttattgtttatcatgttttaccttttttattatatgtcttagttcttcacttcttcttttcatttttggaatctggatttgctctctcttcaaatatttaaatggacaagattaggattt

SEQ ID NO: 1947 - protein, 262 aa, Arabidopsis thaliana [sequence omitted]

SEQ ID NO: 1948 - protein, 160 aa, Arabidopsis thaliana
  peptide (1)..(160): Ceres Seq. ID no. 13592130
  misc_feature (1)..(120): Pfam Name: Pfam Description:  Ribosomal S3Ae family
  misc_feature (1)..(160): NCBI GI NO: 15236171 NR Description: 40S ribosomal protein S3A (RPS3aB)
  misc_feature (1)..(160): NCBI GI NO: 15229364 NR Description: 40S ribosomal protein S3A (RPS3aA)
  misc_feature (1)..(160): NCBI GI NO: 1350981 NR Description: 40S RIBOSOMAL PROTEIN S3A
  misc_feature (1)..(160): NCBI GI NO: 6714564 NR Description: cyc07 [Daucus carota]
  misc_feature (1)..(160): NCBI GI NO: 24817254 NR Description: ribosomal protein S3a [Cicer arietinum]
  misc_feature (1)..(160): NCBI GI NO: 1350984 NR Description: 40S RIBOSOMAL PROTEIN S3A
  misc_feature (1)..(160): NCBI GI NO: 1350983 NR Description: 40S RIBOSOMAL PROTEIN S3A (CYC07 PROTEIN)
  misc_feature (1)..(150): NCBI GI NO: 1350986 NR Description: 40S RIBOSOMAL PROTEIN S3A (CYC07 PROTEIN)
  misc_feature (1)..(153): NCBI GI NO: 7441116 NR Description: ribosomal protein S3a, cytosolic - rice
  misc_feature (1)..(137): NCBI GI NO: 1856971 NR Description: This gene is specifically expressed at the S phase duringthe cell cycle in the synchronous culture of periwinkle cells
MDFTTDKLRSLVKKWQTLIEAHVDVKTTDGYTLRMFCIAFTKRRANQVKRTCYAQSSQIRQIRRKMSEIMVKEASSCDLKELVAKFIPEAIGREIEKATQGIYPLQNVFIRKVKILKAPKFDLGKLMEVHGDYTAEDVGVKVDRPADETMVEEPTEIIGA

SEQ ID NO: 1949 - DNA, 732 bp, Arabidopsis thaliana
  misc_feature (1)..(732): Ceres Seq. ID no. 13580657
agaacatcctaatcaaaaaataaaaagtagtactcgtatcttactcgtgccagccactcgcatttctccagattttattatccttcctcgaaacaagagcttagctaagatgacgaagaactacccaaccgtgagcgaagattacaagaaggctgttgagaagtgcaggaggaagctcagaggtttgatcgctgagaagaactgtgcacccatcatggtccgactcgcatggcactctgctggaactttcgattgtcaatcaaggactggaggtccattcggaacaatgaggtttgacgctgagcaagctcatggagccaacagtggtatccacattgctcttaggttgttggaccccatcagggagcaattccctaccatctcttttgctgatttccatcagcttgctggtgttgtggccgttgaagttactggtggccctgacattcctttccaccctggaagagaggacaagccccaaccacctccagagggtcgtcttcctgatgcttaagctgtgacgtatgctctgtgtgtgtgtgtgtgtctccccgagagtcatggctgtttttggttgggggctggaggggtcgcattgcatttgaactttgtcatatgattgcttaatgtactctcggatttacgtatctgtttttttcggtgggttgtgatttgaacacatccgttgcgcttttgctgcttagacacattaataaaattaatttctctcgc

SEQ ID NO: 1950 - protein, 170 aa, Arabidopsis thaliana
  peptide (1)..(170): Ceres Seq. ID no. 13580658
  misc_feature (55)..(170): Pfam Name: Pfam Description:  Peroxidase
  misc_feature (24)..(170): NCBI GI NO: 99735 NR Description: L-ascorbate peroxidase (EC 1
  misc_feature (37)..(170): NCBI GI NO: 15223049 NR Description: ascorbate peroxidase, putative (APX)
  misc_feature (37)..(170): NCBI GI NO: 24421233 NR Description: ascorbate peroxidase [Brassica juncea]
  misc_feature (37)..(170): NCBI GI NO: 24421231 NR Description: ascorbate peroxidase [Brassica juncea]
  misc_feature (37)..(170): NCBI GI NO: 18265381 NR Description: ascorbate peroxidase [Brassica oleracea]
  misc_feature (37)..(170): NCBI GI NO: 18265379 NR Description: ascorbate peroxidase [Brassica oleracea]
  misc_feature (37)..(170): NCBI GI NO: 7488439 NR Description: L-ascorbate peroxidase (EC 1
  misc_feature (37)..(170): NCBI GI NO: 1890354 NR Description: L-ascorbate peroxidase [Brassica napus]
  misc_feature (37)..(170): NCBI GI NO: 541927 NR Description: L-ascorbate peroxidase (EC 1.11.1.11) - radish
  misc_feature (37)..(170): NCBI GI NO: 24636598 NR Description: ascorbate peroxidase [Solanum tuberosum]
EHPNQKIKSSTRILLVPATRISPDFIILPRNKSLAKMTKNYPTVSEDYKKAVEKCRRKLRGLIAEKNCAPIMVRLAWHSAGTFDCQSRTGGPFGTMRFDAEQAHGANSGIHIALRLLDPIREQFPTISFADFHQLAGVVAVEVTGGPDIPFHPGREDKPQPPPEGRLPDA

SEQ ID NO: 1951 - protein, 134 aa, Arabidopsis thaliana
  peptide (1)..(134): Ceres Seq. ID no. 13580659
  misc_feature (19)..(134): Pfam Name: Pfam Description:  Peroxidase
  misc_feature (1)..(134): NCBI GI NO: 99735 NR Description: L-ascorbate peroxidase (EC 1
  misc_feature (1)..(134): NCBI GI NO: 15223049 NR Description: ascorbate peroxidase, putative (APX)
  misc_feature (1)..(134): NCBI GI NO: 24421233 NR Description: ascorbate peroxidase [Brassica juncea]
  misc_feature (1)..(134): NCBI GI NO: 24421231 NR Description: ascorbate peroxidase [Brassica juncea]
  misc_feature (1)..(134): NCBI GI NO: 18265381 NR Description: ascorbate peroxidase [Brassica oleracea]
  misc_feature (1)..(134): NCBI GI NO: 18265379 NR Description: ascorbate peroxidase [Brassica oleracea]
  misc_feature (1)..(134): NCBI GI NO: 7488439 NR Description: L-ascorbate peroxidase (EC 1
  misc_feature (1)..(134): NCBI GI NO: 1890354 NR Description: L-ascorbate peroxidase [Brassica napus]
  misc_feature (1)..(134): NCBI GI NO: 541927 NR Description: L-ascorbate peroxidase (EC 1.11.1.11) - radish
  misc_feature (1)..(134): NCBI GI NO: 24636598 NR Description: ascorbate peroxidase [Solanum tuberosum]
MTKNYPTVSEDYKKAVEKCRRKLRGLIAEKNCAPIMVRLAWHSAGTFDCQSRTGGPFGTMRFDAEQAHGANSGIHIALRLLDPIREQFPTISFADFHQLAGVVAVEVTGGPDIPFHPGREDKPQPPPEGRLPDA

SEQ ID NO: 1952 - protein, 99 aa, Arabidopsis thaliana
  peptide (1)..(99): Ceres Seq. ID no. 13580660
  misc_feature (1)..(99): Pfam Name: Pfam Description:  Peroxidase
  misc_feature (1)..(99): NCBI GI NO: 99735 NR Description: L-ascorbate peroxidase (EC 1
  misc_feature (1)..(99): NCBI GI NO: 15223049 NR Description: ascorbate peroxidase, putative (APX)
  misc_feature (1)..(99): NCBI GI NO: 24421233 NR Description: ascorbate peroxidase [Brassica juncea]
  misc_feature (1)..(99): NCBI GI NO: 24421231 NR Description: ascorbate peroxidase [Brassica juncea]
  misc_feature (1)..(99): NCBI GI NO: 18265381 NR Description: ascorbate peroxidase [Brassica oleracea]
  misc_feature (1)..(99): NCBI GI NO: 18265379 NR Description: ascorbate peroxidase [Brassica oleracea]
  misc_feature (1)..(99): NCBI GI NO: 7488439 NR Description: L-ascorbate peroxidase (EC 1
  misc_feature (1)..(99): NCBI GI NO: 1890354 NR Description: L-ascorbate peroxidase [Brassica napus]
  misc_feature (1)..(99): NCBI GI NO: 541927 NR Description: L-ascorbate peroxidase (EC 1.11.1.11) - radish
  misc_feature (1)..(99): NCBI GI NO: 24636598 NR Description: ascorbate peroxidase [Solanum tuberosum]
MVRLAWHSAGTFDCQSRTGGPFGTMRFDAEQAHGANSGIHIALRLLDPIREQFPTISFADFHQLAGVVAVEVTGGPDIPFHPGREDKPQPPPEGRLPDA

SEQ ID NO: 1953 - DNA, 739 bp, Arabidopsis thaliana
  misc_feature (1)..(739): Ceres Seq. ID no. 13592931
agaacatcctaatcgaaaaatagtttcgagtttcttcgacagtggcaatgttttcatcttcgattaggttaatcgtatctgggttccaccggactcaacccctaaaatcgccggtaaattctccgagcgtcttcatctccgtacctaaattcttcaactctgagtcaaaatcgacgggaactggttcaagatccgtagcaatgagcagcgtcgagaaaaccgggtcggattctggagcaatagagaatcgagcgagcaggatgagagagaagcttcaaaaagagctcgaaccagtggagttagtgatcgaagatgtttcgtatcagcacgctggtcacgccggaatgaaaggtagaaccgacgatgagacgcatttcaatgtgaagatcgtttctaaaggattcgagggaatgaatttggtgaagagacacaggttggtctatcatttgctccgggaagagttggatactggattgcacgctctttctatcgtctccaagacgccgtctgagtctccttctaaagactagtgtactggtactgtttaatgtatcttctgtttctgttatcagagtttctcatcaaactctgttcgattcaaagattgaatttttaccatcaaagtgctctgttttggaatttattgcggagccaaagtcttcatttttacatacgcttgaggttgtgtgttggtgtttctggaattgtgtgttggaacaaagacacttgcttttagtcc

SEQ ID NO: 1954 - protein, 160 aa, Arabidopsis thaliana
  peptide (1)..(160): Ceres Seq. ID no. 13592932
  misc_feature (75)..(156): Pfam Name: Pfam Description:  BolA-like protein
  misc_feature (1)..(129): NCBI GI NO: 8778492 NR Description: F20N2.18 [Arabidopsis thaliana]
  misc_feature (52)..(160): NCBI GI NO: 18405543 NR Description: expressed protein [Arabidopsis thaliana]
  misc_feature (1)..(102): NCBI GI NO: 8778331 NR Description: F14J16.3 [Arabidopsis thaliana]
  misc_feature (1)..(155): NCBI GI NO: 15236742 NR Description: expressed protein [Arabidopsis thaliana]
  misc_feature (1)..(155): NCBI GI NO: 28393578 NR Description: unknown protein [Arabidopsis thaliana]
  misc_feature (64)..(159): NCBI GI NO: 27764549 NR Description: unknown [Glycine max]
  misc_feature (68)..(155): NCBI GI NO: 19112580 NR Description: uv-induced protein uvi31
  misc_feature (91)..(159): NCBI GI NO: 12621476 NR Description: Similar to pombe uvi31
  misc_feature (67)..(156): NCBI GI NO: 21231649 NR Description: conserved hypothetical protein
  misc_feature (74)..(156): NCBI GI NO: 22962493 NR Description: hypothetical protein [Rhodopseudomonas palustris]
MFSSSIRLIVSGFHRTQPLKSPVNSPSVFISVPKFFNSESKSTGTGSRSVAMSSVEKTGSDSGAIENRASRMREKLQKELEPVELVIEDVSYQHAGHAGMKGRTDDETHFNVKIVSKGFEGMNLVKRHRLVYHLLREELDTGLHALSIVSKTPSESPSKD

SEQ ID NO: 1955 - protein, 109 aa, Arabidopsis thaliana
  peptide (1)..(109): Ceres Seq. ID no. 13592933
  misc_feature (24)..(105): Pfam Name: Pfam Description:  BolA-like protein
  misc_feature (1)..(78): NCBI GI NO: 8778492 NR Description: F20N2.18 [Arabidopsis thaliana]
  misc_feature (1)..(109): NCBI GI NO: 18405543 NR Description: expressed protein [Arabidopsis thaliana]
  misc_feature (1)..(51): NCBI GI NO: 8778331 NR Description: F14J16.3 [Arabidopsis thaliana]
  misc_feature (1)..(104): NCBI GI NO: 15236742 NR Description: expressed protein [Arabidopsis thaliana]
  misc_feature (1)..(104): NCBI GI NO: 28393578 NR Description: unknown protein [Arabidopsis thaliana]
  misc_feature (13)..(108): NCBI GI NO: 27764549 NR Description: unknown [Glycine max]
  misc_feature (17)..(104): NCBI GI NO: 19112580 NR Description: uv-induced protein uvi31
  misc_feature (40)..(108): NCBI GI NO: 12621476 NR Description: Similar to pombe uvi31
  misc_feature (16)..(105): NCBI GI NO: 21231649 NR Description: conserved hypothetical protein
  misc_feature (23)..(105): NCBI GI NO: 22962493 NR Description: hypothetical protein [Rhodopseudomonas palustris]
MSSVEKTGSDSGAIENRASRMREKLQKELEPVELVIEDVSYQHAGHAGMKGRTDDETHFNVKIVSKGFEGMNLVKRHRLVYHLLREELDTGLHALSIVSKTPSESPSKD

SEQ ID NO: 1956 - protein, 89 aa, Arabidopsis thaliana
  peptide (1)..(89): Ceres Seq. ID no. 13592934
  misc_feature (4)..(85): Pfam Name: Pfam Description:  BolA-like protein
  misc_feature (1)..(58): NCBI GI NO: 8778492 NR Description: F20N2.18 [Arabidopsis thaliana]
  misc_feature (1)..(89): NCBI GI NO: 18405543 NR Description: expressed protein [Arabidopsis thaliana]
  misc_feature (1)..(31): NCBI GI NO: 8778331 NR Description: F14J16.3 [Arabidopsis thaliana]
  misc_feature (1)..(84): NCBI GI NO: 15236742 NR Description: expressed protein [Arabidopsis thaliana]
  misc_feature (1)..(84): NCBI GI NO: 28393578 NR Description: unknown protein [Arabidopsis thaliana]
  misc_feature (1)..(88): NCBI GI NO: 27764549 NR Description: unknown [Glycine max]
  misc_feature (1)..(84): NCBI GI NO: 19112580 NR Description: uv-induced protein uvi31
  misc_feature (20)..(88): NCBI GI NO: 12621476 NR Description: Similar to pombe uvi31
  misc_feature (1)..(85): NCBI GI NO: 21231649 NR Description: conserved hypothetical protein
  misc_feature (3)..(85): NCBI GI NO: 22962493 NR Description: hypothetical protein [Rhodopseudomonas palustris]
MREKLQKELEPVELVIEDVSYQHAGHAGMKGRTDDETHFNVKIVSKGFEGMNLVKRHRLVYHLLREELDTGLHALSIVSKTPSESPSKD

SEQ ID NO: 1957 - DNA, 1601 bp, Arabidopsis thaliana
  misc_feature (1)..(1601): Ceres Seq. ID no. 13592957
actttaagctcttcttcactcacactctctcaaaaatcaccaaacgaaactcttcactctctccaacaatggccaagaagatgagttctctcatcatcatcttcaacattctccttctcctcacaactcaaacccacgcgcacaacgtcacgcgcctcctagcaaaccacccatcattctcttccttcagccatttcctaacacaaacacacctcgccgacgaaatcaaccggagaagaaccataaccgtttgcgcagtagataacgccgccatgtcagcattaacctctaaaggctatacactctcaactctcaaaaacattctctccctccacgtccttttagattacttcggaaccaaaaaactccaccagatccgtgacggctctgctctcgccgctactctgtttcaagccaccggagctgctcctggaacctcaggattcgttaacataacggatctgagaggtggtaaagttgggtttggtcctgacggtggagatctgtcttctttctttgttaaatctattgaagaagttccgtataacatctccattattcagatcagtagagttttaccgtcggagactgcggcggctccgactcctgctccggcggagatgaatcttaccggaataatgtcggctcatggatgcaaagtgtttgctgagactcttctcactaaccctggagcttcaaaaacctatcaggagagtttagaaggaggcatgacagtgttctgtccaggagatgatgcaatgaaaggtttcttgcccaaatacaagaacttgacagctccaaagaaagaagcatttctcgatttcctcgctgtcccgacatattactcaatggcgatgctcaaatccaacaatggtccgatgaacacacttgcgacagatggagctaacaagtttgagcttactgtacagaacgatggagagaaggttaccctcaagacaaggatcaacactgtcaagatcgttgatactcttattgatgagcagcctttagctatatatgcgactgataaggttttgttgcctaaagagttgtttaaggcttcggctgttgaagctccggctcctgctccggcaccagaggatggtgatgttgcggattctccaaaagcggctaaagggaaagcgaaaggaaagaagaagaaggctgcaccgtcgccagataatgatccttttggtgactcggattcgcctgccgaagggcctgacggagaggccgatgatgcgacggcagatgatgcttgtgcggttaggatcatcggaggagctaaggctggtttggtggtgagcttgctctgcttgtttgcttcttcttggcttctatagtttcacttcttgtttcttcgattcttccatgttttttttttttttgtgaatcttttatttatggtttttgggggagagtaaatgaggattatttatttccctctattgttgagtttttttatttatttaaaagttggttgtcgaattaaatagtcggtagtttatatatttgtgtgttcttgtttcacgtgtttgtttagttgatgatgtaaacaagtcctgattttggtgatcttgtcatatttttcttgtttttgt

SEQ ID NO: 1958 - protein, 446 aa, Arabidopsis thaliana
  peptide (1)..(446): Ceres Seq. ID no. 13592958
  misc_feature (205)..(347): Pfam Name: Pfam Description:  Fasciclin domain
  misc_feature (23)..(446): NCBI GI NO: 15240570 NR Description: fasciclin-like arabinogalactan-protein (FLA1)
  misc_feature (28)..(404): NCBI GI NO: 21593810 NR Description: putative pollen surface protein
  misc_feature (23)..(404): NCBI GI NO: 15235459 NR Description: fasciclin-like arabinogalactan-protein (FLA2)
  misc_feature (28)..(404): NCBI GI NO: 13377778 NR Description: fasciclin-like arabinogalactan-protein 2
  misc_feature (254)..(446): NCBI GI NO: 21618321 NR Description: unknown [Arabidopsis thaliana]
  misc_feature (31)..(421): NCBI GI NO: 38424037 NR Description: putative fasciclin-like arabinogalactan-protein
  misc_feature (24)..(422): NCBI GI NO: 18406799 NR Description: fasciclin-like arabinogalactan-protein (FLA8)
  misc_feature (24)..(422): NCBI GI NO: 21595125 NR Description: endosperm-specific protein-like protein
  misc_feature (23)..(414): NCBI GI NO: 14190409 NR Description: AT3g60900/T4C21_310 [Arabidopsis thaliana]
  misc_feature (23)..(414): NCBI GI NO: 15232973 NR Description: fasciclin-like arabinogalactan-protein (FLA10)
FKLFFTHTLSKITKRNSSLSPTMAKKMSSLIIIFNILLLLTTQTHAHNVTRLLANHPSFSSFSHFLTQTHLADEINRRRTITVCAVDNAAMSALTSKGYTLSTLKNILSLHVLLDYFGTKKLHQIRDGSALAATLFQATGAAPGTSGFVNITDLRGGKVGFGPDGGDLSSFFVKSIEEVPYNISIIQISRVLPSETAAAPTPAPAEMNLTGIMSAHGCKVFAETLLTNPGASKTYQESLEGGMTVFCPGDDAMKGFLPKYKNLTAPKKEAFLDFLAVPTYYSMAMLKSNNGPMNTLATDGANKFELTVQNDGEKVTLKTRINTVKIVDTLIDEQPLAIYATDKVLLPKELFKASAVEAPAPAPAPEDGDVADSPKAAKGKAKGKKKKAAPSPDNDPFGDSDSPAEGPDGEADDATADDACAVRIIGGAKAGLVVSLLCLFASSWLL

SEQ ID NO: 1959 - protein, 424 aa, Arabidopsis thaliana
  peptide (1)..(424): Ceres Seq. ID no. 13592959
  misc_feature (183)..(325): Pfam Name: Pfam Description:  Fasciclin domain
  misc_feature (1)..(424): NCBI GI NO: 15240570 NR Description: fasciclin-like arabinogalactan-protein (FLA1)
  misc_feature (6)..(382): NCBI GI NO: 21593810 NR Description: putative pollen surface protein
  misc_feature (1)..(382): NCBI GI NO: 15235459 NR Description: fasciclin-like arabinogalactan-protein (FLA2)
  misc_feature (6)..(382): NCBI GI NO: 13377778 NR Description: fasciclin-like arabinogalactan-protein 2
  misc_feature (232)..(424): NCBI GI NO: 21618321 NR Description: unknown [Arabidopsis thaliana]
  misc_feature (9)..(399): NCBI GI NO: 38424037 NR Description: putative fasciclin-like arabinogalactan-protein
  misc_feature (2)..(400): NCBI GI NO: 18406799 NR Description: fasciclin-like arabinogalactan-protein (FLA8)
  misc_feature (2)..(400): NCBI GI NO: 21595125 NR Description: endosperm-specific protein-like protein
  misc_feature (1)..(392): NCBI GI NO: 14190409 NR Description: AT3g60900/T4C21_310 [Arabidopsis thaliana]
  misc_feature (1)..(392): NCBI GI NO: 15232973 NR Description: fasciclin-like arabinogalactan-protein (FLA10)
MAKKMSSLIIIFNILLLLTTQTHAHNVTRLLANHPSFSSFSHFLTQTHLADEINRRRTITVCAVDNAAMSALTSKGYTLSTLKNILSLHVLLDYFGTKKLHQIRDGSALAATLFQATGAAPGTSGFVNITDLRGGKVGFGPDGGDLSSFFVKSIEEVPYNISIIQISRVLPSETAAAPTPAPAEMNLTGIMSAHGCKVFAETLLTNPGASKTYQESLEGGMTVFCPGDDAMKGFLPKYKNLTAPKKEAFLDFLAVPTYYSMAMLKSNNGPMNTLATDGANKFELTVQNDGEKVTLKTRINTVKIVDTLIDEQPLAIYATDKVLLPKELFKASAVEAPAPAPAPEDGDVADSPKAAKGKAKGKKKKAAPSPDNDPFGDSDSPAEGPDGEADDATADDACAVRIIGGAKAGLVVSLLCLFASSWLL

SEQ ID NO: 1960 - protein, 420 aa, Arabidopsis thaliana
  peptide (1)..(420): Ceres Seq. ID no. 13592960
  misc_feature (179)..(321): Pfam Name: Pfam Description:  Fasciclin domain
  misc_feature (1)..(420): NCBI GI NO: 15240570 NR Description: fasciclin-like arabinogalactan-protein (FLA1)
  misc_feature (2)..(378): NCBI GI NO: 21593810 NR Description: putative pollen surface protein
  misc_feature (1)..(378): NCBI GI NO: 15235459 NR Description: fasciclin-like arabinogalactan-protein (FLA2)
  misc_feature (2)..(378): NCBI GI NO: 13377778 NR Description: fasciclin-like arabinogalactan-protein 2
  misc_feature (228)..(420): NCBI GI NO: 21618321 NR Description: unknown [Arabidopsis thaliana]
  misc_feature (5)..(395): NCBI GI NO: 38424037 NR Description: putative fasciclin-like arabinogalactan-protein
  misc_feature (1)..(396): NCBI GI NO: 18406799 NR Description: fasciclin-like arabinogalactan-protein (FLA8)
  misc_feature (1)..(396): NCBI GI NO: 21595125 NR Description: endosperm-specific protein-like protein
  misc_feature (1)..(388): NCBI GI NO: 14190409 NR Description: AT3g60900/T4C21_310 [Arabidopsis thaliana]
  misc_feature (1)..(388): NCBI GI NO: 15232973 NR Description: fasciclin-like arabinogalactan-protein (FLA10)
MSSLIIIFNILLLLTTQTHAHNVTRLLANHPSFSSFSHFLTQTHLADEINRRRTITVCAVDNAAMSALTSKGYTLSTLKNILSLHVLLDYFGTKKLHQIRDGSALAATLFQATGAAPGTSGFVNITDLRGGKVGFGPDGGDLSSFFVKSIEEVPYNISIIQISRVLPSETAAAPTPAPAEMNLTGIMSAHGCKVFAETLLTNPGASKTYQESLEGGMTVFCPGDDAMKGFLPKYKNLTAPKKEAFLDFLAVPTYYSMAMLKSNNGPMNTLATDGANKFELTVQNDGEKVTLKTRINTVKIVDTLIDEQPLAIYATDKVLLPKELFKASAVEAPAPAPAPEDGDVADSPKAAKGKAKGKKKKAAPSPDNDPFGDSDSPAEGPDGEADDATADDACAVRIIGGAKAGLVVSLLCLFASSWLL

SEQ ID NO: 1961 - DNA, 1668 bp, Arabidopsis thaliana
  misc_feature (1)..(1668): Ceres Seq. ID no. 12558667
atctattttctctctctattttatctatcttgtcctctcctctgtttataatcagcaagatttctttttgtttattagaagatttttggaaaattaatatataaagagaggagaaattaagcgtaagagtggtggcgggggaaaataaaagcatggaagaaggacttcttcggcatgaaaacgacagagatgatcgtcgtatcacagcttgtgttatcctcagcacttttgttgctgtttgtagttccttcagctatggatgtgctaatggttatacttccggcgctgaaactgcaatcatgaaagagttagacctttctatggcacaattttcagcgtttggttcctttttgaacttgggaggtgcggtgggagctttgtttagcggtcaattagcagtcatccttggcagaagacgaacgttgtgggcatgcgatttgttctgcatttttggttggctctccattgcttttgcaaagaatgtcttgtggctggacttgggaagaatttctttaggcatcggagtgggcttgactagctacgtggtccctgtctatattgcggaaatcactcctaaacatgttcgtggcgcattttctgcttcaaccctgcttcttcaaaacagtggaatttctctgatttattttttcggaactgtaattaattggcgggttctggctgttataggtgctcttccatgtttcattccagtgatcggtatatatttcataccggaatcaccaagatggttggctaaaatcggttcagttaaagaagtagaaaactctctgcatcgccttagagggaaagatgctgatgtttcagatgaagccgctgaaattcaggttatgacaaaaatgcttgaagaagattcaaagtccagtttttgtgacatgtttcagaagaagtatagacgaactctagtggttggaattggtttaatgttgatacaacaattatctggagctagcggtatcacatattattcaaatgccatatttagaaaagctggcttttcagagagacttggatcaatgatatttggtgtgttcgtgatcccaaaagctttggttggtctgattcttgtggatagatggggaagacgaccactcctattggcttctgctgttggaatgtctatcggatccttgcttattggggttagcttcacgttacaggaaatgaatctgtttcctgaatttattccagttttcgtcttcataaatattctggtctactttggattttttgcaatcggtataggagggctaccttggatcattatgtctgagatatttccgataaatataaaagtttcagcagggtcaatcgttgcattaacatcgtggaccactgggtggttcgttagttatggtttcaactttatgtttgaatggagcgcacaaggaaccttttacatatttgcgatggtggggggattgtcattgctttttatatggatgctcgtgccggaaaccaaaggacagtcgcttgaagaattgcaagcatcccttacggggacaacctaaatacacatttacatctattggcagtgtctttgcaaacattatttacataataaagtacacaacctgctcttcatagtgattgatgtgtaaaccttttccttgcgaacattgtcgtatatatcctagctatattttttcc

SEQ ID NO: 1962 - protein, 458 aa, Arabidopsis thaliana
  peptide (1)..(458): Ceres Seq. ID no. 12558668
  misc_feature (23)..(403): Pfam Name: and other Pfam Description: Sugar
  misc_feature (1)..(458): NCBI GI NO: 18397139 NR Description: putative sugar transporter; protein id: At3g05160
  misc_feature (1)..(403): NCBI GI NO: 6729026 NR Description: putative sugar transporter [Arabidopsis thaliana]
  misc_feature (1)..(458): NCBI GI NO: 18397141 NR Description: Expressed protein; protein id: At3g05165.1
  misc_feature (1)..(424): NCBI GI NO: 20260272 NR Description: putative sugar transporter [Arabidopsis thaliana]
  misc_feature (1)..(454): NCBI GI NO: 18421108 NR Description: sugar transporter-like protein
  misc_feature (1)..(454): NCBI GI NO: 14585699 NR Description: sugar-porter family protein 1
  misc_feature (1)..(454): NCBI GI NO: 18421106 NR Description: sugar transporter-like protein
  misc_feature (1)..(455): NCBI GI NO: 18390957 NR Description: putative sugar transport protein, ERD6
  misc_feature (175)..(458): NCBI GI NO: 15081630 NR Description: AT3g05160/T12H1_13 [Arabidopsis thaliana]
  misc_feature (1)..(455): NCBI GI NO: 6686827 NR Description: putative sugar transporter [Arabidopsis thaliana]
MEEGLLRHENDRDDRRITACVILSTFVAVCSSFSYGCANGYTSGAETAIMKELDLSMAQFSAFGSFLNLGGAVGALFSGQLAVILGRRRTLWACDLFCIFGWLSIAFAKNVLWLDLGRISLGIGVGLTSYVVPVYIAEITPKHVRGAFSASTLLLQNSGISLIYFFGTVINWRVLAVIGALPCFIPVIGIYFIPESPRWLAKIGSVKEVENSLHRLRGKDADVSDEAAEIQVMTKMLEEDSKSSFCDMFQKKYRRTLVVGIGLMLIQQLSGASGITYYSNAIFRKAGFSERLGSMIFGVFVIPKALVGLILVDRWGRRPLLLASAVGMSIGSLLIGVSFTLQEMNLFPEFIPVFVFINILVYFGFFAIGIGGLPWIIMSEIFPINIKVSAGSIVALTSWTTGWFVSYGFNFMFEWSAQGTFYIFAMVGGLSLLFIWMLVPETKGQSLEELQASLTGTT

SEQ ID NO: 1963 - protein, 409 aa, Arabidopsis thaliana
  peptide (1)..(409): Ceres Seq. ID no. 12558669
  misc_feature (1)..(354): Pfam Name: and other Pfam Description: Sugar
  misc_feature (1)..(409): NCBI GI NO: 18397139 NR Description: putative sugar transporter; protein id: At3g05160
  misc_feature (1)..(354): NCBI GI NO: 6729026 NR Description: putative sugar transporter [Arabidopsis thaliana]
  misc_feature (1)..(409): NCBI GI NO: 18397141 NR Description: Expressed protein; protein id: At3g05165.1
  misc_feature (1)..(375): NCBI GI NO: 20260272 NR Description: putative sugar transporter [Arabidopsis thaliana]
  misc_feature (1)..(405): NCBI GI NO: 18421108 NR Description: sugar transporter-like protein
  misc_feature (1)..(405): NCBI GI NO: 14585699 NR Description: sugar-porter family protein 1
  misc_feature (1)..(405): NCBI GI NO: 18421106 NR Description: sugar transporter-like protein
  misc_feature (1)..(406): NCBI GI NO: 18390957 NR Description: putative sugar transport protein, ERD6
  misc_feature (126)..(409): NCBI GI NO: 15081630 NR Description: AT3g05160/T12H1_13 [Arabidopsis thaliana]
  misc_feature (1)..(406): NCBI GI NO: 6686827 NR Description: putative sugar transporter [Arabidopsis thaliana]
MKELDLSMAQFSAFGSFLNLGGAVGALFSGQLAVILGRRRTLWACDLFCIFGWLSIAFAKNVLWLDLGRISLGIGVGLTSYVVPVYIAEITPKHVRGAFSASTLLLQNSGISLIYFFGTVINWRVLAVIGALPCFIPVIGIYFIPESPRWLAKIGSVKEVENSLHRLRGKDADVSDEAAEIQVMTKMLEEDSKSSFCDMFQKKYRRTLVVGIGLMLIQQLSGASGITYYSNAIFRKAGFSERLGSMIFGVFVIPKALVGLILVDRWGRRPLLLASAVGMSIGSLLIGVSFTLQEMNLFPEFIPVFVFINILVYFGFFAIGIGGLPWIIMSEIFPINIKVSAGSIVALTSWTTGWFVSYGFNFMFEWSAQGTFYIFAMVGGLSLLFIWMLVPETKGQSLEELQASLTGTT

SEQ ID NO: 1964 - protein, 402 aa, Arabidopsis thaliana
  peptide (1)..(402): Ceres Seq. ID no. 12558670
  misc_feature (1)..(347): Pfam Name: and other Pfam Description: Sugar
  misc_feature (1)..(402): NCBI GI NO: 18397139 NR Description: putative sugar transporter; protein id: At3g05160
  misc_feature (1)..(347): NCBI GI NO: 6729026 NR Description: putative sugar transporter [Arabidopsis thaliana]
  misc_feature (1)..(402): NCBI GI NO: 18397141 NR Description: Expressed protein; protein id: At3g05165.1
  misc_feature (1)..(368): NCBI GI NO: 20260272 NR Description: putative sugar transporter [Arabidopsis thaliana]
  misc_feature (1)..(398): NCBI GI NO: 18421108 NR Description: sugar transporter-like protein
  misc_feature (1)..(398): NCBI GI NO: 14585699 NR Description: sugar-porter family protein 1
  misc_feature (1)..(398): NCBI GI NO: 18421106 NR Description: sugar transporter-like protein
  misc_feature (1)..(399): NCBI GI NO: 18390957 NR Description: putative sugar transport protein, ERD6
  misc_feature (119)..(402): NCBI GI NO: 15081630 NR Description: AT3g05160/T12H1_13 [Arabidopsis thaliana]
  misc_feature (1)..(399): NCBI GI NO: 6686827 NR Description: putative sugar transporter [Arabidopsis thaliana]
MAQFSAFGSFLNLGGAVGALFSGQLAVILGRRRTLWACDLFCIFGWLSIAFAKNVLWLDLGRISLGIGVGLTSYVVPVYIAEITPKHVRGAFSASTLLLQNSGISLIYFFGTVINWRVLAVIGALPCFIPVIGIYFIPESPRWLAKIGSVKEVENSLHRLRGKDADVSDEAAEIQVMTKMLEEDSKSSFCDMFQKKYRRTLVVGIGLMLIQQLSGASGITYYSNAIFRKAGFSERLGSMIFGVFVIPKALVGLILVDRWGRRPLLLASAVGMSIGSLLIGVSFTLQEMNLFPEFIPVFVFINILVYFGFFAIGIGGLPWIIMSEIFPINIKVSAGSIVALTSWTTGWFVSYGFNFMFEWSAQGTFYIFAMVGGLSLLFIWMLVPETKGQSLEELQASLTGTT

SEQ ID NO: 1965 - DNA, 1003 bp, Arabidopsis thaliana
  misc_feature (1)..(1003): Ceres Seq. ID no. 13576663
attttttatcaatcgtgctccgtaatcattacctttcttcttcatcttcatcttcacgcagcgacttctttgattctctctttttattctcagctccaatttcaacctgcatttctctcttctcaattttgggtttctttttttgatatctcatttgatcagatcgacgaagagaggaagaaggtttgagctgagagatctttggaggtagaaagaagatctcaaaaacgatgtcgtttacaggaactcagcagaaatgcagggcgtgcgagaagacagtgtaccctgtggagcttctctcagctgatggaatctcttatcacaaggcttgcttcaaatgctctcactgcaaaagcagacttcaactgagcaattattcatcaatggaaggagtggtgtattgtaggcctcattttgagcagcttttcaaggagtctggtagtttcagcaagaactttcagtcacctgcaaagccattgactgataagccaaccccggagctgaataggacacctagtcgacttgctggtatgttctctggaacgcaagacaaatgcgctacttgcactaaaaccgtgtatcctatcgaaaaggtaactgtggaaagccagtgttaccataaatcttgcttcaagtgttctcatggaggctgtccgatatctccatcgaactatgcagctctagagggaatattgtactgcaagcaccatttcgctcagcttttcaaggagaaaggaagttacaatcatctcatcaaatctgcttccatcaaacgcgctactgctgctgctaccgcagctgctgcagctgtagcagccgttcccgaatcttgaattcaaattctctttatttttgtgtatgtgctgtgttgtttacatgtattcgatatgattcatgttctttgtcttccataattgaaccaggcataaaattctcccagttttctctgagtttcttgtttgtgatactactacatctataataaccgaggacttttggcttt

SEQ ID NO: 1966 - protein, 200 aa, Arabidopsis thaliana
  peptide (1)..(200): Ceres Seq. ID no. 13576664
  misc_feature (109)..(166): Pfam Name: Pfam Description:  LIM domain
  misc_feature (1)..(200): NCBI GI NO: 15225592 NR Description: LIM-domain protein -related [Arabidopsis thaliana]
  misc_feature (1)..(200): NCBI GI NO: 15228188 NR Description: transcription factor L2 [Arabidopsis thaliana]
  misc_feature (1)..(185): NCBI GI NO: 7489184 NR Description: probable transcription factor SF3 - common tobacco
  misc_feature (3)..(193): NCBI GI NO: 34902012 NR Description: putative LIM-domain protein
  misc_feature (1)..(168): NCBI GI NO: 11282608 NR Description: transcription factor L2
  misc_feature (1)..(190): NCBI GI NO: 17227092 NR Description: LIM domain protein [Gossypium hirsutum]
  misc_feature (1)..(188): NCBI GI NO: 8515104 NR Description: LIM domain protein PLIM-2 [Nicotiana tabacum]
  misc_feature (1)..(191): NCBI GI NO: 15225897 NR Description: LIM-domain protein -related [Arabidopsis thaliana]
  misc_feature (52)..(200): NCBI GI NO: 13926203 NR Description: transcription factor L2 [Arabidopsis thaliana]
  misc_feature (1)..(188): NCBI GI NO: 25354704 NR Description: T1N6.19 protein - Arabidopsis thaliana
MSFTGTQQKCRACEKTVYPVELLSADGISYHKACFKCSHCKSRLQLSNYSSMEGVVYCRPHFEQLFKESGSFSKNFQSPAKPLTDKPTPELNRTPSRLAGMFSGTQDKCATCTKTVYPIEKVTVESQCYHKSCFKCSHGGCPISPSNYAALEGILYCKHHFAQLFKEKGSYNHLIKSASIKRATAAATAAAAAVAAVPES

SEQ ID NO: 1967 - protein, 149 aa, Arabidopsis thaliana
  peptide (1)..(149): Ceres Seq. ID no. 13576665
  misc_feature (58)..(115): Pfam Name: Pfam Description:  LIM domain
  misc_feature (1)..(149): NCBI GI NO: 15225592 NR Description: LIM-domain protein -related [Arabidopsis thaliana]
  misc_feature (1)..(149): NCBI GI NO: 15228188 NR Description: transcription factor L2 [Arabidopsis thaliana]
  misc_feature (1)..(134): NCBI GI NO: 7489184 NR Description: probable transcription factor SF3 - common tobacco
  misc_feature (1)..(142): NCBI GI NO: 34902012 NR Description: putative LIM-domain protein
  misc_feature (1)..(117): NCBI GI NO: 11282608 NR Description: transcription factor L2
  misc_feature (1)..(139): NCBI GI NO: 17227092 NR Description: LIM domain protein [Gossypium hirsutum]
  misc_feature (1)..(137): NCBI GI NO: 8515104 NR Description: LIM domain protein PLIM-2 [Nicotiana tabacum]
  misc_feature (1)..(140): NCBI GI NO: 15225897 NR Description: LIM-domain protein -related [Arabidopsis thaliana]
  misc_feature (1)..(149): NCBI GI NO: 13926203 NR Description: transcription factor L2 [Arabidopsis thaliana]
  misc_feature (1)..(137): NCBI GI NO: 25354704 NR Description: T1N6.19 protein - Arabidopsis thaliana
MEGVVYCRPHFEQLFKESGSFSKNFQSPAKPLTDKPTPELNRTPSRLAGMFSGTQDKCATCTKTVYPIEKVTVESQCYHKSCFKCSHGGCPISPSNYAALEGILYCKHHFAQLFKEKGSYNHLIKSASIKRATAAATAAAAAVAAVPES

SEQ ID NO: 1968 - protein, 100 aa, Arabidopsis thaliana
  peptide (1)..(100): Ceres Seq. ID no. 13576666
  misc_feature (9)..(66): Pfam Name: Pfam Description:  LIM domain
  misc_feature (1)..(100): NCBI GI NO: 15225592 NR Description: LIM-domain protein -related [Arabidopsis thaliana]
  misc_feature (1)..(100): NCBI GI NO: 15228188 NR Description: transcription factor L2 [Arabidopsis thaliana]
  misc_feature (1)..(85): NCBI GI NO: 7489184 NR Description: probable transcription factor SF3 - common tobacco
  misc_feature (1)..(93): NCBI GI NO: 34902012 NR Description: putative LIM-domain protein
  misc_feature (1)..(68): NCBI GI NO: 11282608 NR Description: transcription factor L2
  misc_feature (1)..(90): NCBI GI NO: 17227092 NR Description: LIM domain protein [Gossypium hirsutum]
  misc_feature (1)..(88): NCBI GI NO: 8515104 NR Description: LIM domain protein PLIM-2 [Nicotiana tabacum]
  misc_feature (1)..(91): NCBI GI NO: 15225897 NR Description: LIM-domain protein -related [Arabidopsis thaliana]
  misc_feature (1)..(100): NCBI GI NO: 13926203 NR Description: transcription factor L2 [Arabidopsis thaliana]
  misc_feature (1)..(88): NCBI GI NO: 25354704 NR Description: T1N6.19 protein - Arabidopsis thaliana
MFSGTQDKCATCTKTVYPIEKVTVESQCYHKSCFKCSHGGCPISPSNYAALEGILYCKHHFAQLFKEKGSYNHLIKSASIKRATAAATAAAAAVAAVPES

SEQ ID NO: 1969 - DNA, 957 bp, Arabidopsis thaliana
  misc_feature (1)..(957): Ceres Seq. ID no. 13580523
aattttgaaaattggttaactctgaatcaagctttttgtctaagatacctcaaagcataacatatacaagcttatatcgtcattttctctttctttcatcaggtaattattgtttggactaaattttcaagagaaatgagtgtatttcgaagatttgttggctggatcaaccagaacctacaacaacagcctcttaaggatgagtccaagagatctgagaatgttgactctaattcagcgacagagaatgatactaataaacgggcattttattatgacaaagctgaggctaagaagcaaggaaaactttggagagctgcagagaagaagaaaccatggtatgatgctcctcctaaggtcaaggtgacaacaaaaaagggtctttgccacatgcacatagagttgacagtaggattgcctccggaaggggtctatgatttgttcgctaatccgaacgactttccattcttcaggatcgacaacgagactgggcgcgaacttttggaaaacaaatcaagaaaggttttgatgaaagatggaccgaggcagagcgcgcggttggagaaagctctgacctgggacgttctttggtggtgtggagcttttccatttactctaattgttgatgaaaaccaaaaaaactttagaggaagatatatgaaagagaaaatgaagtttatgaaatattttgagggtaaatggaaaatagagccactatacgtagattcagaacgcttgtgcaaggacagaaagccgaagagtcgagaagaatacaaaagatgtagcggcggagaaggaaaggttgcatcgaaagtgacaatggaccaatacttccaaccttattttcttcttaatctaccaccactttcttggtacattcgtgggatcaccatcaaaaccaccaaaaatctgctcatattgattcaaaatgcaagtatcatgttccgagacgcttga

SEQ ID NO: 1970 - protein, 273 aa, Arabidopsis thaliana
  peptide (1)..(273): Ceres Seq. ID no. 13580524
  misc_feature (153)..(254): Pfam Name: Pfam Description:  Domain of unknown function DUF220
  misc_feature (1)..(273): NCBI GI NO: 15220845 NR Description: OBP32pep protein -related [Arabidopsis thaliana]
  misc_feature (1)..(272): NCBI GI NO: 15220802 NR Description: OBP32pep protein -related [Arabidopsis thaliana]
  misc_feature (126)..(272): NCBI GI NO: 8778583 NR Description: F28C11.19 [Arabidopsis thaliana]
  misc_feature (1)..(123): NCBI GI NO: 8778583 NR Description: F28C11.19 [Arabidopsis thaliana]
  misc_feature (1)..(258): NCBI GI NO: 8778583 NR Description: F28C11.19 [Arabidopsis thaliana]
  misc_feature (1)..(236): NCBI GI NO: 25373392 NR Description: 32
  misc_feature (1)..(272): NCBI GI NO: 15220799 NR Description: OBP32pep protein -related [Arabidopsis thaliana]
  misc_feature (1)..(272): NCBI GI NO: 8778583 NR Description: F28C11.19 [Arabidopsis thaliana]
  misc_feature (1)..(113): NCBI GI NO: 8778583 NR Description: F28C11.19 [Arabidopsis thaliana]
  misc_feature (1)..(271): NCBI GI NO: 15220821 NR Description: hypothetical protein [Arabidopsis thaliana]
MSVFRRFVGWINQNLQQQPLKDESKRSENVDSNSATENDTNKRAFYYDKAEAKKQGKLWRAAEKKKPWYDAPPKVKVTTKKGLCHMHIELTVGLPPEGVYDLFANPNDFPFFRIDNETGRELLENKSRKVLMKDGPRQSARLEKALTWDVLWWCGAFPFTLIVDENQKNFRGRYMKEKMKFMKYFEGKWKIEPLYVDSERLCKDRKPKSREEYKRCSGGEGKVASKVTMDQYFQPYFLLNLPPLSWYIRGITIKTTKNLLILIQNASIMFRDA

SEQ ID NO: 1971 - protein, 188 aa, Arabidopsis thaliana
  peptide (1)..(188): Ceres Seq. ID no. 13580525
  misc_feature (68)..(169): Pfam Name: Pfam Description:  Domain of unknown function DUF220
  misc_feature (1)..(188): NCBI GI NO: 15220845 NR Description: OBP32pep protein -related [Arabidopsis thaliana]
  misc_feature (1)..(187): NCBI GI NO: 15220802 NR Description: OBP32pep protein -related [Arabidopsis thaliana]
  misc_feature (41)..(187): NCBI GI NO: 8778583 NR Description: F28C11.19 [Arabidopsis thaliana]
  misc_feature (1)..(38): NCBI GI NO: 8778583 NR Description: F28C11.19 [Arabidopsis thaliana]
  misc_feature (1)..(173): NCBI GI NO: 8778583 NR Description: F28C11.19 [Arabidopsis thaliana]
  misc_feature (1)..(151): NCBI GI NO: 25373392 NR Description: 32
  misc_feature (1)..(187): NCBI GI NO: 15220799 NR Description: OBP32pep protein -related [Arabidopsis thaliana]
  misc_feature (1)..(187): NCBI GI NO: 8778583 NR Description: F28C11.19 [Arabidopsis thaliana]
  misc_feature (1)..(28): NCBI GI NO: 8778583 NR Description: F28C11.19 [Arabidopsis thaliana]
  misc_feature (1)..(186): NCBI GI NO: 15220821 NR Description: hypothetical protein [Arabidopsis thaliana]
MHIELTVGLPPEGVYDLFANPNDFPFFRIDNETGRELLENKSRKVLMKDGPRQSARLEKALTWDVLWWCGAFPFTLIVDENQKNFRGRYMKEKMKFMKYFEGKWKIEPLYVDSERLCKDRKPKSREEYKRCSGGEGKVASKVTMDQYFQPYFLLNLPPLSWYIRGITIKTTKNLLILIQNASIMFRDA

SEQ ID NO: 1972 - protein, 142 aa, Arabidopsis thaliana
  peptide (1)..(142): Ceres Seq. ID no. 13580526
  misc_feature (22)..(123): Pfam Name: Pfam Description:  Domain of unknown function DUF220
  misc_feature (1)..(142): NCBI GI NO: 15220845 NR Description: OBP32pep protein -related [Arabidopsis thaliana]
  misc_feature (1)..(141): NCBI GI NO: 15220802 NR Description: OBP32pep protein -related [Arabidopsis thaliana]
  misc_feature (1)..(141): NCBI GI NO: 8778583 NR Description: F28C11.19 [Arabidopsis thaliana]
  misc_feature (1)..(127): NCBI GI NO: 8778583 NR Description: F28C11.19 [Arabidopsis thaliana]
  misc_feature (1)..(105): NCBI GI NO: 25373392 NR Description: 32
  misc_feature (1)..(141): NCBI GI NO: 15220799 NR Description: OBP32pep protein -related [Arabidopsis thaliana]
  misc_feature (1)..(141): NCBI GI NO: 8778583 NR Description: F28C11.19 [Arabidopsis thaliana]
  misc_feature (1)..(140): NCBI GI NO: 15220821 NR Description: hypothetical protein [Arabidopsis thaliana]
  misc_feature (1)..(141): NCBI GI NO: 15220815 NR Description: OBP32pep protein -related [Arabidopsis thaliana]
  misc_feature (1)..(140): NCBI GI NO: 25373398 NR Description: hypothetical protein F5O8
MKDGPRQSARLEKALTWDVLWWCGAFPFTLIVDENQKNFRGRYMKEKMKFMKYFEGKWKIEPLYVDSERLCKDRKPKSREEYKRCSGGEGKVASKVTMDQYFQPYFLLNLPPLSWYIRGITIKTTKNLLILIQNASIMFRDA

SEQ ID NO: 1973 - DNA, 794 bp, Arabidopsis thaliana
  misc_feature (1)..(794): Ceres Seq. ID no. 12329461
aatcgaaaaatacttctttggtaggctcttaagaatcttaggtgtatctctttagtttgaaggttagattcagaatctctgtagattcattagtagctttttctgtgtgatctttgtgttgtatatatatagatcgaattgattttagctggtgaaaggtgaagttgtggtatgaatatgaagaaacagattatggatgagtctgtaaagtcattgatgctgcctcctcctccaccgcttcttcctccatctcagggatatggatcaagaaagatcgatggagacagcataaccaataaacagatcaagaagttctggagacagaagcagatcattgaagaggatcatctctattctgctattaaggctgcagctcgtgtcagagctcgtaatctctctgatgaggattataaacggtttgaagaaagcttggacatggaggacctggaaaccgaagatcatcagggattgaaagactggtggacaaagagcaaatacgcgtacttgaaccagcctgctcttggatctgcagattcactgaagagaaagaggttttcgacttatacaccaaactgtttctcgttcaagccttgcaatcctctctacgcaacttcgctcaatgtcttttgaaccatgagcagcaaactctgcaagatcaatcgtcttgcatatatgtatatatttgttcgtgtgtgtctctgtacatgtcatgtgttattgcttctatattaatggatgtggattttggtgtggttgttgatttgtaactgttgaataaaatctttctatggaac

SEQ ID NO: 1974 - protein, 152 aa, Arabidopsis thaliana
  peptide (1)..(152): Ceres Seq. ID no. 12329462
  misc_feature (1)..(152): NCBI GI NO: 18398508 NR Description: expressed protein; protein id: At2g17710
  misc_feature (3)..(152): NCBI GI NO: 21618216 NR Description: unknown [Arabidopsis thaliana]
  misc_feature (8)..(152): NCBI GI NO: 25371275 NR Description: hypothetical protein At2g17710
  misc_feature (39)..(93): NCBI GI NO: 38345846 NR Description: OSJNBa0084K11.10
  misc_feature (94)..(138): NCBI GI NO: 38345846 NR Description: OSJNBa0084K11.10
MNMKKQIMDESVKSLMLPPPPPLLPPSQGYGSRKIDGDSITNKQIKKFWRQKQIIEEDHLYSAIKAAARVRARNLSDEDYKRFEESLDMEDLETEDHQGLKDWWTKSKYAYLNQPALGSADSLKRKRFSTYTPNCFSFKPCNPLYATSLNVF

SEQ ID NO: 1975 - protein, 150 aa, Arabidopsis thaliana
  peptide (1)..(150): Ceres Seq. ID no. 12329463
  misc_feature (1)..(150): NCBI GI NO: 18398508 NR Description: expressed protein; protein id: At2g17710
  misc_feature (1)..(150): NCBI GI NO: 21618216 NR Description: unknown [Arabidopsis thaliana]
  misc_feature (6)..(150): NCBI GI NO: 25371275 NR Description: hypothetical protein At2g17710
  misc_feature (37)..(91): NCBI GI NO: 38345846 NR Description: OSJNBa0084K11.10
  misc_feature (92)..(136): NCBI GI NO: 38345846 NR Description: OSJNBa0084K11.10
MKKQIMDESVKSLMLPPPPPLLPPSQGYGSRKIDGDSITNKQIKKFWRQKQIIEEDHLYSAIKAAARVRARNLSDEDYKRFEESLDMEDLETEDHQGLKDWWTKSKYAYLNQPALGSADSLKRKRFSTYTPNCFSFKPCNPLYATSLNVF

SEQ ID NO: 1976 - protein, 145 aa, Arabidopsis thaliana
  peptide (1)..(145): Ceres Seq. ID no. 12329464
  misc_feature (1)..(145): NCBI GI NO: 18398508 NR Description: expressed protein; protein id: At2g17710
  misc_feature (1)..(145): NCBI GI NO: 21618216 NR Description: unknown [Arabidopsis thaliana]
  misc_feature (1)..(145): NCBI GI NO: 25371275 NR Description: hypothetical protein At2g17710
  misc_feature (32)..(86): NCBI GI NO: 38345846 NR Description: OSJNBa0084K11.10
  misc_feature (87)..(131): NCBI GI NO: 38345846 NR Description: OSJNBa0084K11.10
MDESVKSLMLPPPPPLLPPSQGYGSRKIDGDSITNKQIKKFWRQKQIIEEDHLYSAIKAAARVRARNLSDEDYKRFEESLDMEDLETEDHQGLKDWWTKSKYAYLNQPALGSADSLKRKRFSTYTPNCFSFKPCNPLYATSLNVF

SEQ ID NO: 1977 - DNA, 5147 bp, Arabidopsis thaliana
  misc_feature (1)..(5147): Ceres Seq. ID no. 13489117
atggcaacttcttctcgttcggagcgatttccgataacgccgagtacggcggctactaatagattgacgattacgcctaattctagggttttgaaaagccctctcactgaagaaatcatgtggaagcggctcaaagatgctgggtttgatgaacaatcgatcaagaatagggataaagctgccttaatcgcttacatcgccaagctagaatctgaggtttatgattaccaacacaacatgggtcttctccttttggagaaaaacgaattgtcttcgcagtatgaagagattaaggcctctgtggatgagtctgacctaacacatatgcgagagaaatcagcatatgtctcggctctagctgaagcaaagaaacgagaagagagtttgaagaaggatgtagggattgcgaaggagtgcatttctagtttggagaagactctgcatgagatgcgcgcagaatgtgccgaaacaaaagtttctgctgggagtactatgtcggaagcacatgttatgatcgaggatgcgctgaagaaacttgcagatgctgaagcaaaaatgcgcgcagcagaggctttacaagcagaagctaaccggtatcaccgaattgcagagagaaagttgaaagaagttgaaagtcgtgaagatgatcttactcggcgtcttgcatctttcaagtctgagtgtgaaacgaaagagaacgaaatggttattgagcgacagactttaaatgagaggcggaagagcttgcagcaagagcatgaaagattattggatgcacaagtttcactaaatcaaagagaagatcacatttttgctagatcccaagaattagctgaacttgaaaaggggttagatactgcaaagaccacatttgaggaggaacgcaaagccttcgaagacaaaaaatccaacttggagattgcgttagccttgtgtgctaaaagagaagaggtcatcaaaaaaatttctgggagacaagatagtaatgttttcatgttttttttttttttttgcaaaaaacaggctgtctctgaaagggaatcttcgctacttaagaaggagcaagaactgcttgttgctgaagaaaaaattgccagcaaggaatctgaactaattcagaacgtcttagcgaatcaagaagttatcctgaggaaaagaaaatctgatgtggaagctgaattggaatgtaagagcaaatcggtggaagttgaaattgagagcaagagacgggcttgggaattaagggaggttgatatcaagcagagggaagacctagttggtgaaaaagaacatgacttggaagttcaatcaagagcattggcagagaaagaaaaagatataacagagaagtcttttaaccttgatgagaaagagaagaatttggttgctacagaggaagatattaaccgtaagactactatgctggaggatgagaaggaacggcttagaaaattggacctggagctgcagcagtctttgacgtcattagaagacaagagaaaacgggttgattctgcaacacaaaaacttgaagccttgaagagtgagacaagcgaattatctactctggagatgaaacttaaggaggaattagatgatttgagggcccaaaagcttgaaatgctggctgaagctgatagattgaaggtggagaaagctaaatttgaggctgagtgggaacacattgatgtgaaaagggaagagttaagaaaagaagcagagtatataactcggcaaagagaggctttttcaatgtatctcaaggacgagcgtgataacatcaaagaggaaagagatgcattgagaaatcagcacaaaaacgatgtggagtcgctaaaccgagagcgtgaagaattcatgaataagatggtggaggaacattctgaatggcttagcaagatacagcgtgagcgtgctgacttcttgttgggcattgagatgcagaaacgagagttggagtattgcatcgaaaacaaacgagaagaattggaaaattcttcaagggatagagaaaaggcttttgagcaagagaagaagttagaagaggagcgtatacagtcgcttaaggaaatggcagagaaagagttagaacatgtccaagtggaactaaagaggttggatgctgagaggttggagatcaaattggatcgtgaaagaagagagagggagtgggcagagttaaaggattcggttgaggagctaaaggtgcaacgagaaaaactagagacgcaaaggcatatgcttcgtgctgaaagagatgaaatccgacatgagattgaagaactgaagaaattagagaatctgaaagttgcattagatgatatgtccatggctaaaatgcagctgtccaatttagagcgtagctgggaaaaggtttctgctttgaagcagaaggttgtgtctcgggatgatgaacttgacctgcaaaatggagtcagcactgtgagtaatagcgaagatggctacaactcttcaatggaaagacagaacggcttaaccccttcatctgccactccattttcatggataaaacgatgtactaatctgattttcaagacttctccagagaaatccaccctaatgcatcattatgaagaagaaggaggagtgccttcagaaaagttgaagctagaatcgtcgagaagagaagaaaaggcttacactgagggactgtctattgcggttgaaagacttgaagcaggaaggaaaagaagaggtaacacatctggagatgagactagcgaaccaagcaataacaaaaagaggaaacatgatgttacccaaaaatattctgatgaagctgatacccagagtgtcatatcaagcccgcaaaatgtgcctgaggacaaacatgaactaccatcaagccaaacccagacgccaagtggtatggtagtcatcagtgaaaccgttaagatcacaagagtaacgtgtgagacagaggtgaccaacaaagtcacaacccttgactgctcagaaagtccttcggaagcagggagaaagatgggagaggagacagaagatggtgattgcaatcagactgggataaacgcgtctgaaacagtgattcataatgaagctgcaacagaagatatatgcacataagaaactctatgaatccttttgggcttggtttctagagaagataaggatttcgagtgagtagtgttggttagttaaggtagggtagggaaaaatcgttggcttctagtgtgttgcagtgtgtgtatttgagaatatatgatttgtgagactaaaaagccgaaatcattatcggggtttattgtttcttctacttgtaatgatgttgatgattgatgtcttttagctcatcggttagtaagtgtcaacagcaagagtgttcggctggactaccgtggcccattctgtagatttctttctagcccggcccacaacttccattgggctagatatgtttttctcacgtaaaagatatctgactgtcgatattgaagtaacttcttaaaacatttagatttaattgataatttaaatgtcacttttggttttttagatgacgattaaaatccttttcataacccaaaatattagttttgccgatattagaaatccgaagaaaatgacagaaaataggattaatcaatttagggtttaataaaaaatagtgagtgagagagaggctacagtgctccacattgacatcaacaaggttgaagaagaacaacatcattcaacatcagcatcacgaatattttcgagtcatggagagaagcgccgttgcctcaggttttcatagaaattacatcctctgtgcttcacgcgccgccacttccacgacgcgcctccactctttgtcctccctcagaaactttccctcttcctctctcaggattcgtcactgtccttctcccatctcttccaatttcatcgttagtgaagtttcccgaaaccgacgatgcgacgccgtttcttccagcaccaccgatgtgactgaattagccgaaattgattgggacaagattgattttgggcttaaaccaacggattacatgtacgccatgaaatgtagccgtgatggtgaattctctcaaggtcaattgcaaccttttggtaacattgacattaacccagcagctggtgttctcaactatggacaaggtttgtttgaaggtctaaaagcttacagaaaacaagatgggaatattctactcttccgtcctgaggagaatgcgatccgaatgagaaatggcgctgaaagaatgtgtatgccttctccaaccgttgaacagtttgttgaggctgtgaaaactactgtattagctaacaaacgctggattccacctccaggtaaaggatcattatacataaggccattgctaatgggaactggagctgttcttggtcttgctcctgctcctgaatacactttccttatctttgtttcacctgtcgggaactacttcaaggaaggtgttgcgccgatcaacttaattgttgaaactgaattccatcgtgcaactcccggcggtactggaggtgttaaaaccatcggtaattatgctgcagtcttgaaggctcagtcgattgcgaaagctaaagggtattctgatgttttataccttgattgccttcacaaaagatatcttgaggaggtttcatcgtgcaatattttcattgtgaaggataatgtgatatctactcctgaaattaaaggaaccatcttgcctggaattacccggaagagtatcatcgaagtagctcgtagccaaggtttcaaggtggaggaacgaaatgtgacagttgatgaattggtagaagcagacgaggttttctgcacaggaaccgccgttgttttatctccggttggaagcatcacttacaaaagccaaaggttttcttatggagaagatggctttggaacagtctcgaaacaactctacacttccttgacgagcctgcaaatgggtctgagcgaagataacatgaactggactgttcaattgagttaaaaccagtcacgaacatatcaatattatacatatggatgtgttagtagatacagaagatatattagaattccatgcttctgatgcttcaagattctgatacttgaaactataaacaataatctgtctttaaaataactaaaacggggaataaaaagc

SEQ ID NO: 1978 - protein, 1034 aa, Arabidopsis thaliana
  peptide (1)..(1034): Ceres Seq. ID no. 13489118
  misc_feature (96)..(941): Pfam Name: Pfam Description:  Myosin tail
  misc_feature (58)..(808): NCBI GI NO: 9828634 NR Description: F1N21.5 [Arabidopsis thaliana]
  misc_feature (73)..(1008): NCBI GI NO: 7488926 NR Description: nuclear matrix constituent protein 1 - carrot
  misc_feature (41)..(719): NCBI GI NO: 18391490 NR Description: nuclear matrix constituent protein -related
  misc_feature (58)..(768): NCBI GI NO: 15220369 NR Description: nuclear matrix constituent protein 1 -related
  misc_feature (62)..(963): NCBI GI NO: 7488926 NR Description: nuclear matrix constituent protein 1 - carrot
  misc_feature (84)..(875): NCBI GI NO: 18391490 NR Description: nuclear matrix constituent protein -related
  misc_feature (66)..(808): NCBI GI NO: 15220369 NR Description: nuclear matrix constituent protein 1 -related
  misc_feature (1)..(719): NCBI GI NO: 15221524 NR Description: nuclear matrix constituent protein 1
  misc_feature (83)..(938): NCBI GI NO: 15221524 NR Description: nuclear matrix constituent protein 1
  misc_feature (41)..(358): NCBI GI NO: 15010714 NR Description: At1g13220/F3F19_25 [Arabidopsis thaliana]
MATSSRSERFPITPSTAATNRLTITPNSRVLKSPLTEEIMWKRLKDAGFDEQSIKNRDKAALIAYIAKLESEVYDYQHNMGLLLLEKNELSSQYEEIKASVDESDLTHMREKSAYVSALAEAKKREESLKKDVGIAKECISSLEKTLHEMRAECAETKVSAGSTMSEAHVMIEDALKKLADAEAKMRAAEALQAEANRYHRIAERKLKEVESREDDLTRRLASFKSECETKENEMVIERQTLNERRKSLQQEHERLLDAQVSLNQREDHIFARSQELAELEKGLDTAKTTFEEERKAFEDKKSNLEIALALCAKREEVIKKISGRQDSNVFMFFFFFCKKQAVSERESSLLKKEQELLVAEEKIASKESELIQNVLANQEVILRKRKSDVEAELECKSKSVEVEIESKRRAWELREVDIKQREDLVGEKEHDLEVQSRALAEKEKDITEKSFNLDEKEKNLVATEEDINRKTTMLEDEKERLRKLDLELQQSLTSLEDKRKRVDSATQKLEALKSETSELSTLEMKLKEELDDLRAQKLEMLAEADRLKVEKAKFEAEWEHIDVKREELRKEAEYITRQREAFSMYLKDERDNIKEERDALRNQHKNDVESLNREREEFMNKMVEEHSEWLSKIQRERADFLLGIEMQKRELEYCIENKREELENSSRDREKAFEQEKKLEEERIQSLKEMAEKELEHVQVELKRLDAERLEIKLDRERREREWAELKDSVEELKVQREKLETQRHMLRAERDEIRHEIEELKKLENLKVALDDMSMAKMQLSNLERSWEKVSALKQKVVSRDDELDLQNGVSTVSNSEDGYNSSMERQNGLTPSSATPFSWIKRCTNLIFKTSPEKSTLMHHYEEEGGVPSEKLKLESSRREEKAYTEGLSIAVERLEAGRKRRGNTSGDETSEPSNNKKRKHDVTQKYSDEADTQSVISSPQNVPEDKHELPSSQTQTPSGMVVISETVKITRVTCETEVTNKVTTLDCSESPSEAGRKMGEETEDGDCNQTGINASETVIHNEAATEDICT

SEQ ID NO: 1979 - protein, 995 aa, Arabidopsis thaliana
  peptide (1)..(995): Ceres Seq. ID no. 13489119
  misc_feature (57)..(902): Pfam Name: Pfam Description:  Myosin tail
  misc_feature (19)..(769): NCBI GI NO: 9828634 NR Description: F1N21.5 [Arabidopsis thaliana]
  misc_feature (34)..(969): NCBI GI NO: 7488926 NR Description: nuclear matrix constituent protein 1 - carrot
  misc_feature (2)..(680): NCBI GI NO: 18391490 NR Description: nuclear matrix constituent protein -related
  misc_feature (19)..(729): NCBI GI NO: 15220369 NR Description: nuclear matrix constituent protein 1 -related
  misc_feature (23)..(924): NCBI GI NO: 7488926 NR Description: nuclear matrix constituent protein 1 - carrot
  misc_feature (45)..(836): NCBI GI NO: 18391490 NR Description: nuclear matrix constituent protein -related
  misc_feature (27)..(769): NCBI GI NO: 15220369 NR Description: nuclear matrix constituent protein 1 -related
  misc_feature (1)..(680): NCBI GI NO: 15221524 NR Description: nuclear matrix constituent protein 1
  misc_feature (44)..(899): NCBI GI NO: 15221524 NR Description: nuclear matrix constituent protein 1
  misc_feature (2)..(319): NCBI GI NO: 15010714 NR Description: At1g13220/F3F19_25 [Arabidopsis thaliana]
MWKRLKDAGFDEQSIKNRDKAALIAYIAKLESEVYDYQHNMGLLLLEKNELSSQYEEIKASVDESDLTHMREKSAYVSALAEAKKREESLKKDVGIAKECISSLEKTLHEMRAECAETKVSAGSTMSEAHVMIEDALKKLADAEAKMRAAEALQAEANRYHRIAERKLKEVESREDDLTRRLASFKSECETKENEMVIERQTLNERRKSLQQEHERLLDAQVSLNQREDHIFARSQELAELEKGLDTAKTTFEEERKAFEDKKSNLEIALALCAKREEVIKKISGRQDSNVFMFFFFFCKKQAVSERESSLLKKEQELLVAEEKIASKESELIQNVLANQEVILRKRKSDVEAELECKSKSVEVEIESKRRAWELREVDIKQREDLVGEKEHDLEVQSRALAEKEKDITEKSFNLDEKEKNLVATEEDINRKTTMLEDEKERLRKLDLELQQSLTSLEDKRKRVDSATQKLEALKSETSELSTLEMKLKEELDDLRAQKLEMLAEADRLKVEKAKFEAEWEHIDVKREELRKEAEYITRQREAFSMYLKDERDNIKEERDALRNQHKNDVESLNREREEFMNKMVEEHSEWLSKIQRERADFLLGIEMQKRELEYCIENKREELENSSRDREKAFEQEKKLEEERIQSLKEMAEKELEHVQVELKRLDAERLEIKLDRERREREWAELKDSVEELKVQREKLETQRHMLRAERDEIRHEIEELKKLENLKVALDDMSMAKMQLSNLERSWEKVSALKQKVVSRDDELDLQNGVSTVSNSEDGYNSSMERQNGLTPSSATPFSWIKRCTNLIFKTSPEKSTLMHHYEEEGGVPSEKLKLESSRREEKAYTEGLSIAVERLEAGRKRRGNTSGDETSEPSNNKKRKHDVTQKYSDEADTQSVISSPQNVPEDKHELPSSQTQTPSGMVVISETVKITRVTCETEVTNKVTTLDCSESPSEAGRKMGEETEDGDCNQTGINASETVIHNEAATEDICT

SEQ ID NO: 1980 - protein, 955 aa, Arabidopsis thaliana
  peptide (1)..(955): Ceres Seq. ID no. 13489120
  misc_feature (17)..(862): Pfam Name: Pfam Description:  Myosin tail
  misc_feature (1)..(729): NCBI GI NO: 9828634 NR Description: F1N21.5 [Arabidopsis thaliana]
  misc_feature (1)..(929): NCBI GI NO: 7488926 NR Description: nuclear matrix constituent protein 1 - carrot
  misc_feature (1)..(640): NCBI GI NO: 18391490 NR Description: nuclear matrix constituent protein -related
  misc_feature (1)..(689): NCBI GI NO: 15220369 NR Description: nuclear matrix constituent protein 1 -related
  misc_feature (1)..(884): NCBI GI NO: 7488926 NR Description: nuclear matrix constituent protein 1 - carrot
  misc_feature (5)..(796): NCBI GI NO: 18391490 NR Description: nuclear matrix constituent protein -related
  misc_feature (1)..(729): NCBI GI NO: 15220369 NR Description: nuclear matrix constituent protein 1 -related
  misc_feature (1)..(640): NCBI GI NO: 15221524 NR Description: nuclear matrix constituent protein 1
  misc_feature (4)..(859): NCBI GI NO: 15221524 NR Description: nuclear matrix constituent protein 1
  misc_feature (1)..(279): NCBI GI NO: 15010714 NR Description: At1g13220/F3F19_25 [Arabidopsis thaliana]
MGLLLLEKNELSSQYEEIKASVDESDLTHMREKSAYVSALAEAKKREESLKKDVGIAKECISSLEKTLHEMRAECAETKVSAGSTMSEAHVMIEDALKKLADAEAKMRAAEALQAEANRYHRIAERKLKEVESREDDLTRRLASFKSECETKENEMVIERQTLNERRKSLQQEHERLLDAQVSLNQREDHIFARSQELAELEKGLDTAKTTFEEERKAFEDKKSNLEIALALCAKREEVIKKISGRQDSNVFMFFFFFCKKQAVSERESSLLKKEQELLVAEEKIASKESELIQNVLANQEVILRKRKSDVEAELECKSKSVEVEIESKRRAWELREVDIKQREDLVGEKEHDLEVQSRALAEKEKDITEKSFNLDEKEKNLVATEEDINRKTTMLEDEKERLRKLDLELQQSLTSLEDKRKRVDSATQKLEALKSETSELSTLEMKLKEELDDLRAQKLEMLAEADRLKVEKAKFEAEWEHIDVKREELRKEAEYITRQREAFSMYLKDERDNIKEERDALRNQHKNDVESLNREREEFMNKMVEEHSEWLSKIQRERADFLLGIEMQKRELEYCIENKREELENSSRDREKAFEQEKKLEEERIQSLKEMAEKELEHVQVELKRLDAERLEIKLDRERREREWAELKDSVEELKVQREKLETQRHMLRAERDEIRHEIEELKKLENLKVALDDMSMAKMQLSNLERSWEKVSALKQKVVSRDDELDLQNGVSTVSNSEDGYNSSMERQNGLTPSSATPFSWIKRCTNLIFKTSPEKSTLMHHYEEEGGVPSEKLKLESSRREEKAYTEGLSIAVERLEAGRKRRGNTSGDETSEPSNNKKRKHDVTQKYSDEADTQSVISSPQNVPEDKHELPSSQTQTPSGMVVISETVKITRVTCETEVTNKVTTLDCSESPSEAGRKMGEETEDGDCNQTGINASETVIHNEAATEDICT

SEQ ID NO: 1981 - DNA, 2078 bp, Arabidopsis thaliana
  misc_feature (1)..(2078): Ceres Seq. ID no. 12558671
gaagagcagagtcattcttaaccatagagacagaagagataagaatcataacaacaacaacaccaatcattacacacaggttgatactatggagagaaagcctcttgaggttgagccatctactacgacgactaacaccgatgtggtcgattctttcgaggaagagcagagaaaaatcgtttatagaggatggaaagtcatgccttttatcattggtaatgagacatttgagaagcttgggatcatagggacattatcaaaccttcttgtgtacctaacttctgtattcaaccttaagagctacacagctgcaactatcatcaatgcctttagtggtacaatcaatttcgggacttttattgctgcctttctttgcgacacttactttggtcgctacaagactctcagtgtcgctgtcatcgcttgttttctgggatcgtttgtgatactacttactgctgcaattccgtcgttgcaccccgttgcttgcggaaacaaaatctcgtgcgaagggccaagtgtgggacagatactgtttctgctcatgggtttaggctttcttgtggtaggcgctggtggtatcagaccgtgtaatttagcgtttggtgctgatcagttcaaccccaaatccgaatcaggaaagaaagggatcaacagtttcttcaactggtatttcttcactttcacgttcgcgcagatcatctcgctcacagcagttgtgtatatccagtcaaatgtgagttggacaatcggtttgatcattccggtggctcttatgttcttggcgtgtgtgattttctttgctggcgatagattgtatgtaaaagtgaaagcctcgggtagtccattggctggtattgctcgtgttatagcagccgcgatcaagaaacgaggtttgaagccggttaagcagccttgggtcaatctttacaaccatatcccgtctaactatgcaaatactactctaaaatacaccgaccagttcagatttctagacaaagcagcaattatgacccccgaggagaagttgaactccgatggaacggcttccgatccatggaaactatgcacgttgcagcaagtggaagaagtgaaatgcattgtaagagtgattccaatctggtttgcatccacgatatactaccttgcaataactatacaaatgacttatccggtcttccaagcgctccagagcgaccgacgattaggttctggtggcttcaggattcctgcggccacctatgtagtgttcttgatgactggcatgacagttttcatcatattctacgaccgtgtacttgtcccgtcgctcagaagagtgaccgggttagaaaccggtatatcactcttacaaagaatcggagctgggtttacatttgcgataatgagtttattagtttccgggtttatagaggaaaggagaagaaactttgcattgaccaaaccgacactcgggatggcgcctcggacaggagaaatctcatcaatgtcagcgttgtggctgattccgcagcttacacttgcaggcatagcagaagcttttgctgccattggacaaatggagttttactacaagcagtttcctgaaaacatgaagagcttcgcgggttctatcttttatgtcggtgcaggggtttcgagctacctcgctagcttcttgatatcaactgttcatcgaacaaccgcgcattcaccttcagggaattggttagctgaggatctgaacaaagcgaaattggattacttctacttcatgctcacaggactcatggttgttaacatggcttacttcttgttgatggctagatggtatagatacaaaggaggtaatgatgaagacatcactgagattgagaccaatgaagaagaaaccaagcaacagcagctacaagacaagaactctgtctgatctggaaacttatatatttttggtattctacttcaatctccgtagtttttcttcacccgaaatcaaccttgttgtacttttatagattaattgaagaagaaaatcacttcatctttgtagacatgtattgtaaaataagttttttgttgctaatttcaacctccgtacg

SEQ ID NO: 1982 - protein, 635 aa, Arabidopsis thaliana
  peptide (1)..(635): Ceres Seq. ID no. 12558672
  misc_feature (132)..(543): Pfam Name: Pfam Description:  POT family
  misc_feature (30)..(370): NCBI GI NO: 24417388 NR Description: unknown [Arabidopsis thaliana]
  misc_feature (30)..(633): NCBI GI NO: 15241927 NR Description: peptide transporter; protein id: At5g62680.1
  misc_feature (53)..(614): NCBI GI NO: 15221883 NR Description: peptide transporter, putative
  misc_feature (54)..(617): NCBI GI NO: 11933414 NR Description: nitrate transporter NRT1-5 [Glycine max]
  misc_feature (25)..(621): NCBI GI NO: 11933400 NR Description: nitrate transporter NRT1-2 [Glycine max]
  misc_feature (51)..(621): NCBI GI NO: 11933397 NR Description: nitrate transporter NRT1-1 [Glycine max]
  misc_feature (10)..(622): NCBI GI NO: 18409391 NR Description: putative peptide transporter
  misc_feature (23)..(633): NCBI GI NO: 25403285 NR Description: protein T7N9.14 [imported] - Arabidopsis thaliana
  misc_feature (41)..(600): NCBI GI NO: 30696666 NR Description: oligopeptide transporter -related
  misc_feature (30)..(607): NCBI GI NO: 31088360 NR Description: peptide transporter 1 [Vicia faba]
KSRVILNHRDRRDKNHNNNNTNHYTQVDTMERKPLEVEPSTTTTNTDVVDSFEEEQRKIVYRGWKVMPFIIGNETFEKLGIIGTLSNLLVYLTSVFNLKSYTAATIINAFSGTINFGTFIAAFLCDTYFGRYKTLSVAVIACFLGSFVILLTAAIPSLHPVACGNKISCEGPSVGQILFLLMGLGFLVVGAGGIRPCNLAFGADQFNPKSESGKKGINSFFNWYFFTFTFAQIISLTAVVYIQSNVSWTIGLIIPVALMFLACVIFFAGDRLYVKVKASGSPLAGIARVIAAAIKKRGLKPVKQPWVNLYNHIPSNYANTTLKYTDQFRFLDKAAIMTPEEKLNSDGTASDPWKLCTLQQVEEVKCIVRVIPIWFASTIYYLAITIQMTYPVFQALQSDRRLGSGGFRIPAATYVVFLMTGMTVFIIFYDRVLVPSLRRVTGLETGISLLQRIGAGFTFAIMSLLVSGFIEERRRNFALTKPTLGMAPRTGEISSMSALWLIPQLTLAGIAEAFAAIGQMEFYYKQFPENMKSFAGSIFYVGAGVSSYLASFLISTVHRTTAHSPSGNWLAEDLNKAKLDYFYFMLTGLMVVNMAYFLLMARWYRYKGGNDEDITEIETNEEETKQQQLQDKNSV

SEQ ID NO: 1983 - protein, 606 aa, Arabidopsis thaliana
  peptide (1)..(606): Ceres Seq. ID no. 12558673
  misc_feature (103)..(514): Pfam Name: Pfam Description:  POT family
  misc_feature (1)..(341): NCBI GI NO: 24417388 NR Description: unknown [Arabidopsis thaliana]
  misc_feature (1)..(604): NCBI GI NO: 15241927 NR Description: peptide transporter; protein id: At5g62680.1
  misc_feature (24)..(585): NCBI GI NO: 15221883 NR Description: peptide transporter, putative
  misc_feature (25)..(588): NCBI GI NO: 11933414 NR Description: nitrate transporter NRT1-5 [Glycine max]
  misc_feature (1)..(592): NCBI GI NO: 11933400 NR Description: nitrate transporter NRT1-2 [Glycine max]
  misc_feature (22)..(592): NCBI GI NO: 11933397 NR Description: nitrate transporter NRT1-1 [Glycine max]
  misc_feature (1)..(593): NCBI GI NO: 18409391 NR Description: putative peptide transporter
  misc_feature (1)..(604): NCBI GI NO: 25403285 NR Description: protein T7N9.14 [imported] - Arabidopsis thaliana
  misc_feature (12)..(571): NCBI GI NO: 30696666 NR Description: oligopeptide transporter -related
  misc_feature (1)..(578): NCBI GI NO: 31088360 NR Description: peptide transporter 1 [Vicia faba]
MERKPLEVEPSTTTTNTDVVDSFEEEQRKIVYRGWKVMPFIIGNETFEKLGIIGTLSNLLVYLTSVFNLKSYTAATIINAFSGTINFGTFIAAFLCDTYFGRYKTLSVAVIACFLGSFVILLTAAIPSLHPVACGNKISCEGPSVGQILFLLMGLGFLVVGAGGIRPCNLAFGADQFNPKSESGKKGINSFFNWYFFTFTFAQIISLTAVVYIQSNVSWTIGLIIPVALMFLACVIFFAGDRLYVKVKASGSPLAGIARVIAAAIKKRGLKPVKQPWVNLYNHIPSNYANTTLKYTDQFRFLDKAAIMTPEEKLNSDGTASDPWKLCTLQQVEEVKCIVRVIPIWFASTIYYLAITIQMTYPVFQALQSDRRLGSGGFRIPAATYVVFLMTGMTVFIIFYDRVLVPSLRRVTGLETGISLLQRIGAGFTFAIMSLLVSGFIEERRRNFALTKPTLGMAPRTGEISSMSALWLIPQLTLAGIAEAFAAIGQMEFYYKQFPENMKSFAGSIFYVGAGVSSYLASFLISTVHRTTAHSPSGNWLAEDLNKAKLDYFYFMLTGLMVVNMAYFLLMARWYRYKGGNDEDITEIETNEEETKQQQLQDKNSV

SEQ ID NO: 1984 - protein, 569 aa, Arabidopsis thaliana
  peptide (1)..(569): Ceres Seq. ID no. 12558674
  misc_feature (66)..(477): Pfam Name: Pfam Description:  POT family
  misc_feature (1)..(304): NCBI GI NO: 24417388 NR Description: unknown [Arabidopsis thaliana]
  misc_feature (1)..(567): NCBI GI NO: 15241927 NR Description: peptide transporter; protein id: At5g62680.1
  misc_feature (1)..(548): NCBI GI NO: 15221883 NR Description: peptide transporter, putative
  misc_feature (1)..(551): NCBI GI NO: 11933414 NR Description: nitrate transporter NRT1-5 [Glycine max]
  misc_feature (1)..(555): NCBI GI NO: 11933400 NR Description: nitrate transporter NRT1-2 [Glycine max]
  misc_feature (1)..(555): NCBI GI NO: 11933397 NR Description: nitrate transporter NRT1-1 [Glycine max]
  misc_feature (1)..(556): NCBI GI NO: 18409391 NR Description: putative peptide transporter
  misc_feature (1)..(567): NCBI GI NO: 25403285 NR Description: protein T7N9.14 [imported] - Arabidopsis thaliana
  misc_feature (1)..(534): NCBI GI NO: 30696666 NR Description: oligopeptide transporter -related
  misc_feature (1)..(541): NCBI GI NO: 31088360 NR Description: peptide transporter 1 [Vicia faba]
MPFIIGNETFEKLGIIGTLSNLLVYLTSVFNLKSYTAATIINAFSGTINFGTFIAAFLCDTYFGRYKTLSVAVIACFLGSFVILLTAAIPSLHPVACGNKISCEGPSVGQILFLLMGLGFLVVGAGGIRPCNLAFGADQFNPKSESGKKGINSFFNWYFFTFTFAQIISLTAVVYIQSNVSWTIGLIIPVALMFLACVIFFAGDRLYVKVKASGSPLAGIARVIAAAIKKRGLKPVKQPWVNLYNHIPSNYANTTLKYTDQFRFLDKAAIMTPEEKLNSDGTASDPWKLCTLQQVEEVKCIVRVIPIWFASTIYYLAITIQMTYPVFQALQSDRRLGSGGFRIPAATYVVFLMTGMTVFIIFYDRVLVPSLRRVTGLETGISLLQRIGAGFTFAIMSLLVSGFIEERRRNFALTKPTLGMAPRTGEISSMSALWLIPQLTLAGIAEAFAAIGQMEFYYKQFPENMKSFAGSIFYVGAGVSSYLASFLISTVHRTTAHSPSGNWLAEDLNKAKLDYFYFMLTGLMVVNMAYFLLMARWYRYKGGNDEDITEIETNEEETKQQQLQDKNSV

SEQ ID NO: 1985 - DNA, 4723 bp, Arabidopsis thaliana
  misc_feature (1)..(4723): Ceres Seq. ID no. 13491071
ctctctctctctctatctctatctctcgatttgggggagttccgtcacggtggactagtacgtctcgttgccgttggtggcgtagtcggaattaatttcctcggcgttgagattcacatggtctagaattctagctaagtggttgttgttgttgttacgatttccgatttctcgagtttttttttttatatttagcttctgtttcgtttatccctcccggagacactccttggtcgaatctctcatgctgaggtgttttggacacttgttgtcaagaagaaaccagttttggttctgattaatcgttggttggaaaatatactcaattccaggccatgccttcacttcaactattgcagttaactgagcggggtcggggtcttgtagcgtcaagacggaaatctatactgcttgcggctgggattgtagctgctggtggaactgctgtttacctgaaatcaagggtcgcttcccggaggcctgattcttcgcgtctttgcaatggtcagagtgatgatgatgagactttggaaaagctgactgcaactgatcaaaatgcaaagataaccacgaaaaagaagaaaggaggaggattgaagtctcttcaggttctgactgctattcttctctctcagatgggaaaaatgggtgccagggatcttttggcactagtcgccaccgtggttttcagaacagctttgagcaatagattggcaaaagtgcaaggtttccttttccgtgctgctttcttaaggcgtgcgccactgtttctacggctcatctccgagaatattatgttgtgtttcatgctatcaacattgcactctacttcaaagtacataactggggcattgagtttgcgattcagaaagatattgaccaagattatccattcacactattttgagaatatggtatattacaaaatatcacacgtggatggtcggattacgcaccctgaacaaagaattgccagcgatgtaccaagattctcctcagagttgagcgatcttatactggatgatttgacggcggttactgatggaattttgtatgcatggcgcctgtgttcatatgctagtccaaaatacatcttctggatactggcctatgtactgggggctgggacggcgataagaaacttttctccttcttttgggaaattgatgtccaaggaacagcagttagaaggagagtaccggcaacttcattcacgcttaaggactcattcggaaagcatagcattctatggtggggaaaccagggaagaatctcatatacaacaaaagttcaagaatcttgttagccatatgagtcacgtgcttcatgatcactggtggtttggtatgatccaagattttctgctgaagtatcttggggccacagttgcagttattctgattatcgaaccattcttctctgggcatctaagacctgacgactcgaccttaggaagagctgagatgcttagcaatataagatatcacactagtgtcattatatctctctttcaggcgttgggaacactttctataagttccaggcggctcaaccgactcagtggttatgctgaccgaatccatgagttgatggctgtctcaagagaactcagtggtgatgataaatcgtctttccagagaaatagaagcagaaattatctaagtgaagctaattatgtagagttttccgatgtcaaggttgttactccaaccggaaatgttttggtggaggatctcacccttcgagttgagcaagggtctaatcttctgattacaggtcctaatggaagtggcaagagttcccttttccgagtattaggaggtctatggcccctggtgtctggacatattgtgaagccaggagttggttctgatcttaacaaggagatcttctatgtgccgcaacggccttatatggcagtaggaacacttcgtgaccagttaatatatcctcttacttctggccaagagagtgaactgctcactgagattggaatggtggagctattgaaaaatgttgatctagaatatttattggatcgctaccaacctgaaaaagaggttaattggggtgatgaattatctcttggagagcaacagagattgggtatggccagactattctaccacaaacccaaatttgcaattctagatgaatgcacaagtgctgtcacaactgatatggaagaacgctttgccgctaaggttcgagctatgggaacttcttgcataacaatctcccatcgtccagcgcttgttgcattccatgatgttgttctgtcattagacggtgaaggaggatggagtgttcattacaagagggatgactctgcccttctgacggatgctgaaattgattcagtgaaaagttcagatacagatcggcaaaatgatgcgatggttgttcaacgagcgtttgctgcagctagaaaggaatctgctactaattcaaaggctcagtcgtaccagacacagttaattgcaagatcacctgttgtagataaaagtgtagtgttgcctcgttttcctcaacctcaaacatcccaaagggctttaccatcaagagtagctgcaatgttaaacgtgttgatacccactatatttgacaagcaaggagctcaactgcttgctgttgcttgccttgtcgtctcaagaacgctgatctctgaccgaatagcctctttgaatgggaccactgtgaagtatgtcttggagcaagataaggcagcctttgttcgtttgattggtttgagtgttctccaaagtggtgcatcttctataattgctccttcactaaggcatttaacgcaaaggctagcgttagggtggaggattcgtttgactcaacatctgctaaggaactatttgagaaataatgcgttttacaaggttttccacatgtcaggcaatagtattgatgcggaccagagactcactcgtgacctggaaaagttaaccgctgacttgtctggacttcttactggaatggtaaagccatcggttgacattctctggttcacctggaggatgaagttactgactggtcagaggggagttgccatactttacacatatatgttacttggtcttggttttctgagacgtgttgctcccgatttcggtgatctagccggtgaagaacagcagcttgaagggaagtttcggtttatgcacgagaggctgaacactcatgctgaatctattgcattctttggaggtggagctcgagaaaaggctatggttgacaaaaaattcagggccctactggatcattctctcatgctcttgaggaagaaatggttgtatggcatacttgatgattttgtgacaaagcaacttcccaataatgtgacgtggggattgagtttattgtatgccctagaacacaagggagacagagcacttgtctccactcaaggtgaattggcacatgcattgcggtatctagcttctgttgtctcccaaagctttatggcttttggcgatattcttgaactacacaagaagttcctggagctctctggtggtattaacagaatttttgagctcgatgagtttttggatgcttctcagtcaggtgttacctcagaaaatcaaacaagtcgtttggattctcaagatctactttccttttcggaggtggatatcattacccctgctcagaaattgatggctagcaagttgtcgtgtgaaatagtttcagggaaaagcctgctcgtcacaggtccaaatggtagtggaaagacttcagtatttagagtccttagagatatctggcccactgtatgtggaagacttaccaaaccatcattggatatcaaagaacttgggtcagggaatggcatgttttttgtcccgcagcgaccttatacatgtttagggacactgagagatcaaattatataccctctatctaaagaagaagcagagaaaagggcagcaaagttgtacaccagtggagagagctcaacagaagctggaagcattctggattctcatttgaaaaccattctggagaatgttcggttagtttatctcttggaaagagacgtaggtggttgggatgctactaccaattgggaagacatattatctcttggagagcaacagagattaggcatggcacgtttattctttcacaggccgaagtttggagtccttgatgaatgcacaaatgcgacgagtgttgatgttgaggaacagctctatagagttgcacgagacatgggagtcactttcataacctcatcacaacggccggctctgatcccattccattccttggagctaaggctgattgatggagaaggaaactgggagctccgttcgatcgaacagacaacagagtgaactcagcaaaacatttttagaaaggtctatatagttgttaaagaaaaaagtaataaagttaaagccattagacgatgcaagctatatggtatgtagtatatggattcttcctcgatcgcaaggagtggaagagaatgcgtcgatgctagtgcttttgttagaattggaggatttgatttgattctagatatatataaatgtaggcgattgaattggtggagcattttgagttctcctatggagtatggtcttagctttgaacaaacaaagaatatagtgatcactcaaataatgtacagttcgtttcaatttcctttgttgggattagtttttctatcttataattaaaagaatgaaattgaagtggttgaatc

SEQ ID NO: 1986 - protein, 1337 aa, Arabidopsis thaliana
  peptide (1)..(1337): Ceres Seq. ID no. 13491072
  misc_feature (1123)..(1311): Pfam Name: Pfam Description:  ABC transporter
  misc_feature (639)..(785): NCBI GI NO: 27368893 NR Description: peroxisomal membrane protein ABC transporter homologue
  misc_feature (103)..(313): NCBI GI NO: 7487703 NR Description: hypothetical protein T5J17
  misc_feature (1225)..(1330): NCBI GI NO: 28195114 NR Description: putative ABC transporter
  misc_feature (66)..(656): NCBI GI NO: 27882317 NR Description: Similar to ATP-binding cassette, sub-family D
  misc_feature (109)..(665): NCBI GI NO: 6981450 NR Description: ATP-binding cassette, sub-family D
  misc_feature (116)..(656): NCBI GI NO: 19577352 NR Description: probable adrenoleukodystrophy protein
  misc_feature (109)..(665): NCBI GI NO: 14318642 NR Description: ATP-binding cassette, sub-family D
  misc_feature (109)..(665): NCBI GI NO: 12835990 NR Description: unnamed protein product [Mus musculus]
  misc_feature (110)..(665): NCBI GI NO: 4506341 NR Description: ATP-binding cassette, sub-family D, member 3
  misc_feature (687)..(1198): NCBI GI NO: 7487703 NR Description: hypothetical protein T5J17
MPSLQLLQLTERGRGLVASRRKSILLAAGIVAAGGTAVYLKSRVASRRPDSSRLCNGQSDDDETLEKLTATDQNAKITTKKKKGGGLKSLQVLTAILLSQMGKMGARDLLALVATVVFRTALSNRLAKVQGFLFRAAFLRRAPLFLRLISENIMLCFMLSTLHSTSKYITGALSLRFRKILTKIIHSHYFENMVYYKISHVDGRITHPEQRIASDVPRFSSELSDLILDDLTAVTDGILYAWRLCSYASPKYIFWILAYVLGAGTAIRNFSPSFGKLMSKEQQLEGEYRQLHSRLRTHSESIAFYGGETREESHIQQKFKNLVSHMSHVLHDHWWFGMIQDFLLKYLGATVAVILIIEPFFSGHLRPDDSTLGRAEMLSNIRYHTSVIISLFQALGTLSISSRRLNRLSGYADRIHELMAVSRELSGDDKSSFQRNRSRNYLSEANYVEFSDVKVVTPTGNVLVEDLTLRVEQGSNLLITGPNGSGKSSLFRVLGGLWPLVSGHIVKPGVGSDLNKEIFYVPQRPYMAVGTLRDQLIYPLTSGQESELLTEIGMVELLKNVDLEYLLDRYQPEKEVNWGDELSLGEQQRLGMARLFYHKPKFAILDECTSAVTTDMEERFAAKVRAMGTSCITISHRPALVAFHDVVLSLDGEGGWSVHYKRDDSALLTDAEIDSVKSSDTDRQNDAMVVQRAFAAARKESATNSKAQSYQTQLIARSPVVDKSVVLPRFPQPQTSQRALPSRVAAMLNVLIPTIFDKQGAQLLAVACLVVSRTLISDRIASLNGTTVKYVLEQDKAAFVRLIGLSVLQSGASSIIAPSLRHLTQRLALGWRIRLTQHLLRNYLRNNAFYKVFHMSGNSIDADQRLTRDLEKLTADLSGLLTGMVKPSVDILWFTWRMKLLTGQRGVAILYTYMLLGLGFLRRVAPDFGDLAGEEQQLEGKFRFMHERLNTHAESIAFFGGGAREKAMVDKKFRALLDHSLMLLRKKWLYGILDDFVTKQLPNNVTWGLSLLYALEHKGDRALVSTQGELAHALRYLASVVSQSFMAFGDILELHKKFLELSGGINRIFELDEFLDASQSGVTSENQTSRLDSQDLLSFSEVDIITPAQKLMASKLSCEIVSGKSLLVTGPNGSGKTSVFRVLRDIWPTVCGRLTKPSLDIKELGSGNGMFFVPQRPYTCLGTLRDQIIYPLSKEEAEKRAAKLYTSGESSTEAGSILDSHLKTILENVRLVYLLERDVGGWDATTNWEDILSLGEQQRLGMARLFFHRPKFGVLDECTNATSVDVEEQLYRVARDMGVTFITSSQRPALIPFHSLELRLIDGEGNWELRSIEQTTE

SEQ ID NO: 1987 - protein, 1237 aa, Arabidopsis thaliana
  peptide (1)..(1237): Ceres Seq. ID no. 13491073
  misc_feature (1023)..(1211): Pfam Name: Pfam Description:  ABC transporter
  misc_feature (539)..(685): NCBI GI NO: 27368893 NR Description: peroxisomal membrane protein ABC transporter homologue
  misc_feature (3)..(213): NCBI GI NO: 7487703 NR Description: hypothetical protein T5J17
  misc_feature (1125)..(1230): NCBI GI NO: 28195114 NR Description: putative ABC transporter
  misc_feature (1)..(556): NCBI GI NO: 27882317 NR Description: Similar to ATP-binding cassette, sub-family D
  misc_feature (9)..(565): NCBI GI NO: 6981450 NR Description: ATP-binding cassette, sub-family D
  misc_feature (16)..(556): NCBI GI NO: 19577352 NR Description: probable adrenoleukodystrophy protein
  misc_feature (9)..(565): NCBI GI NO: 14318642 NR Description: ATP-binding cassette, sub-family D
  misc_feature (9)..(565): NCBI GI NO: 12835990 NR Description: unnamed protein product [Mus musculus]
  misc_feature (10)..(565): NCBI GI NO: 4506341 NR Description: ATP-binding cassette, sub-family D, member 3
  misc_feature (587)..(1098): NCBI GI NO: 7487703 NR Description: hypothetical protein T5J17
MGKMGARDLLALVATVVFRTALSNRLAKVQGFLFRAAFLRRAPLFLRLISENIMLCFMLSTLHSTSKYITGALSLRFRKILTKIIHSHYFENMVYYKISHVDGRITHPEQRIASDVPRFSSELSDLILDDLTAVTDGILYAWRLCSYASPKYIFWILAYVLGAGTAIRNFSPSFGKLMSKEQQLEGEYRQLHSRLRTHSESIAFYGGETREESHIQQKFKNLVSHMSHVLHDHWWFGMIQDFLLKYLGATVAVILIIEPFFSGHLRPDDSTLGRAEMLSNIRYHTSVIISLFQALGTLSISSRRLNRLSGYADRIHELMAVSRELSGDDKSSFQRNRSRNYLSEANYVEFSDVKVVTPTGNVLVEDLTLRVEQGSNLLITGPNGSGKSSLFRVLGGLWPLVSGHIVKPGVGSDLNKEIFYVPQRPYMAVGTLRDQLIYPLTSGQESELLTEIGMVELLKNVDLEYLLDRYQPEKEVNWGDELSLGEQQRLGMARLFYHKPKFAILDECTSAVTTDMEERFAAKVRAMGTSCITISHRPALVAFHDVVLSLDGEGGWSVHYKRDDSALLTDAEIDSVKSSDTDRQNDAMVVQRAFAAARKESATNSKAQSYQTQLIARSPVVDKSVVLPRFPQPQTSQRALPSRVAAMLNVLIPTIFDKQGAQLLAVACLVVSRTLISDRIASLNGTTVKYVLEQDKAAFVRLIGLSVLQSGASSIIAPSLRHLTQRLALGWRIRLTQHLLRNYLRNNAFYKVFHMSGNSIDADQRLTRDLEKLTADLSGLLTGMVKPSVDILWFTWRMKLLTGQRGVAILYTYMLLGLGFLRRVAPDFGDLAGEEQQLEGKFRFMHERLNTHAESIAFFGGGAREKAMVDKKFRALLDHSLMLLRKKWLYGILDDFVTKQLPNNVTWGLSLLYALEHKGDRALVSTQGELAHALRYLASVVSQSFMAFGDILELHKKFLELSGGINRIFELDEFLDASQSGVTSENQTSRLDSQDLLSFSEVDIITPAQKLMASKLSCEIVSGKSLLVTGPNGSGKTSVFRVLRDIWPTVCGRLTKPSLDIKELGSGNGMFFVPQRPYTCLGTLRDQIIYPLSKEEAEKRAAKLYTSGESSTEAGSILDSHLKTILENVRLVYLLERDVGGWDATTNWEDILSLGEQQRLGMARLFFHRPKFGVLDECTNATSVDVEEQLYRVARDMGVTFITSSQRPALIPFHSLELRLIDGEGNWELRSIEQTTE

SEQ ID NO: 1988 - protein, 1234 aa, Arabidopsis thaliana
  peptide (1)..(1234): Ceres Seq. ID no. 13491074
  misc_feature (1020)..(1208): Pfam Name: Pfam Description:  ABC transporter
  misc_feature (536)..(682): NCBI GI NO: 27368893 NR Description: peroxisomal membrane protein ABC transporter homologue
  misc_feature (1)..(210): NCBI GI NO: 7487703 NR Description: hypothetical protein T5J17
  misc_feature (1122)..(1227): NCBI GI NO: 28195114 NR Description: putative ABC transporter
  misc_feature (1)..(553): NCBI GI NO: 27882317 NR Description: Similar to ATP-binding cassette, sub-family D
  misc_feature (6)..(562): NCBI GI NO: 6981450 NR Description: ATP-binding cassette, sub-family D
  misc_feature (13)..(553): NCBI GI NO: 19577352 NR Description: probable adrenoleukodystrophy protein
  misc_feature (6)..(562): NCBI GI NO: 14318642 NR Description: ATP-binding cassette, sub-family D
  misc_feature (6)..(562): NCBI GI NO: 12835990 NR Description: unnamed protein product [Mus musculus]
  misc_feature (7)..(562): NCBI GI NO: 4506341 NR Description: ATP-binding cassette, sub-family D, member 3
  misc_feature (584)..(1095): NCBI GI NO: 7487703 NR Description: hypothetical protein T5J17
MGARDLLALVATVVFRTALSNRLAKVQGFLFRAAFLRRAPLFLRLISENIMLCFMLSTLHSTSKYITGALSLRFRKILTKIIHSHYFENMVYYKISHVDGRITHPEQRIASDVPRFSSELSDLILDDLTAVTDGILYAWRLCSYASPKYIFWILAYVLGAGTAIRNFSPSFGKLMSKEQQLEGEYRQLHSRLRTHSESIAFYGGETREESHIQQKFKNLVSHMSHVLHDHWWFGMIQDFLLKYLGATVAVILIIEPFFSGHLRPDDSTLGRAEMLSNIRYHTSVIISLFQALGTLSISSRRLNRLSGYADRIHELMAVSRELSGDDKSSFQRNRSRNYLSEANYVEFSDVKVVTPTGNVLVEDLTLRVEQGSNLLITGPNGSGKSSLFRVLGGLWPLVSGHIVKPGVGSDLNKEIFYVPQRPYMAVGTLRDQLIYPLTSGQESELLTEIGMVELLKNVDLEYLLDRYQPEKEVNWGDELSLGEQQRLGMARLFYHKPKFAILDECTSAVTTDMEERFAAKVRAMGTSCITISHRPALVAFHDVVLSLDGEGGWSVHYKRDDSALLTDAEIDSVKSSDTDRQNDAMVVQRAFAAARKESATNSKAQSYQTQLIARSPVVDKSVVLPRFPQPQTSQRALPSRVAAMLNVLIPTIFDKQGAQLLAVACLVVSRTLISDRIASLNGTTVKYVLEQDKAAFVRLIGLSVLQSGASSIIAPSLRHLTQRLALGWRIRLTQHLLRNYLRNNAFYKVFHMSGNSIDADQRLTRDLEKLTADLSGLLTGMVKPSVDILWFTWRMKLLTGQRGVAILYTYMLLGLGFLRRVAPDFGDLAGEEQQLEGKFRFMHERLNTHAESIAFFGGGAREKAMVDKKFRALLDHSLMLLRKKWLYGILDDFVTKQLPNNVTWGLSLLYALEHKGDRALVSTQGELAHALRYLASVVSQSFMAFGDILELHKKFLELSGGINRIFELDEFLDASQSGVTSENQTSRLDSQDLLSFSEVDIITPAQKLMASKLSCEIVSGKSLLVTGPNGSGKTSVFRVLRDIWPTVCGRLTKPSLDIKELGSGNGMFFVPQRPYTCLGTLRDQIIYPLSKEEAEKRAAKLYTSGESSTEAGSILDSHLKTILENVRLVYLLERDVGGWDATTNWEDILSLGEQQRLGMARLFFHRPKFGVLDECTNATSVDVEEQLYRVARDMGVTFITSSQRPALIPFHSLELRLIDGEGNWELRSIEQTTE

SEQ ID NO: 1989 - DNA, 1250 bp, Arabidopsis thaliana
  misc_feature (1)..(1250): Ceres Seq. ID no. 13491036
ctctctctctctctctcttctcgcttctcttctcctctccgatcttctctgtgaccctcttcttcttcgatttcctttgggtttcttctccgaatcgccggagaaaaaaacccttctttgaatctaaagagactgtttttttgaagctattgactgattgattgataaggaagaataagcattgatcgatctgaattttgggtacaagatgtcgagattcagagacaggacggaggatttcaaggattctgttcggaattccgctgtttcgataggttataatgagtctaaagtggcatcaacaatggcgtcttttattatacataagccaaaggagagatcgcctttcacgaaagctgctttcaaaacgcttgatagcatcaaggagttggaactgtttatgttgaagcatcgaaaggattatgttgatctgcaccggactacagaacaggaaaaggatagtattgaacaagaagttgctgcttttattaaagcttgcaaagaacagatcgatattctcataaacagtattagaaatgaagaagcaaactccaaaggatggcttggcctccccgcagataacttcaatgctgattctatagcacacaaacatggagtggttttgattctgagtgagaaacttcattcagtcactgcccagtttgatcagcttagagctactcgtttccaagatattataaacagagctatgccgagaagaaaacctaagagggtcataaaggaagctaccccaattaatacaactctgggaaattcggagtccatagaaccggatgaaatccaggcccaacctcgtagattacaacaacaacaacttctagacgatgaaacacaagcccttcaggtagagctaagtaatcttttagatggtgctaggcagacagaaactaagatggtggagatgtctgcattaaaccacttgatggcaactcatgttctgcagcaagcccaacagatagagtttctttatgaccaggcagttgaggcaacaaagaacgtggagcttggaaacaaagagctttctcaagcaatccaacgaaacagcagcagcagaacctttctcttactgtttttcttcgtccttactttctccgtcttgttcttggattggtacagttaaaaaaccattctccaacaacaacttcacacagtttttgtagattttgattgttaactataaattatgaaaatttggaaatgggtttaaatgttaaaacaaaaataatgag

SEQ ID NO: 1990 - protein, 310 aa, Arabidopsis thaliana
  peptide (1)..(310): Ceres Seq. ID no. 13491037
  misc_feature (1)..(310): NCBI GI NO: 18403653 NR Description: expressed protein [Arabidopsis thaliana]
  misc_feature (1)..(310): NCBI GI NO: 28380152 NR Description: Syntaxin 81 (AtSYP81)
  misc_feature (1)..(287): NCBI GI NO: 25405495 NR Description: hypothetical protein F19C24.5
  misc_feature (1)..(310): NCBI GI NO: 38346626 NR Description: OSJNBa0074L08.20
  misc_feature (4)..(309): NCBI GI NO: 18203931 NR Description: Stx18 protein [Mus musculus]
  misc_feature (172)..(309): NCBI GI NO: 8394376 NR Description: syntaxin 18 [Homo sapiens]
  misc_feature (172)..(309): NCBI GI NO: 30585223 NR Description: Homo sapiens syntaxin 18 [synthetic construct]
  misc_feature (28)..(307): NCBI GI NO: 19075545 NR Description: putative snare complex protein; syntaxin like
  misc_feature (161)..(254): NCBI GI NO: 34878414 NR Description: similar to Syntaxin 18 [Rattus norvegicus]
  misc_feature (256)..(309): NCBI GI NO: 34878414 NR Description: similar to Syntaxin 18 [Rattus norvegicus]
MSRFRDRTEDFKDSVRNSAVSIGYNESKVASTMASFIIHKPKERSPFTKAAFKTLDSIKELELFMLKHRKDYVDLHRTTEQEKDSIEQEVAAFIKACKEQIDILINSIRNEEANSKGWLGLPADNFNADSIAHKHGVVLILSEKLHSVTAQFDQLRATRFQDIINRAMPRRKPKRVIKEATPINTTLGNSESIEPDEIQAQPRRLQQQQLLDDETQALQVELSNLLDGARQTETKMVEMSALNHLMATHVLQQAQQIEFLYDQAVEATKNVELGNKELSQAIQRNSSSRTFLLLFFFVLTFSVLFLDWYS

SEQ ID NO: 1991 - protein, 278 aa, Arabidopsis thaliana
  peptide (1)..(278): Ceres Seq. ID no. 13491038
  misc_feature (1)..(278): NCBI GI NO: 18403653 NR Description: expressed protein [Arabidopsis thaliana]
  misc_feature (1)..(278): NCBI GI NO: 28380152 NR Description: Syntaxin 81 (AtSYP81)
  misc_feature (1)..(255): NCBI GI NO: 25405495 NR Description: hypothetical protein F19C24.5
  misc_feature (1)..(278): NCBI GI NO: 38346626 NR Description: OSJNBa0074L08.20
  misc_feature (1)..(277): NCBI GI NO: 18203931 NR Description: Stx18 protein [Mus musculus]
  misc_feature (140)..(277): NCBI GI NO: 8394376 NR Description: syntaxin 18 [Homo sapiens]
  misc_feature (140)..(277): NCBI GI NO: 30585223 NR Description: Homo sapiens syntaxin 18 [synthetic construct]
  misc_feature (1)..(275): NCBI GI NO: 19075545 NR Description: putative snare complex protein; syntaxin like
  misc_feature (129)..(222): NCBI GI NO: 34878414 NR Description: similar to Syntaxin 18 [Rattus norvegicus]
  misc_feature (224)..(277): NCBI GI NO: 34878414 NR Description: similar to Syntaxin 18 [Rattus norvegicus]
MASFIIHKPKERSPFTKAAFKTLDSIKELELFMLKHRKDYVDLHRTTEQEKDSIEQEVAAFIKACKEQIDILINSIRNEEANSKGWLGLPADNFNADSIAHKHGVVLILSEKLHSVTAQFDQLRATRFQDIINRAMPRRKPKRVIKEATPINTTLGNSESIEPDEIQAQPRRLQQQQLLDDETQALQVELSNLLDGARQTETKMVEMSALNHLMATHVLQQAQQIEFLYDQAVEATKNVELGNKELSQAIQRNSSSRTFLLLFFFVLTFSVLFLDWYS

SEQ ID NO: 1992 - protein, 246 aa, Arabidopsis thaliana
  peptide (1)..(246): Ceres Seq. ID no. 13491039
  misc_feature (1)..(246): NCBI GI NO: 18403653 NR Description: expressed protein [Arabidopsis thaliana]
  misc_feature (1)..(246): NCBI GI NO: 28380152 NR Description: Syntaxin 81 (AtSYP81)
  misc_feature (1)..(223): NCBI GI NO: 25405495 NR Description: hypothetical protein F19C24.5
  misc_feature (1)..(246): NCBI GI NO: 38346626 NR Description: OSJNBa0074L08.20
  misc_feature (1)..(245): NCBI GI NO: 18203931 NR Description: Stx18 protein [Mus musculus]
  misc_feature (108)..(245): NCBI GI NO: 8394376 NR Description: syntaxin 18 [Homo sapiens]
  misc_feature (108)..(245): NCBI GI NO: 30585223 NR Description: Homo sapiens syntaxin 18 [synthetic construct]
  misc_feature (1)..(243): NCBI GI NO: 19075545 NR Description: putative snare complex protein; syntaxin like
  misc_feature (97)..(190): NCBI GI NO: 34878414 NR Description: similar to Syntaxin 18 [Rattus norvegicus]
  misc_feature (192)..(245): NCBI GI NO: 34878414 NR Description: similar to Syntaxin 18 [Rattus norvegicus]
MLKHRKDYVDLHRTTEQEKDSIEQEVAAFIKACKEQIDILINSIRNEEANSKGWLGLPADNFNADSIAHKHGVVLILSEKLHSVTAQFDQLRATRFQDIINRAMPRRKPKRVIKEATPINTTLGNSESIEPDEIQAQPRRLQQQQLLDDETQALQVELSNLLDGARQTETKMVEMSALNHLMATHVLQQAQQIEFLYDQAVEATKNVELGNKELSQAIQRNSSSRTFLLLFFFVLTFSVLFLDWYS

SEQ ID NO: 1993 - DNA, 915 bp, Arabidopsis thaliana
  misc_feature (1)..(915): Ceres Seq. ID no. 13592911
aacctctctttatttttgtttcttatattatagagaaaaagagctttttcccggaaagttgttctcatcttggaaaatcaaatctcggaaacgcagtcttcagctaaatcatgagcaacgagtacgattatctgttcaagcttttgttgatcggtgactcctctgttggaaaatcgtgtcttcttctccgattcgctgatgatgcttacattgacagctacataagcaccattggtgttgacttcaaaattaggacgattgagcaggatgggaagacgattaagctgcaaatttgggatactgctggacaggagcgtttcaggaccatcactagcagctattacagaggagctcatggaatcattattgtttatgactgtactgagatggaaagcttcaacaatgtgaagcagtggttgagtgagatcgatagatatgccaatgagagtgtttgcaagcttttaatcggtaacaagaatgatatggttgaaagcaaagttgtttccaccgaaactggaagggccttagcagatgagcttggaattccctttcttgagaccagtgccaaggattctattaacgttgaacaggcattcttaactattgctggcgagatcaaaaagaaaatgggaagccaaacgaatgcaaacaagacatctggtcctggaactgtccaaatgaaaggtcagccaatccaacagaacaatggcggttgctgcggtcagtagtttaaaaaatgttttaatcaaaactatctgagactctttttttacttcctttttaactaagtgttgtgaaaaccaatggctgtttaaaacaactaagaaatgtaatattccatgtcgctgtgtcttgaataagctatggtgttagttgcaagatacttcactttaatatagttcagtcttgactttg

SEQ ID NO: 1994 - protein, 205 aa, Arabidopsis thaliana
  peptide (1)..(205): Ceres Seq. ID no. 13592912
  misc_feature (10)..(171): Pfam Name: Pfam Description:  Ras family
  misc_feature (1)..(205): NCBI GI NO: 15229836 NR Description: GTP-binding protein, putative
  misc_feature (1)..(205): NCBI GI NO: 7438392 NR Description: GTP-binding protein homolog - turnip
  misc_feature (1)..(204): NCBI GI NO: 1053065 NR Description: small GTP-binding protein
  misc_feature (1)..(204): NCBI GI NO: 7438373 NR Description: GTP-binding protein RAB1 - garden petunia
  misc_feature (1)..(204): NCBI GI NO: 1370162 NR Description: RAB1A [Lotus japonicus]
  misc_feature (1)..(204): NCBI GI NO: 303748 NR Description: GTP-binding protein [Pisum sativum]
  misc_feature (1)..(204): NCBI GI NO: 541948 NR Description: GTP-binding protein rab1 - soybean
  misc_feature (1)..(203): NCBI GI NO: 34914060 NR Description: putative RIC1_ORYSA RAS-RELATED PROTEIN RIC1
  misc_feature (1)..(203): NCBI GI NO: 730510 NR Description: RAS-RELATED PROTEIN RIC1
  misc_feature (1)..(203): NCBI GI NO: 303750 NR Description: GTP-binding protein [Pisum sativum]
MSNEYDYLFKLLLIGDSSVGKSCLLLRFADDAYIDSYISTIGVDFKIRTIEQDGKTIKLQIWDTAGQERFRTITSSYYRGAHGIIIVYDCTEMESFNNVKQWLSEIDRYANESVCKLLIGNKNDMVESKVVSTETGRALADELGIPFLETSAKDSINVEQAFLTIAGEIKKKMGSQTNANKTSGPGTVQMKGQPIQQNNGGCCGQ

SEQ ID NO: 1995 - protein, 113 aa, Arabidopsis thaliana
  peptide (1)..(113): Ceres Seq. ID no. 13592913
  misc_feature (1)..(79): Pfam Name: Pfam Description:  Ras family
  misc_feature (1)..(113): NCBI GI NO: 15229836 NR Description: GTP-binding protein, putative
  misc_feature (1)..(113): NCBI GI NO: 7438392 NR Description: GTP-binding protein homolog - turnip
  misc_feature (1)..(112): NCBI GI NO: 1053065 NR Description: small GTP-binding protein
  misc_feature (1)..(112): NCBI GI NO: 7438373 NR Description: GTP-binding protein RAB1 - garden petunia
  misc_feature (1)..(112): NCBI GI NO: 1370162 NR Description: RAB1A [Lotus japonicus]
  misc_feature (1)..(112): NCBI GI NO: 303748 NR Description: GTP-binding protein [Pisum sativum]
  misc_feature (1)..(112): NCBI GI NO: 541948 NR Description: GTP-binding protein rab1 - soybean
  misc_feature (1)..(111): NCBI GI NO: 34914060 NR Description: putative RIC1_ORYSA RAS-RELATED PROTEIN RIC1
  misc_feature (1)..(111): NCBI GI NO: 730510 NR Description: RAS-RELATED PROTEIN RIC1
  misc_feature (1)..(111): NCBI GI NO: 303750 NR Description: GTP-binding protein [Pisum sativum]
MESFNNVKQWLSEIDRYANESVCKLLIGNKNDMVESKVVSTETGRALADELGIPFLETSAKDSINVEQAFLTIAGEIKKKMGSQTNANKTSGPGTVQMKGQPIQQNNGGCCGQ

SEQ ID NO: 1996 - DNA, 986 bp, Arabidopsis thaliana
  misc_feature (1)..(986): Ceres Seq. ID no. 12393802
aatcggcaaaattttctgctcctgagaaacaagtagagatactaaagatggaatctttgaactaaattcgaaaccttttaatgggtaccgagtcgggttcggatccagaatcgagctcaaacgggtggagccgtgctcgtggtctagttgtcaagactctggttttaattggcggtgctcttctcatcaagcgtctcactaaatccaccactcgtagagatcacgcccgtgtcgtctctcgttctctcaccggagagaagtttacgagggagcaagcgtcaagagatcctgataattacttcaacataagaatgctgagttgtccagctgctgaaatggtggatggttcagaggttttgtatctcgaacaggcattttggaggactcctcagaaaccgtttcgacaaagattatatatggtgaaaccgtgtccaaaagagctaaaatgtgatgttgaggtaagttcatatgcgatcagagatgctgaggaatacaaaaatttctgtgaccggcctaaggaccaacgcccacttcctgaagaagttattggtgacattggagagcatttgacgactatacacctgaattgttgtgaccgtgggaaacgttgcttgtacgaaggctcaacttcacctggtggatttccaaattcatggaacggggctagctattgtacttcagatcttgcagttctgaaaaacaatgagatacacctctgggatcgcggctttgatgagaatcgaaaccaggtttggggaccaaaggaaggtccgtacgagttcaagccagcgacatcatcgagcatcaacgaaaacttgtctgctttgaacatcctttatcaatcttctatcgataaaccaatccaagggtccctcatcttgcaagactagccaatttgcacccccttttctattgtctgatcttctctgtatcacacttagcctctttattcatctcatctcagccactttcaatatagttttggt

SEQ ID NO: 1997 - protein, 269 aa, Arabidopsis thaliana
  peptide (1)..(269): Ceres Seq. ID no. 12393803
  misc_feature (1)..(269): NCBI GI NO: 15241343 NR Description: putative protein; protein id: At5g51020
  misc_feature (1)..(269): NCBI GI NO: 21554618 NR Description: unknown [Arabidopsis thaliana]
  misc_feature (44)..(238): NCBI GI NO: 37520007 NR Description: hypothetical protein glr0438
MGTESGSDPESSSNGWSRARGLVVKTLVLIGGALLIKRLTKSTTRRDHARVVSRSLTGEKFTREQASRDPDNYFNIRMLSCPAAEMVDGSEVLYLEQAFWRTPQKPFRQRLYMVKPCPKELKCDVEVSSYAIRDAEEYKNFCDRPKDQRPLPEEVIGDIGEHLTTIHLNCCDRGKRCLYEGSTSPGGFPNSWNGASYCTSDLAVLKNNEIHLWDRGFDENRNQVWGPKEGPYEFKPATSSSINENLSALNILYQSSIDKPIQGSLILQD

SEQ ID NO: 1998 - protein, 192 aa, Arabidopsis thaliana
  peptide (1)..(192): Ceres Seq. ID no. 12393804
  misc_feature (1)..(192): NCBI GI NO: 15241343 NR Description: putative protein; protein id: At5g51020
  misc_feature (1)..(192): NCBI GI NO: 21554618 NR Description: unknown [Arabidopsis thaliana]
  misc_feature (1)..(161): NCBI GI NO: 37520007 NR Description: hypothetical protein glr0438
MLSCPAAEMVDGSEVLYLEQAFWRTPQKPFRQRLYMVKPCPKELKCDVEVSSYAIRDAEEYKNFCDRPKDQRPLPEEVIGDIGEHLTTIHLNCCDRGKRCLYEGSTSPGGFPNSWNGASYCTSDLAVLKNNEIHLWDRGFDENRNQVWGPKEGPYEFKPATSSSINENLSALNILYQSSIDKPIQGSLILQD

SEQ ID NO: 1999 - protein, 184 aa, Arabidopsis thaliana
  peptide (1)..(184): Ceres Seq. ID no. 12393805
  misc_feature (1)..(184): NCBI GI NO: 15241343 NR Description: putative protein; protein id: At5g51020
  misc_feature (1)..(184): NCBI GI NO: 21554618 NR Description: unknown [Arabidopsis thaliana]
  misc_feature (1)..(153): NCBI GI NO: 37520007 NR Description: hypothetical protein glr0438
MVDGSEVLYLEQAFWRTPQKPFRQRLYMVKPCPKELKCDVEVSSYAIRDAEEYKNFCDRPKDQRPLPEEVIGDIGEHLTTIHLNCCDRGKRCLYEGSTSPGGFPNSWNGASYCTSDLAVLKNNEIHLWDRGFDENRNQVWGPKEGPYEFKPATSSSINENLSALNILYQSSIDKPIQGSLILQD

SEQ ID NO: 2000 - DNA, 717 bp, Arabidopsis thaliana
  misc_feature (1)..(717): Ceres Seq. ID no. 12420495
ataagtctctctcttacattttgaaaccctaatttctcaaaaaaaatgtctgaagttgagtaccggtgctttgtcggcggccttgcctgggccaccaatgatgaagatcttcaaaggacgttctcacagttcggcgacgttgtcgattctaagatcattaacgaccgagagagtggaagatcaaggggattcggattcgtcaccttcaaggacgagaaagccatgagggatgcgattgaagagatgaacggtaaagagctcgatggacgtgtcatcaccgtgaacgaggctcagtcgagaggtagcggcggtggcggaggaggccgtggtggaagcggtggtggttaccgcagcggaggcggtggtggatactcaggaggcggtggtggttacgagagacgtagcggaggttacggatctggtggaggcggtggtggccgaggatacggtggtggtggacgccgtgagggaggtggctacggaggcggtgatggtggaagttacggcggcggtggtggcggctggtaatcaaagatagagttttttgcgtgctgctgctctgtttttggtttagatttggatttgtgtcaccacttctggtttggttatcgttcgtttggtttacttttttgatgaaacagtttcgtttaagtcttctttgtctggatcgaaatgttaattcgcgtgttgtttactaaatttataacgtttcctttt

SEQ ID NO: 2001 - protein, 160 aa, Arabidopsis thaliana
  peptide (1)..(160): Ceres Seq. ID no. 12420496
  misc_feature (8)..(79): Pfam Name: a.k.a. RRM, RBD, or RNP domain Pfam Description: RNA recognition motif.
  misc_feature (1)..(160): NCBI GI NO: 15235002 NR Description: glycine-rich RNA-binding protein 8
  misc_feature (1)..(160): NCBI GI NO: 544416 NR Description: Glycine-rich RNA-binding protein 10
  misc_feature (3)..(160): NCBI GI NO: 15226605 NR Description: glycine-rich RNA binding protein AtGRP7
  misc_feature (3)..(160): NCBI GI NO: 1346181 NR Description: Glycine-rich RNA-binding protein GRP2A
  misc_feature (3)..(160): NCBI GI NO: 21553354 NR Description: glycine-rich RNA binding protein 7
  misc_feature (3)..(160): NCBI GI NO: 1346180 NR Description: Glycine-rich RNA-binding protein GRP1A
  misc_feature (1)..(131): NCBI GI NO: 30692254 NR Description: glycine-rich RNA-binding protein 8 (GRP8) (CCR1)
  misc_feature (3)..(160): NCBI GI NO: 30681492 NR Description: glycine-rich RNA-binding protein (AtGRP7)
  misc_feature (1)..(159): NCBI GI NO: 544426 NR Description: Glycine-rich RNA-binding protein
  misc_feature (1)..(160): NCBI GI NO: 2119042 NR Description: glycine-rich RNA-binding protein RGP-1a
MSEVEYRCFVGGLAWATNDEDLQRTFSQFGDVVDSKIINDRESGRSRGFGFVTFKDEKAMRDAIEEMNGKELDGRVITVNEAQSRGSGGGGGGRGGSGGGYRSGGGGGYSGGGGGYERRSGGYGSGGGGGGRGYGGGGRREGGGYGGGDGGSYGGGGGGW

SEQ ID NO: 2002 - protein, 101 aa, Arabidopsis thaliana
  peptide (1)..(101): Ceres Seq. ID no. 12420497
  misc_feature (15)..(100): Pfam Name: Pfam Description:  Herpesvirus large structural phospho protein UL32
  misc_feature (1)..(101): NCBI GI NO: 15235002 NR Description: glycine-rich RNA-binding protein 8
  misc_feature (1)..(101): NCBI GI NO: 544416 NR Description: Glycine-rich RNA-binding protein 10
  misc_feature (1)..(101): NCBI GI NO: 15226605 NR Description: glycine-rich RNA binding protein AtGRP7
  misc_feature (1)..(101): NCBI GI NO: 1346181 NR Description: Glycine-rich RNA-binding protein GRP2A
  misc_feature (1)..(101): NCBI GI NO: 21553354 NR Description: glycine-rich RNA binding protein 7
  misc_feature (1)..(101): NCBI GI NO: 1346180 NR Description: Glycine-rich RNA-binding protein GRP1A
  misc_feature (1)..(72): NCBI GI NO: 30692254 NR Description: glycine-rich RNA-binding protein 8 (GRP8) (CCR1)
  misc_feature (1)..(101): NCBI GI NO: 30681492 NR Description: glycine-rich RNA-binding protein (AtGRP7)
  misc_feature (1)..(100): NCBI GI NO: 544426 NR Description: Glycine-rich RNA-binding protein
  misc_feature (1)..(101): NCBI GI NO: 2119042 NR Description: glycine-rich RNA-binding protein RGP-1a
MRDAIEEMNGKELDGRVITVNEAQSRGSGGGGGGRGGSGGGYRSGGGGGYSGGGGGYERRSGGYGSGGGGGGRGYGGGGRREGGGYGGGDGGSYGGGGGGW

SEQ ID NO: 2003 - protein, 94 aa, Arabidopsis thaliana
  peptide (1)..(94): Ceres Seq. ID no. 12420498
  misc_feature (8)..(93): Pfam Name: Pfam Description:  Herpesvirus large structural phospho protein UL32
  misc_feature (1)..(94): NCBI GI NO: 15235002 NR Description: glycine-rich RNA-binding protein 8
  misc_feature (1)..(94): NCBI GI NO: 544416 NR Description: Glycine-rich RNA-binding protein 10
  misc_feature (1)..(94): NCBI GI NO: 15226605 NR Description: glycine-rich RNA binding protein AtGRP7
  misc_feature (1)..(94): NCBI GI NO: 1346181 NR Description: Glycine-rich RNA-binding protein GRP2A
  misc_feature (1)..(94): NCBI GI NO: 21553354 NR Description: glycine-rich RNA binding protein 7
  misc_feature (1)..(94): NCBI GI NO: 1346180 NR Description: Glycine-rich RNA-binding protein GRP1A
  misc_feature (1)..(65): NCBI GI NO: 30692254 NR Description: glycine-rich RNA-binding protein 8 (GRP8) (CCR1)
  misc_feature (1)..(94): NCBI GI NO: 30681492 NR Description: glycine-rich RNA-binding protein (AtGRP7)
  misc_feature (1)..(93): NCBI GI NO: 544426 NR Description: Glycine-rich RNA-binding protein
  misc_feature (1)..(94): NCBI GI NO: 2119042 NR Description: glycine-rich RNA-binding protein RGP-1a
MNGKELDGRVITVNEAQSRGSGGGGGGRGGSGGGYRSGGGGGYSGGGGGYERRSGGYGSGGGGGGRGYGGGGRREGGGYGGGDGGSYGGGGGGW

SEQ ID NO: 2004 - DNA, 955 bp, Arabidopsis thaliana
  misc_feature (1)..(955): Ceres Seq. ID no. 12688284
aacctcaaaaaatccaaacttgagctttgtattccgacaaaaaaatggcgactgcgtctctagttccgacatctaaaatcttctctgtctctccgaaatcctcagcttcgattaaagcaaggagcagagtagttgttgcatcgtcgcaacaacaacaacaaccaagaaggagagagcttctgctgaaatcggcggtggcgattccggcgattctgcaattgaaggaagctccgatatcagcggcgcgtgaggtggaagttggatcgtacttacctctgtctccgtctgatccttctttcgtcctgtttaaagccaaaccttcagatactcctgctctccgcgcaggaaatgttcagccctatcagtttgttctaccgccgaattggaaacagttgcgaatagccaatattttgtcaggtaattactgtcaaccgaaatgtgcagagccatggatcgaagtgaagtttgagaacgagaagcaaggcaaggttcaagtagttgcatctcctttaatccgcttaaccaacaaaccaaatgcaactattgaagatctcggtgagcctgagaaagtgattgcttctcttggtccttttgtcaccggaaactcttatgactctgatgaacttttgaagacttcaatcgaaaaaattggagatcaaacgtactataagtatgtgttggagacgccatttgcgctcacgggaagtcacaatcttgcaaaagcgacagcaaagggaagcacggttgttttgtttgttgtaagtgctactgaaaagcaatggcagagctcacagaagactcttgaagccattcttgattcttttcaactgtaaatcagagtttttgttatgactctggacttgagaaactaaagagcaaacagtttatgctaaggagtgtctgtgcgtagtaacattaactcattcttttctactgtaaattcgagctatgactc

SEQ ID NO: 2005 - protein, 262 aa, Arabidopsis thaliana
  peptide (1)..(262): Ceres Seq. ID no. 12688285
  misc_feature (1)..(262): NCBI GI NO: 15228983 NR Description: thylakoid lumenal 20 kDa protein
  misc_feature (14)..(206): NCBI GI NO: 34909044 NR Description: P0034E02.35
  misc_feature (227)..(262): NCBI GI NO: 34909044 NR Description: P0034E02.35
  misc_feature (42)..(262): NCBI GI NO: 30699237 NR Description: thylakoid lumenal 29.8 kDa protein
  misc_feature (105)..(262): NCBI GI NO: 8928455 NR Description: Thylakoid lumenal 29
MATASLVPTSKIFSVSPKSSASIKARSRVVVASSQQQQQPRRRELLLKSAVAIPAILQLKEAPISAAREVEVGSYLPLSPSDPSFVLFKAKPSDTPALRAGNVQPYQFVLPPNWKQLRIANILSGNYCQPKCAEPWIEVKFENEKQGKVQVVASPLIRLTNKPNATIEDLGEPEKVIASLGPFVTGNSYDSDELLKTSIEKIGDQTYYKYVLETPFALTGSHNLAKATAKGSTVVLFVVSATEKQWQSSQKTLEAILDSFQL

SEQ ID NO: 2006 - DNA, 1237 bp, Arabidopsis thaliana
  misc_feature (1)..(1237): Ceres Seq. ID no. 13580595
aaatattaacacttactgattgccgagagacgaaagacggaaaatcccaacaataaagagcaaaagatcttacagctcataatatttcgttaattatcaaattgctaataggagaaaaaaatgggtcaagctttgggttgtattcaagttgatcagtcgaatgtagcaatcaaagagacttttgggaagtttgacgaagttcttgagccgggttgtcactgtttgccatggtgtttgggaagtcaagtcgctggtcacctttctttacgtgttcaacagctcgcatgttcgctgcgagacaaagactaaggataatgtgtttgtcacggttgttgcttccattcaataccgtgccttagcggagagtgctcaagatgctttttacaagctcagcaacacaaggaatcagattcaagcttatgtctttgatgtgatccgagcaagtgtacctaagctggatctagactctacctttgagcaaaagaatgacattgcaaaaaccgttgagactgagctcgaaaagggctatgtcgcattacggatatgagattgttcagacactgattgtggatatcgagcctgatgtgcatgtcaagagggcaatgaatgagatcaatgctgcttctagaatgagagaggcagcgagtgagaaagctgaggcagagaaaattctgcagatcaagcgtgctgagggagaagctgaatcgaaatacctttcaggtatgggtatagcccgtcagagacaagccattgtggatggtctgaggaacagcgtactcgccttctctgagtctgttccaggaacatcttccaaagacgtgatggatatggttcttgtgactcagtactttgacacattgaaggaaattggtgcttcttcgaagtcaaactcggtgttcataccgcacggtccaggcgctgttagggacattgcttcacagatcagggatggtcttcttcagggtaactctgctgctgagtagagaaatgtctcaaagtacaaaaaggctttttcagggttttagagttgtgttgctacttgcttactcagtttatcttttagcggtttgctctatatgatgggttcttaaatttcttatcgtttctctcttctaggcttgtggacttgatccattgtcttgttttctggtggtttgtggatagagtttgggcttgaaaaacatccgagttattttgggttttaatgtcattattaatgtttaatacgacagtggtc

SEQ ID NO: 2007 - protein, 165 aa, Arabidopsis thaliana
  peptide (1)..(165): Ceres Seq. ID no. 13580596
  misc_feature (3)..(165): NCBI GI NO: 15222481 NR Description: expressed protein [Arabidopsis thaliana]
  misc_feature (12)..(163): NCBI GI NO: 3928150 NR Description: hypothetical protein [Cicer arietinum]
  misc_feature (12)..(160): NCBI GI NO: 23345042 NR Description: hypersensitive-induced reaction protein 1
  misc_feature (12)..(165): NCBI GI NO: 7716470 NR Description: hypersensitive-induced response protein [Zea mays]
  misc_feature (13)..(164): NCBI GI NO: 18395770 NR Description: expressed protein [Arabidopsis thaliana]
  misc_feature (3)..(162): NCBI GI NO: 28476864 NR Description: hypersensitive-induced reaction protein 2
  misc_feature (3)..(163): NCBI GI NO: 15241939 NR Description: hypersensitive-induced response protein
  misc_feature (3)..(161): NCBI GI NO: 7716466 NR Description: hypersensitive-induced response protein [Zea mays]
  misc_feature (12)..(159): NCBI GI NO: 14150732 NR Description: hypersensitive-induced response protein
  misc_feature (3)..(161): NCBI GI NO: 7716468 NR Description: hypersensitive-induced response protein [Zea mays]
MTLQKPLRLSSKRAMSHYGYEIVQTLIVDIEPDVHVKRAMNEINAASRMREAASEKAEAEKILQIKRAEGEAESKYLSGMGIARQRQAIVDGLRNSVLAFSESVPGTSSKDVMDMVLVTQYFDTLKEIGASSKSNSVFIPHGPGAVRDIASQIRDGLLQGNSAAE

SEQ ID NO: 2008 - protein, 151 aa, Arabidopsis thaliana
  peptide (1)..(151): Ceres Seq. ID no. 13580597
  misc_feature (1)..(151): NCBI GI NO: 15222481 NR Description: expressed protein [Arabidopsis thaliana]
  misc_feature (1)..(149): NCBI GI NO: 3928150 NR Description: hypothetical protein [Cicer arietinum]
  misc_feature (1)..(146): NCBI GI NO: 23345042 NR Description: hypersensitive-induced reaction protein 1
  misc_feature (1)..(151): NCBI GI NO: 7716470 NR Description: hypersensitive-induced response protein [Zea mays]
  misc_feature (1)..(150): NCBI GI NO: 18395770 NR Description: expressed protein [Arabidopsis thaliana]
  misc_feature (1)..(148): NCBI GI NO: 28476864 NR Description: hypersensitive-induced reaction protein 2
  misc_feature (1)..(149): NCBI GI NO: 15241939 NR Description: hypersensitive-induced response protein
  misc_feature (1)..(147): NCBI GI NO: 7716466 NR Description: hypersensitive-induced response protein [Zea mays]
  misc_feature (1)..(145): NCBI GI NO: 14150732 NR Description: hypersensitive-induced response protein
  misc_feature (1)..(147): NCBI GI NO: 7716468 NR Description: hypersensitive-induced response protein [Zea mays]
MSHYGYEIVQTLIVDIEPDVHVKRAMNEINAASRMREAASEKAEAEKILQIKRAEGEAESKYLSGMGIARQRQAIVDGLRNSVLAFSESVPGTSSKDVMDMVLVTQYFDTLKEIGASSKSNSVFIPHGPGAVRDIASQIRDGLLQGNSAAE

SEQ ID NO: 2009 - protein, 126 aa, Arabidopsis thaliana
  peptide (1)..(126): Ceres Seq. ID no. 13580598
  misc_feature (1)..(126): NCBI GI NO: 15222481 NR Description: expressed protein [Arabidopsis thaliana]
  misc_feature (1)..(124): NCBI GI NO: 3928150 NR Description: hypothetical protein [Cicer arietinum]
  misc_feature (1)..(121): NCBI GI NO: 23345042 NR Description: hypersensitive-induced reaction protein 1
  misc_feature (1)..(126): NCBI GI NO: 7716470 NR Description: hypersensitive-induced response protein [Zea mays]
  misc_feature (1)..(125): NCBI GI NO: 18395770 NR Description: expressed protein [Arabidopsis thaliana]
  misc_feature (1)..(123): NCBI GI NO: 28476864 NR Description: hypersensitive-induced reaction protein 2
  misc_feature (1)..(124): NCBI GI NO: 15241939 NR Description: hypersensitive-induced response protein
  misc_feature (1)..(122): NCBI GI NO: 7716466 NR Description: hypersensitive-induced response protein [Zea mays]
  misc_feature (1)..(120): NCBI GI NO: 14150732 NR Description: hypersensitive-induced response protein
  misc_feature (1)..(122): NCBI GI NO: 7716468 NR Description: hypersensitive-induced response protein [Zea mays]
MNEINAASRMREAASEKAEAEKILQIKRAEGEAESKYLSGMGIARQRQAIVDGLRNSVLAFSESVPGTSSKDVMDMVLVTQYFDTLKEIGASSKSNSVFIPHGPGAVRDIASQIRDGLLQGNSAAE

SEQ ID NO: 2010 - DNA, 683 bp, Arabidopsis thaliana
  misc_feature (1)..(683): Ceres Seq. ID no. 12393828
aatacacaaaaccctttcactaataacaatctccaaatggctaaatcatttgcacctctcatcgctgtgttatgcgttttggttctcccacttgcggccatggcggttggaacgccattccacattgaaggaagtgtttactgcgacacttgccgctttggattcgagacaatcgccacccaatatatccgcggggcaagagtgagaatagtatgcaaagacagagtgacactaaaatcggagttggttggggtggcggtgacgggacctgatgggaaatacaaagtcgccgtcagaggagaccgacaggaccagcaatgtctggcggagcttgttcacagtccactgtcccgctgccaagaggctgatcctggcagaagcaccgctaccgtgatcctcacgcgctccaacggagccgcctctactcgtcactacgccaacgccatgggtttcttcagggacgaaccgctccgtggctgcgccgctctccgcaaacgctacctcgcagacggcgataaccgggctatttgagtcatcttatgttcttgatgaaacagaacacaaaaatttatttagagtttttatttatttctattttattgtattgttgagtctctaaagatggtgagactatttagacatatctaagataaaccatataaaataaagtatttgcaacctcc

SEQ ID NO: 2011 - protein, 176 aa, Arabidopsis thaliana
  peptide (1)..(176): Ceres Seq. ID no. 12393829
  misc_feature (42)..(162): Pfam Name: Pfam Description:  Pollen proteins Ole e I family
  misc_feature (13)..(176): NCBI GI NO: 15238066 NR Description: pollen allergen -like protein
  misc_feature (18)..(173): NCBI GI NO: 6561156 NR Description: allergen-like protein BRSn20 [Sambucus nigra]
  misc_feature (16)..(167): NCBI GI NO: 18413144 NR Description: Expressed protein; protein id: At4g08685
  misc_feature (19)..(173): NCBI GI NO: 38347168 NR Description: OSJNBa0039C07.14
  misc_feature (19)..(173): NCBI GI NO: 322854 NR Description: pollen-specific protein - rice
  misc_feature (18)..(172): NCBI GI NO: 15218200 NR Description: allergen, putative; protein id: At1g78040
  misc_feature (14)..(173): NCBI GI NO: 416731 NR Description: Pollen specific protein C13 precursor
  misc_feature (43)..(161): NCBI GI NO: 29836467 NR Description: putative SAH7 protein [Gossypium raimondii]
  misc_feature (43)..(161): NCBI GI NO: 29836465 NR Description: putative SAH7 protein [Gossypium herbaceum]
  misc_feature (13)..(165): NCBI GI NO: 22074346 NR Description: Che a 1 allergen precursor [Chenopodium album]
NTQNPFTNNNLQMAKSFAPLIAVLCVLVLPLAAMAVGTPFHIEGSVYCDTCRFGFETIATQYIRGARVRIVCKDRVTLKSELVGVAVTGPDGKYKVAVRGDRQDQQCLAELVHSPLSRCQEADPGRSTATVILTRSNGAASTRHYANAMGFFRDEPLRGCAALRKRYLADGDNRAI

SEQ ID NO: 2012 - protein, 164 aa, Arabidopsis thaliana
  peptide (1)..(164): Ceres Seq. ID no. 12393830
  misc_feature (30)..(150): Pfam Name: Pfam Description:  Pollen proteins Ole e I family
  misc_feature (1)..(164): NCBI GI NO: 15238066 NR Description: pollen allergen -like protein
  misc_feature (6)..(161): NCBI GI NO: 6561156 NR Description: allergen-like protein BRSn20 [Sambucus nigra]
  misc_feature (4)..(155): NCBI GI NO: 18413144 NR Description: Expressed protein; protein id: At4g08685
  misc_feature (7)..(161): NCBI GI NO: 38347168 NR Description: OSJNBa0039C07.14
  misc_feature (7)..(161): NCBI GI NO: 322854 NR Description: pollen-specific protein - rice
  misc_feature (6)..(160): NCBI GI NO: 15218200 NR Description: allergen, putative; protein id: At1g78040
  misc_feature (2)..(161): NCBI GI NO: 416731 NR Description: Pollen specific protein C13 precursor
  misc_feature (31)..(149): NCBI GI NO: 29836467 NR Description: putative SAH7 protein [Gossypium raimondii]
  misc_feature (31)..(149): NCBI GI NO: 29836465 NR Description: putative SAH7 protein [Gossypium herbaceum]
  misc_feature (1)..(153): NCBI GI NO: 22074346 NR Description: Che a 1 allergen precursor [Chenopodium album]
MAKSFAPLIAVLCVLVLPLAAMAVGTPFHIEGSVYCDTCRFGFETIATQYIRGARVRIVCKDRVTLKSELVGVAVTGPDGKYKVAVRGDRQDQQCLAELVHSPLSRCQEADPGRSTATVILTRSNGAASTRHYANAMGFFRDEPLRGCAALRKRYLADGDNRAI

SEQ ID NO: 2013 - protein, 143 aa, Arabidopsis thaliana
  peptide (1)..(143): Ceres Seq. ID no. 12393831
  misc_feature (9)..(129): Pfam Name: Pfam Description:  Pollen proteins Ole e I family
  misc_feature (1)..(143): NCBI GI NO: 15238066 NR Description: pollen allergen -like protein
  misc_feature (1)..(140): NCBI GI NO: 6561156 NR Description: allergen-like protein BRSn20 [Sambucus nigra]
  misc_feature (1)..(134): NCBI GI NO: 18413144 NR Description: Expressed protein; protein id: At4g08685
  misc_feature (1)..(140): NCBI GI NO: 38347168 NR Description: OSJNBa0039C07.14
  misc_feature (1)..(140): NCBI GI NO: 322854 NR Description: pollen-specific protein - rice
  misc_feature (1)..(139): NCBI GI NO: 15218200 NR Description: allergen, putative; protein id: At1g78040
  misc_feature (1)..(140): NCBI GI NO: 416731 NR Description: Pollen specific protein C13 precursor
  misc_feature (10)..(128): NCBI GI NO: 29836467 NR Description: putative SAH7 protein [Gossypium raimondii]
  misc_feature (10)..(128): NCBI GI NO: 29836465 NR Description: putative SAH7 protein [Gossypium herbaceum]
  misc_feature (1)..(132): NCBI GI NO: 22074346 NR Description: Che a 1 allergen precursor [Chenopodium album]
MAVGTPFHIEGSVYCDTCRFGFETIATQYIRGARVRIVCKDRVTLKSELVGVAVTGPDGKYKVAVRGDRQDQQCLAELVHSPLSRCQEADPGRSTATVILTRSNGAASTRHYANAMGFFRDEPLRGCAALRKRYLADGDNRAI

SEQ ID NO: 2014 - DNA, 1565 bp, Arabidopsis thaliana
  misc_feature (1)..(1565): Ceres Seq. ID no. 13491778
cttcatcatcatcgtattcaccgttgtcctttctttcattgacacttgccagtttacatcgacaaacaaaagaaatcagaatggatttctcagggagcttctttgtcatcttcgttaccttcttctttctccctcctctgtcttcagctgggagctacgattctggttcgggtctcgagtcactcgctcgcgggatgcttcattcagccaaggatcctgagttcttcgagtggatgagaggaattaggagaaagattcatgagaacccagagacagggtttcaggagttcaaaacgagtcaactcgttcgagacgagcttgactcgcttggagtgaagtataagtatcctgtggcgaagactggcgtcgtcgcttggatcggatcctgttcgaaacctgttttcggacttagagccgacatggacgcacttccgttacaggaattagtggaatgggaatcgaaaagtaaagtagatggaaagatgcatgcttgtggtcatgatactcatgttgctatgcttcttggtgctgctaagcttcttcaaaccacaaaacacctcatcaaggggacagtaaaacttgtgtttcaaccaggcgaggaaggttatgcaggtgcttatgaaatgctaaaagacgagattctagacgacttagatgggatactcagtgttcatgtctttccatcgatcccatcaggtggtattggttctaggcctgggaccgttcttgcaggtgcaggattgtttacagtcacggttcacggtcaaggtagccacgcagctacaccgcacttctctaaagacccggttcttgcagcttcttccgctgttgttgccttgcaacagattgtttcgcgggaactggatccactcgaagctggtgtggttacagttggatatattgaaggaggtcatgctcaaaacgtaataccgcagagtgcgaaatttggaggtactttcagaagcttaagcaacgatgggcttctatttatccaaagacggatcaaagagatttcagaggcacaagcatcggtataccgatgcaaagcagaagtaaacttcgaagagaaaaagccgtcgcttcacccggtaatgaataacgacgagggcttatacgagcacggtaaaaaagtagcggaagcgatgattggaaagaataacttccatgatttcccggtgacaatgggaggagaggatttcagcttcttcactcaaaagactaaggctgcgattttcgtgctgggggtaaagaatgagacgctaggcgctggtaagccgcttcactcgccttacttctttgttgatgaagaagctcttcctgttggggctgctcttcacgcagctatggccgtttcttatttggacgaacatggtcatagccatgaagaagaggttaagagtgaattatagaaggtgttgggagaaaatcagcttatattagtcatcatctatttgtatttgaacttgaaagttaggtgaggttaggtttcgggttgggaagaatgtttgttaatagtcacgagaaaccaaccacttctattaaaataaatttgatgtaagagtttt

SEQ ID NO: 2015 - protein, 468 aa, Arabidopsis thaliana
  peptide (1)..(468): Ceres Seq. ID no. 13491779
  misc_feature (75)..(452): Pfam Name: Pfam Description:  Peptidase family M20/M25/M40
  misc_feature (27)..(468): NCBI GI NO: 15233011 NR Description: IAA-amino acid hydrolase 1 (ILR1)
  misc_feature (27)..(468): NCBI GI NO: 21554648 NR Description: IAA-amino acid hydrolase (ILR1)
  misc_feature (27)..(468): NCBI GI NO: 887785 NR Description: ILR1
  misc_feature (27)..(468): NCBI GI NO: 18129692 NR Description: IAA amidohydrolase [Arabidopsis suecica]
  misc_feature (38)..(456): NCBI GI NO: 34900782 NR Description: putative IAA amidohydrolase
  misc_feature (54)..(456): NCBI GI NO: 28376718 NR Description: putative  IAA amidohydrolase
  misc_feature (49)..(456): NCBI GI NO: 34900780 NR Description: putative IAA amidohydrolase
  misc_feature (60)..(456): NCBI GI NO: 28376716 NR Description: putative  IAA amidohydrolase
  misc_feature (36)..(459): NCBI GI NO: 34900784 NR Description: IAA amidohydrolase-like protein~contains ESTsAU057861
  misc_feature (47)..(462): NCBI GI NO: 34910396 NR Description: putative IAA-Ala hydrolase
SSSSYSPLSFLSLTLASLHRQTKEIRMDFSGSFFVIFVTFFFLPPLSSAGSYDSGSGLESLARGMLHSAKDPEFFEWMRGIRRKIHENPETGFQEFKTSQLVRDELDSLGVKYKYPVAKTGVVAWIGSCSKPVFGLRADMDALPLQELVEWESKSKVDGKMHACGHDTHVAMLLGAAKLLQTTKHLIKGTVKLVFQPGEEGYAGAYEMLKDEILDDLDGILSVHVFPSIPSGGIGSRPGTVLAGAGLFTVTVHGQGSHAATPHFSKDPVLAASSAVVALQQIVSRELDPLEAGVVTVGYIEGGHAQNVIPQSAKFGGTFRSLSNDGLLFIQRRIKEISEAQASVYRCKAEVNFEEKKPSLHPVMNNDEGLYEHGKKVAEAMIGKNNFHDFPVTMGGEDFSFFTQKTKAAIFVLGVKNETLGAGKPLHSPYFFVDEEALPVGAALHAAMAVSYLDEHGHSHEEEVKSEL

SEQ ID NO: 2016 - protein, 442 aa, Arabidopsis thaliana
  peptide (1)..(442): Ceres Seq. ID no. 13491780
  misc_feature (49)..(426): Pfam Name: Pfam Description:  Peptidase family M20/M25/M40
  misc_feature (1)..(442): NCBI GI NO: 15233011 NR Description: IAA-amino acid hydrolase 1 (ILR1)
  misc_feature (1)..(442): NCBI GI NO: 21554648 NR Description: IAA-amino acid hydrolase (ILR1)
  misc_feature (1)..(442): NCBI GI NO: 887785 NR Description: ILR1
  misc_feature (1)..(442): NCBI GI NO: 18129692 NR Description: IAA amidohydrolase [Arabidopsis suecica]
  misc_feature (12)..(430): NCBI GI NO: 34900782 NR Description: putative IAA amidohydrolase
  misc_feature (28)..(430): NCBI GI NO: 28376718 NR Description: putative  IAA amidohydrolase
  misc_feature (23)..(430): NCBI GI NO: 34900780 NR Description: putative IAA amidohydrolase
  misc_feature (34)..(430): NCBI GI NO: 28376716 NR Description: putative  IAA amidohydrolase
  misc_feature (10)..(433): NCBI GI NO: 34900784 NR Description: IAA amidohydrolase-like protein~contains ESTsAU057861
  misc_feature (21)..(436): NCBI GI NO: 34910396 NR Description: putative IAA-Ala hydrolase
MDFSGSFFVIFVTFFFLPPLSSAGSYDSGSGLESLARGMLHSAKDPEFFEWMRGIRRKIHENPETGFQEFKTSQLVRDELDSLGVKYKYPVAKTGVVAWIGSCSKPVFGLRADMDALPLQELVEWESKSKVDGKMHACGHDTHVAMLLGAAKLLQTTKHLIKGTVKLVFQPGEEGYAGAYEMLKDEILDDLDGILSVHVFPSIPSGGIGSRPGTVLAGAGLFTVTVHGQGSHAATPHFSKDPVLAASSAVVALQQIVSRELDPLEAGVVTVGYIEGGHAQNVIPQSAKFGGTFRSLSNDGLLFIQRRIKEISEAQASVYRCKAEVNFEEKKPSLHPVMNNDEGLYEHGKKVAEAMIGKNNFHDFPVTMGGEDFSFFTQKTKAAIFVLGVKNETLGAGKPLHSPYFFVDEEALPVGAALHAAMAVSYLDEHGHSHEEEVKSEL

SEQ ID NO: 2017 - protein, 404 aa, Arabidopsis thaliana
  peptide (1)..(404): Ceres Seq. ID no. 13491781
  misc_feature (11)..(388): Pfam Name: Pfam Description:  Peptidase family M20/M25/M40
  misc_feature (1)..(404): NCBI GI NO: 15233011 NR Description: IAA-amino acid hydrolase 1 (ILR1)
  misc_feature (1)..(404): NCBI GI NO: 21554648 NR Description: IAA-amino acid hydrolase (ILR1)
  misc_feature (1)..(404): NCBI GI NO: 887785 NR Description: ILR1
  misc_feature (1)..(404): NCBI GI NO: 18129692 NR Description: IAA amidohydrolase [Arabidopsis suecica]
  misc_feature (1)..(392): NCBI GI NO: 34900782 NR Description: putative IAA amidohydrolase
  misc_feature (1)..(392): NCBI GI NO: 28376718 NR Description: putative  IAA amidohydrolase
  misc_feature (1)..(392): NCBI GI NO: 34900780 NR Description: putative IAA amidohydrolase
  misc_feature (1)..(392): NCBI GI NO: 28376716 NR Description: putative  IAA amidohydrolase
  misc_feature (1)..(395): NCBI GI NO: 34900784 NR Description: IAA amidohydrolase-like protein~contains ESTsAU057861
  misc_feature (1)..(398): NCBI GI NO: 34910396 NR Description: putative IAA-Ala hydrolase
MLHSAKDPEFFEWMRGIRRKIHENPETGFQEFKTSQLVRDELDSLGVKYKYPVAKTGVVAWIGSCSKPVFGLRADMDALPLQELVEWESKSKVDGKMHACGHDTHVAMLLGAAKLLQTTKHLIKGTVKLVFQPGEEGYAGAYEMLKDEILDDLDGILSVHVFPSIPSGGIGSRPGTVLAGAGLFTVTVHGQGSHAATPHFSKDPVLAASSAVVALQQIVSRELDPLEAGVVTVGYIEGGHAQNVIPQSAKFGGTFRSLSNDGLLFIQRRIKEISEAQASVYRCKAEVNFEEKKPSLHPVMNNDEGLYEHGKKVAEAMIGKNNFHDFPVTMGGEDFSFFTQKTKAAIFVLGVKNETLGAGKPLHSPYFFVDEEALPVGAALHAAMAVSYLDEHGHSHEEEVKSEL

SEQ ID NO: 2018 - DNA, 1977 bp, Arabidopsis thaliana
  misc_feature (1)..(1977): Ceres Seq. ID no. 12604873
atgacgtcatcactacctgttcgagctccttcctgggtctcttcccggagaattttcgaagagagactccaagaccttcccaaatgcgctaatctaaaccaagtgaaacagcttcacgctcagataatccgacgaaaccttcatgaagatctacacatagcaccgaagctaatctctgctctttctctctgtcgtcaaacgaatttagctgttagggtttttaatcaggttcaagaaccaaatgttcatctttgcaattctctgattagagctcatgcccagaactctcagccttatcaagctttcttcgttttctcagagatgcaaagatttggtctttttgctgataatttcacttacccgtttcttcttaaagcttgttctggtcaatcatggttacctgtggtgaagatgatgcataatcatatagaaaaattggggctttcttctgatatttatgtacccaatgctctcattgattgttattctagatgtggtggtttgggtgttagagatgctatgaagttgtttgagaagatgagtgaaagagatactgtgtcttggaattcgatgcttggtgggttagtgaaagctggggaattgagagatgcacggagactgttcgatgaaatgcctcagagggatttgattagttggaatactatgttggatggttatgctaggtgtagagagatgagtaaagcgtttgagttgtttgagaagatgcctgagagaaatactgtgtcttggtcgacgatggttatgggttatagtaaagctggggatatggaaatggctagagttatgtttgataaaatgccattgcctgctaaaaatgttgtcacttggacgataattattgctgggtatgcggagaaggggcttttgaaggaggctgatagattagttgaccaaatggtggcttcaggattgaaatttgatgctgcggctgtgattagtatcttggctgcttgtactgagtctggtttgctcagtttaggaatgaggattcactccatactgaaaaggtctaatctcggttcgaatgcttatgtgttgaatgcactacttgatatgtatgcaaaatgtggtaacctaaagaaagcgtttgatgtgtttaacgatatacccaagaaggatctcgtgtcttggaacactatgcttcatggtcttggcgttcatggccacggaaaggaagcaatcgagcttttttcgagaatgagaagggaagggattcggcctgataaagtcacgtttattgctgttttgtgttcctgtaatcacgcgggtctcattgatgaaggaatagattacttctactcaatggagaaagtatatgatcttgttccacaagttgaacactatggttgtcttgttgacctattaggtcgagtagggcggttaaaggaagcgataaaggttgtccaaacaatgccaatggagcccaatgttgttatttggggtgctcttcttggagcgtgcaggatgcataacgaggtggatattgctaaggaagttctggataatctggttaaattagacccttgtgatcctggaaactattcgcttctgtcaaatatttatgcagcagcagaggattgggaaggagttgctgacataagatcaaagatgaagagtatgggagtagagaaaccatctggagctagttcggttgaattggaggatgggatacatgaatttacagtgttcgacaaatcacacccaaaatctgatcaaatatatcagatgcttggtagtttaattgaacctccagatcctggtgagctggttgctgttcgataatctgcttagtttatgtccagatcattaggtattatatcgattataggctgtgagcatcagcactgtggcctaggccaaaaatttgtagttcattttccaaaggaacacaaagatggttttatccttgtaacgagttcgagtactgtatatagagcataatttataaatcttgag

SEQ ID NO: 2019 - protein, 600 aa, Arabidopsis thaliana
  peptide (1)..(600): Ceres Seq. ID no. 12604874
  misc_feature (217)..(251): Pfam Name: Pfam Description:  PPR repeat
  misc_feature (23)..(587): NCBI GI NO: 34906932 NR Description: selenium-binding protein-like
  misc_feature (23)..(556): NCBI GI NO: 15240281 NR Description: putative protein; protein id: At5g37570.1
  misc_feature (88)..(587): NCBI GI NO: 15222280 NR Description: hypothetical protein; protein id: At1g13410.1
  misc_feature (32)..(587): NCBI GI NO: 15231970 NR Description: unknown protein; protein id: At3g08820.1
  misc_feature (42)..(588): NCBI GI NO: 15225365 NR Description: hypothetical protein; protein id: At2g44880.1
  misc_feature (73)..(587): NCBI GI NO: 15235498 NR Description: hypothetical protein; protein id: At4g02750.1
  misc_feature (34)..(580): NCBI GI NO: 11994419 NR Description: selenium-binding protein-like
  misc_feature (34)..(580): NCBI GI NO: 15230593 NR Description: unknown protein; protein id: At3g12770.1
  misc_feature (84)..(559): NCBI GI NO: 34906898 NR Description: P0470A12.29
  misc_feature (151)..(587): NCBI GI NO: 22328738 NR Description: similar to putative selenium-binding protein
MTSSLPVRAPSWVSSRRIFEERLQDLPKCANLNQVKQLHAQIIRRNLHEDLHIAPKLISALSLCRQTNLAVRVFNQVQEPNVHLCNSLIRAHAQNSQPYQAFFVFSEMQRFGLFADNFTYPFLLKACSGQSWLPVVKMMHNHIEKLGLSSDIYVPNALIDCYSRCGGLGVRDAMKLFEKMSERDTVSWNSMLGGLVKAGELRDARRLFDEMPQRDLISWNTMLDGYARCREMSKAFELFEKMPERNTVSWSTMVMGYSKAGDMEMARVMFDKMPLPAKNVVTWTIIIAGYAEKGLLKEADRLVDQMVASGLKFDAAAVISILAACTESGLLSLGMRIHSILKRSNLGSNAYVLNALLDMYAKCGNLKKAFDVFNDIPKKDLVSWNTMLHGLGVHGHGKEAIELFSRMRREGIRPDKVTFIAVLCSCNHAGLIDEGIDYFYSMEKVYDLVPQVEHYGCLVDLLGRVGRLKEAIKVVQTMPMEPNVVIWGALLGACRMHNEVDIAKEVLDNLVKLDPCDPGNYSLLSNIYAAAEDWEGVADIRSKMKSMGVEKPSGASSVELEDGIHEFTVFDKSHPKSDQIYQMLGSLIEPPDPGELVAVR

SEQ ID NO: 2020 - protein, 493 aa, Arabidopsis thaliana
  peptide (1)..(493): Ceres Seq. ID no. 12604875
  misc_feature (110)..(144): Pfam Name: Pfam Description:  PPR repeat
  misc_feature (1)..(480): NCBI GI NO: 34906932 NR Description: selenium-binding protein-like
  misc_feature (1)..(449): NCBI GI NO: 15240281 NR Description: putative protein; protein id: At5g37570.1
  misc_feature (1)..(480): NCBI GI NO: 15222280 NR Description: hypothetical protein; protein id: At1g13410.1
  misc_feature (1)..(480): NCBI GI NO: 15231970 NR Description: unknown protein; protein id: At3g08820.1
  misc_feature (1)..(481): NCBI GI NO: 15225365 NR Description: hypothetical protein; protein id: At2g44880.1
  misc_feature (1)..(480): NCBI GI NO: 15235498 NR Description: hypothetical protein; protein id: At4g02750.1
  misc_feature (1)..(473): NCBI GI NO: 11994419 NR Description: selenium-binding protein-like
  misc_feature (1)..(473): NCBI GI NO: 15230593 NR Description: unknown protein; protein id: At3g12770.1
  misc_feature (1)..(452): NCBI GI NO: 34906898 NR Description: P0470A12.29
  misc_feature (44)..(480): NCBI GI NO: 22328738 NR Description: similar to putative selenium-binding protein
MQRFGLFADNFTYPFLLKACSGQSWLPVVKMMHNHIEKLGLSSDIYVPNALIDCYSRCGGLGVRDAMKLFEKMSERDTVSWNSMLGGLVKAGELRDARRLFDEMPQRDLISWNTMLDGYARCREMSKAFELFEKMPERNTVSWSTMVMGYSKAGDMEMARVMFDKMPLPAKNVVTWTIIIAGYAEKGLLKEADRLVDQMVASGLKFDAAAVISILAACTESGLLSLGMRIHSILKRSNLGSNAYVLNALLDMYAKCGNLKKAFDVFNDIPKKDLVSWNTMLHGLGVHGHGKEAIELFSRMRREGIRPDKVTFIAVLCSCNHAGLIDEGIDYFYSMEKVYDLVPQVEHYGCLVDLLGRVGRLKEAIKVVQTMPMEPNVVIWGALLGACRMHNEVDIAKEVLDNLVKLDPCDPGNYSLLSNIYAAAEDWEGVADIRSKMKSMGVEKPSGASSVELEDGIHEFTVFDKSHPKSDQIYQMLGSLIEPPDPGELVAVR

SEQ ID NO: 2021 - protein, 463 aa, Arabidopsis thaliana
  peptide (1)..(463): Ceres Seq. ID no. 12604876
  misc_feature (80)..(114): Pfam Name: Pfam Description:  PPR repeat
  misc_feature (1)..(450): NCBI GI NO: 34906932 NR Description: selenium-binding protein-like
  misc_feature (1)..(419): NCBI GI NO: 15240281 NR Description: putative protein; protein id: At5g37570.1
  misc_feature (1)..(450): NCBI GI NO: 15222280 NR Description: hypothetical protein; protein id: At1g13410.1
  misc_feature (1)..(450): NCBI GI NO: 15231970 NR Description: unknown protein; protein id: At3g08820.1
  misc_feature (1)..(451): NCBI GI NO: 15225365 NR Description: hypothetical protein; protein id: At2g44880.1
  misc_feature (1)..(450): NCBI GI NO: 15235498 NR Description: hypothetical protein; protein id: At4g02750.1
  misc_feature (1)..(443): NCBI GI NO: 11994419 NR Description: selenium-binding protein-like
  misc_feature (1)..(443): NCBI GI NO: 15230593 NR Description: unknown protein; protein id: At3g12770.1
  misc_feature (1)..(422): NCBI GI NO: 34906898 NR Description: P0470A12.29
  misc_feature (14)..(450): NCBI GI NO: 22328738 NR Description: similar to putative selenium-binding protein
MMHNHIEKLGLSSDIYVPNALIDCYSRCGGLGVRDAMKLFEKMSERDTVSWNSMLGGLVKAGELRDARRLFDEMPQRDLISWNTMLDGYARCREMSKAFELFEKMPERNTVSWSTMVMGYSKAGDMEMARVMFDKMPLPAKNVVTWTIIIAGYAEKGLLKEADRLVDQMVASGLKFDAAAVISILAACTESGLLSLGMRIHSILKRSNLGSNAYVLNALLDMYAKCGNLKKAFDVFNDIPKKDLVSWNTMLHGLGVHGHGKEAIELFSRMRREGIRPDKVTFIAVLCSCNHAGLIDEGIDYFYSMEKVYDLVPQVEHYGCLVDLLGRVGRLKEAIKVVQTMPMEPNVVIWGALLGACRMHNEVDIAKEVLDNLVKLDPCDPGNYSLLSNIYAAAEDWEGVADIRSKMKSMGVEKPSGASSVELEDGIHEFTVFDKSHPKSDQIYQMLGSLIEPPDPGELVAVR

SEQ ID NO: 2022 - DNA, 561 bp, Arabidopsis thaliana
  misc_feature (1)..(561): Ceres Seq. ID no. 12393836
aaaaacacagaacaacggaaaaggcaaatcgggatcagccaccggcgatgaaggaagacatggataagatggtggcggtagggctcgtatggggagccaccaatgctctgatccgtcgtggcgctcttgcctgggataaaacaaagtcttcttcgacaacagaatctcattctcctcctcttcagatccgccgcaaaatcatgattgctctccgcgactggatcaatctcctcctcttctggcaatactcaattcctttcctcataaacctctccgcctccgccacattcttcgcccttctcagtcacgctcccatctctcttgccgttccggtgactaacgccacaacctttgccgcaaccgccgcttttgggatccttttaggggaagaaactcaaatcggacttgctttgttaggtacgagctttattgtatttggaatttggctttgtgttctgtgaaattcgaattttgtaaaaccgtgactctgtttctgtgagatctattttgccaaagaactatttgtgtaccatcttttgagaattttagctaactctctgc

SEQ ID NO: 2023 - protein, 152 aa, Arabidopsis thaliana
  peptide (1)..(152): Ceres Seq. ID no. 12393837
  misc_feature (16)..(152): NCBI GI NO: 15239774 NR Description: putative protein; protein id: At5g19570
  misc_feature (23)..(151): NCBI GI NO: 28829061 NR Description: similar to putative protein; protein id: At5g19570
  misc_feature (22)..(151): NCBI GI NO: 24652124 NR Description: CG12929-PA [Drosophila melanogaster]
  misc_feature (23)..(151): NCBI GI NO: 13436137 NR Description: Similar to RIKEN cDNA 4933407D05 gene
  misc_feature (23)..(151): NCBI GI NO: 21361814 NR Description: hypothetical protein RP4-622L5 [Homo sapiens]
KHRTTEKANRDQPPAMKEDMDKMVAVGLVWGATNALIRRGALAWDKTKSSSTTESHSPPLQIRRKIMIALRDWINLLLFWQYSIPFLINLSASATFFALLSHAPISLAVPVTNATTFAATAAFGILLGEETQIGLALLGTSFIVFGIWLCVL

SEQ ID NO: 2024 - protein, 137 aa, Arabidopsis thaliana
  peptide (1)..(137): Ceres Seq. ID no. 12393838
  misc_feature (1)..(137): NCBI GI NO: 15239774 NR Description: putative protein; protein id: At5g19570
  misc_feature (8)..(136): NCBI GI NO: 28829061 NR Description: similar to putative protein; protein id: At5g19570
  misc_feature (7)..(136): NCBI GI NO: 24652124 NR Description: CG12929-PA [Drosophila melanogaster]
  misc_feature (8)..(136): NCBI GI NO: 13436137 NR Description: Similar to RIKEN cDNA 4933407D05 gene
  misc_feature (8)..(136): NCBI GI NO: 21361814 NR Description: hypothetical protein RP4-622L5 [Homo sapiens]
MKEDMDKMVAVGLVWGATNALIRRGALAWDKTKSSSTTESHSPPLQIRRKIMIALRDWINLLLFWQYSIPFLINLSASATFFALLSHAPISLAVPVTNATTFAATAAFGILLGEETQIGLALLGTSFIVFGIWLCVL

SEQ ID NO: 2025 - protein, 133 aa, Arabidopsis thaliana
  peptide (1)..(133): Ceres Seq. ID no. 12393839
  misc_feature (1)..(133): NCBI GI NO: 15239774 NR Description: putative protein; protein id: At5g19570
  misc_feature (4)..(132): NCBI GI NO: 28829061 NR Description: similar to putative protein; protein id: At5g19570
  misc_feature (3)..(132): NCBI GI NO: 24652124 NR Description: CG12929-PA [Drosophila melanogaster]
  misc_feature (4)..(132): NCBI GI NO: 13436137 NR Description: Similar to RIKEN cDNA 4933407D05 gene
  misc_feature (4)..(132): NCBI GI NO: 21361814 NR Description: hypothetical protein RP4-622L5 [Homo sapiens]
MDKMVAVGLVWGATNALIRRGALAWDKTKSSSTTESHSPPLQIRRKIMIALRDWINLLLFWQYSIPFLINLSASATFFALLSHAPISLAVPVTNATTFAATAAFGILLGEETQIGLALLGTSFIVFGIWLCVL

SEQ ID NO: 2026 - DNA, 1883 bp, Arabidopsis thaliana
  misc_feature (1)..(1883): Ceres Seq. ID no. 13503035
aagaagtcgttctgatttcgtctttcttctctgtaaagtcgtttctctctccaatttttttgttttcctgcgaaaatcaaagagactaacacagagagcttattcaattttctttcgatctgtgaaatctcagattttgatttggaaagttgtggagatttcagctgttcttctttgttgttgggtctatttctgggtttcttcgagctgatttatagagtttggttctccgatgatagagctaatctgcttgagatagctactgtattgagagttcttctgaggatctttatttttctttacatcttgtgaggaaaatgtctgcgaagatcaaaggagagtattcttctagaagcttcgtatcgagaaaatggacgatattactctgcttaggaagcttctgcgtcggaatgttcttcaccaatcggatgtggaatattccggaatctaaaggcatgtctcatccatctgtaaccgaagctgagagattgaagctggtctctgaaggctgcaatccaaaagctaaagaagtcaaaagagatcctcaggctttgtttggagaagtagccaatacacatattgcattacagacattggataagaccatttcaagcttagagatggagttagctgcagcaaggtcagttcaggaatctttacaaaacggtgctcctttatcagatgatatggggaagaagcaacctcaggaacagagacggtttttgatggtcgttgggattaatacagcttttagtagcagaaagagaagagattctattcgagcaacttggatgcctcaaggtgaaaaaaggaagagactagaagaggagaaggggattatcatccggtttgtcattggtcacagtgccacgaccgggggaattctagatcgagctatagaagctgaggacaggaagcatggagatttcttgagactggaccatgttgaagggtacctagagttgtcaggcaagacgaaaacttacttttctacagcattttcgatgtgggatgcagatttctatgtcaaagtagatgatgatgttcatgtcaatatagcaactcttggggaaactcttgttagacaccggaaaaaaccacgggtctatattggttgcatgaaatctggccctgtcctctctcaaaaaggggtgaggtaccatgagccagagtactggaagtttggtgaaaatgggaacaaatacttccgtcatgctactggacagttatacgccatttcaagggacttggcttcttatatatcaatcaatcagcatgttcttcacaagtatgcgaacgaagatgtttcgctaggagcttggtttatcgggattgatgttaaacacattgatgatagaagattatgctgcggaactcctcctgattgcgaatggaaagcacaagctggaaacatctgtgtagcatcattcgactggagctgcagcggaatctgcagatccgcagatcgcatcaaagaggttcatagacgttgcggtgaaggtgaaaaggctctttggagtgccacgttttgacatataaacagaggaatggtaaaaacataacggttttgctcagcccccaaaaacagctcaaagatcagaggaaggtcgtccagatatacaattccaagagatatccacttttgtattcataggtacatagaatagaagaggcaggaaggattagagataagtgtgaaaacctctggcaagaatcgcaattgcgtattgtgattgtggcgtttccattttggtataaggaaactgaacactacagtgaacacccctgctgctttgttcgttttgggtggcttgaaaatgaagcaacttgtggatttttacatcaaatacaaaacactatgccctgattcttttggatccata

SEQ ID NO: 2027 - protein, 404 aa, Arabidopsis thaliana
  peptide (1)..(404): Ceres Seq. ID no. 13503036
  misc_feature (149)..(347): Pfam Name: Pfam Description:  Galactosyltransferase
  misc_feature (1)..(404): NCBI GI NO: 15220440 NR Description: galactosyltransferase family
  misc_feature (1)..(404): NCBI GI NO: 15225684 NR Description: galactosyltransferase family
  misc_feature (10)..(404): NCBI GI NO: 18416895 NR Description: galactosyltransferase family
  misc_feature (10)..(404): NCBI GI NO: 7485336 NR Description: hypothetical protein F10M23
  misc_feature (93)..(402): NCBI GI NO: 15221085 NR Description: galactosyltransferase family
  misc_feature (1)..(128): NCBI GI NO: 15221085 NR Description: galactosyltransferase family
  misc_feature (5)..(404): NCBI GI NO: 4138265 NR Description: Avr9 elicitor response protein [Nicotiana tabacum]
  misc_feature (7)..(404): NCBI GI NO: 15223337 NR Description: galactosyltransferase family
  misc_feature (11)..(401): NCBI GI NO: 12323294 NR Description: putative
  misc_feature (11)..(401): NCBI GI NO: 30699558 NR Description: Avr9 elicitor response protein -related
MSAKIKGEYSSRSFVSRKWTILLCLGSFCVGMFFTNRMWNIPESKGMSHPSVTEAERLKLVSEGCNPKAKEVKRDPQALFGEVANTHIALQTLDKTISSLEMELAAARSVQESLQNGAPLSDDMGKKQPQEQRRFLMVVGINTAFSSRKRRDSIRATWMPQGEKRKRLEEEKGIIIRFVIGHSATTGGILDRAIEAEDRKHGDFLRLDHVEGYLELSGKTKTYFSTAFSMWDADFYVKVDDDVHVNIATLGETLVRHRKKPRVYIGCMKSGPVLSQKGVRYHEPEYWKFGENGNKYFRHATGQLYAISRDLASYISINQHVLHKYANEDVSLGAWFIGIDVKHIDDRRLCCGTPPDCEWKAQAGNICVASFDWSCSGICRSADRIKEVHRRCGEGEKALWSATF

SEQ ID NO: 2028 - protein, 373 aa, Arabidopsis thaliana
  peptide (1)..(373): Ceres Seq. ID no. 13503037
  misc_feature (118)..(316): Pfam Name: Pfam Description:  Galactosyltransferase
  misc_feature (1)..(373): NCBI GI NO: 15220440 NR Description: galactosyltransferase family
  misc_feature (1)..(373): NCBI GI NO: 15225684 NR Description: galactosyltransferase family
  misc_feature (1)..(373): NCBI GI NO: 18416895 NR Description: galactosyltransferase family
  misc_feature (1)..(373): NCBI GI NO: 7485336 NR Description: hypothetical protein F10M23
  misc_feature (62)..(371): NCBI GI NO: 15221085 NR Description: galactosyltransferase family
  misc_feature (1)..(97): NCBI GI NO: 15221085 NR Description: galactosyltransferase family
  misc_feature (1)..(373): NCBI GI NO: 4138265 NR Description: Avr9 elicitor response protein [Nicotiana tabacum]
  misc_feature (1)..(373): NCBI GI NO: 15223337 NR Description: galactosyltransferase family
  misc_feature (1)..(370): NCBI GI NO: 12323294 NR Description: putative
  misc_feature (1)..(370): NCBI GI NO: 30699558 NR Description: Avr9 elicitor response protein -related
MFFTNRMWNIPESKGMSHPSVTEAERLKLVSEGCNPKAKEVKRDPQALFGEVANTHIALQTLDKTISSLEMELAAARSVQESLQNGAPLSDDMGKKQPQEQRRFLMVVGINTAFSSRKRRDSIRATWMPQGEKRKRLEEEKGIIIRFVIGHSATTGGILDRAIEAEDRKHGDFLRLDHVEGYLELSGKTKTYFSTAFSMWDADFYVKVDDDVHVNIATLGETLVRHRKKPRVYIGCMKSGPVLSQKGVRYHEPEYWKFGENGNKYFRHATGQLYAISRDLASYISINQHVLHKYANEDVSLGAWFIGIDVKHIDDRRLCCGTPPDCEWKAQAGNICVASFDWSCSGICRSADRIKEVHRRCGEGEKALWSATF

SEQ ID NO: 2029 - protein, 367 aa, Arabidopsis thaliana
  peptide (1)..(367): Ceres Seq. ID no. 13503038
  misc_feature (112)..(310): Pfam Name: Pfam Description:  Galactosyltransferase
  misc_feature (1)..(367): NCBI GI NO: 15220440 NR Description: galactosyltransferase family
  misc_feature (1)..(367): NCBI GI NO: 15225684 NR Description: galactosyltransferase family
  misc_feature (1)..(367): NCBI GI NO: 18416895 NR Description: galactosyltransferase family
  misc_feature (1)..(367): NCBI GI NO: 7485336 NR Description: hypothetical protein F10M23
  misc_feature (56)..(365): NCBI GI NO: 15221085 NR Description: galactosyltransferase family
  misc_feature (1)..(91): NCBI GI NO: 15221085 NR Description: galactosyltransferase family
  misc_feature (1)..(367): NCBI GI NO: 4138265 NR Description: Avr9 elicitor response protein [Nicotiana tabacum]
  misc_feature (1)..(367): NCBI GI NO: 15223337 NR Description: galactosyltransferase family
  misc_feature (1)..(364): NCBI GI NO: 12323294 NR Description: putative
  misc_feature (1)..(364): NCBI GI NO: 30699558 NR Description: Avr9 elicitor response protein -related
MWNIPESKGMSHPSVTEAERLKLVSEGCNPKAKEVKRDPQALFGEVANTHIALQTLDKTISSLEMELAAARSVQESLQNGAPLSDDMGKKQPQEQRRFLMVVGINTAFSSRKRRDSIRATWMPQGEKRKRLEEEKGIIIRFVIGHSATTGGILDRAIEAEDRKHGDFLRLDHVEGYLELSGKTKTYFSTAFSMWDADFYVKVDDDVHVNIATLGETLVRHRKKPRVYIGCMKSGPVLSQKGVRYHEPEYWKFGENGNKYFRHATGQLYAISRDLASYISINQHVLHKYANEDVSLGAWFIGIDVKHIDDRRLCCGTPPDCEWKAQAGNICVASFDWSCSGICRSADRIKEVHRRCGEGEKALWSATF

SEQ ID NO: 2030 - DNA, 1275 bp, Arabidopsis thaliana
  misc_feature (1)..(1275): Ceres Seq. ID no. 13575189
aaactattacttaaataataaaaaaataagagccatcgtgacttcgagagaagaagccagcaaggaacgatggagattattacggcatcatcatcatcatcatcatcatttggaaattaggcttgttgtttgatttcgctacgagaaaatggacaagtacgagcttgttaaagacatcggtgctgggaattttggagtggcgaggctcatgagagtcaaaaactccaaggaactcgttgctatgaagtacatcgagcgtggacctaagattgatgagaacgtggcgagagagattattaaccacagatcacttcgtcatcccaatattatccggtttaaggaggtggttttgacaccaacgcacatcgccattgctatggaatatgctgctggcggtgagctatttgagcgtatatgtagcgctggaagattcagtgaggatgaggcaagatactttttccagcagcttatctcaggagtcagctattgtcatgctatgcaaatatgccacagagatctgaagcttgaaaataccctcttagatggaagtcctgctccacgcctgaagatctgtgattttggttattccaagtcctcactgttgcactctatgcccaaatcaactgttggaactccagcatatattgcacctgaggttctttctcgcggagagtatgatggcaagatggctgatgtatggtcttgtggtgtgactctttatgtcatgctggtgggagcatacccatttgaagaccaagaggatcccaaaaacttcaaaaaaacaatacaaagaataatggctgtcaagtacaagatcccggactatgtccatatctcacaagattgcaaacatctcctctcccgtatatttgtcaccaactcgaataagaggattacgataggtgacatcaagaaacatccatggttcctaaagaacctgccaagggaacttacagaaatagctcaagctgcatacttcaggaaagagaacccgacattctcactccaaagcgtcgaagagataatgaagattgtggaagaggcaaaaactccagctcgtgtttctcggtcgattggagcatttgggtggggaggaggagaagatgccgagggcaaggaggaagatgcagaggaagaagttgaggaagtagaagaagaagaagacgaagaagatgagtatgataagacggtgaagcaagtgcatgctagcatgggagaagtccgagtcagttaaaaaaaaagattgattttcttttcacgaaagtattctaaaac

SEQ ID NO: 2031 - protein, 361 aa, Arabidopsis thaliana
  peptide (1)..(361): Ceres Seq. ID no. 13575190
  misc_feature (4)..(260): Pfam Name: Pfam Description:  Protein kinase domain
  misc_feature (1)..(361): NCBI GI NO: 15219836 NR Description: serine/threonine protein kinase, putative
  misc_feature (1)..(361): NCBI GI NO: 21618062 NR Description: putative serine/threonine-protein kinase
  misc_feature (1)..(361): NCBI GI NO: 15220251 NR Description: serine/threonine protein kinase, putative
  misc_feature (1)..(361): NCBI GI NO: 1362026 NR Description: probable serine/threonine-specific protein kinase
  misc_feature (1)..(358): NCBI GI NO: 2129803 NR Description: probable serine/threonine-specific protein kinase
  misc_feature (1)..(361): NCBI GI NO: 19568098 NR Description: osmotic stress-activated protein kinase
  misc_feature (1)..(361): NCBI GI NO: 1362051 NR Description: protein kinase SPK-3 (EC 2.7.1.-) - soybean
  misc_feature (1)..(361): NCBI GI NO: 1161254 NR Description: protein kinase [Glycine max]
  misc_feature (1)..(358): NCBI GI NO: 7434329 NR Description: protein kinase PK1 (EC 2
  misc_feature (1)..(353): NCBI GI NO: 15242858 NR Description: serine/threonine protein kinase, putative
MDKYELVKDIGAGNFGVARLMRVKNSKELVAMKYIERGPKIDENVAREIINHRSLRHPNIIRFKEVVLTPTHIAIAMEYAAGGELFERICSAGRFSEDEARYFFQQLISGVSYCHAMQICHRDLKLENTLLDGSPAPRLKICDFGYSKSSLLHSMPKSTVGTPAYIAPEVLSRGEYDGKMADVWSCGVTLYVMLVGAYPFEDQEDPKNFKKTIQRIMAVKYKIPDYVHISQDCKHLLSRIFVTNSNKRITIGDIKKHPWFLKNLPRELTEIAQAAYFRKENPTFSLQSVEEIMKIVEEAKTPARVSRSIGAFGWGGGEDAEGKEEDAEEEVEEVEEEEDEEDEYDKTVKQVHASMGEVRVS

SEQ ID NO: 2032 - protein, 341 aa, Arabidopsis thaliana
  peptide (1)..(341): Ceres Seq. ID no. 13575191
  misc_feature (1)..(240): Pfam Name: Pfam Description:  Protein kinase domain
  misc_feature (1)..(341): NCBI GI NO: 15219836 NR Description: serine/threonine protein kinase, putative
  misc_feature (1)..(341): NCBI GI NO: 21618062 NR Description: putative serine/threonine-protein kinase
  misc_feature (1)..(341): NCBI GI NO: 15220251 NR Description: serine/threonine protein kinase, putative
  misc_feature (1)..(341): NCBI GI NO: 1362026 NR Description: probable serine/threonine-specific protein kinase
  misc_feature (1)..(338): NCBI GI NO: 2129803 NR Description: probable serine/threonine-specific protein kinase
  misc_feature (1)..(341): NCBI GI NO: 19568098 NR Description: osmotic stress-activated protein kinase
  misc_feature (1)..(341): NCBI GI NO: 1362051 NR Description: protein kinase SPK-3 (EC 2.7.1.-) - soybean
  misc_feature (1)..(341): NCBI GI NO: 1161254 NR Description: protein kinase [Glycine max]
  misc_feature (1)..(338): NCBI GI NO: 7434329 NR Description: protein kinase PK1 (EC 2
  misc_feature (1)..(333): NCBI GI NO: 15242858 NR Description: serine/threonine protein kinase, putative
MRVKNSKELVAMKYIERGPKIDENVAREIINHRSLRHPNIIRFKEVVLTPTHIAIAMEYAAGGELFERICSAGRFSEDEARYFFQQLISGVSYCHAMQICHRDLKLENTLLDGSPAPRLKICDFGYSKSSLLHSMPKSTVGTPAYIAPEVLSRGEYDGKMADVWSCGVTLYVMLVGAYPFEDQEDPKNFKKTIQRIMAVKYKIPDYVHISQDCKHLLSRIFVTNSNKRITIGDIKKHPWFLKNLPRELTEIAQAAYFRKENPTFSLQSVEEIMKIVEEAKTPARVSRSIGAFGWGGGEDAEGKEEDAEEEVEEVEEEEDEEDEYDKTVKQVHASMGEVRVS

SEQ ID NO: 2033 - protein, 330 aa, Arabidopsis thaliana
  peptide (1)..(330): Ceres Seq. ID no. 13575192
  misc_feature (1)..(229): Pfam Name: Pfam Description:  Protein kinase domain
  misc_feature (1)..(330): NCBI GI NO: 15219836 NR Description: serine/threonine protein kinase, putative
  misc_feature (1)..(330): NCBI GI NO: 21618062 NR Description: putative serine/threonine-protein kinase
  misc_feature (1)..(330): NCBI GI NO: 15220251 NR Description: serine/threonine protein kinase, putative
  misc_feature (1)..(330): NCBI GI NO: 1362026 NR Description: probable serine/threonine-specific protein kinase
  misc_feature (1)..(327): NCBI GI NO: 2129803 NR Description: probable serine/threonine-specific protein kinase
  misc_feature (1)..(330): NCBI GI NO: 19568098 NR Description: osmotic stress-activated protein kinase
  misc_feature (1)..(330): NCBI GI NO: 1362051 NR Description: protein kinase SPK-3 (EC 2.7.1.-) - soybean
  misc_feature (1)..(330): NCBI GI NO: 1161254 NR Description: protein kinase [Glycine max]
  misc_feature (1)..(327): NCBI GI NO: 7434329 NR Description: protein kinase PK1 (EC 2
  misc_feature (1)..(322): NCBI GI NO: 15242858 NR Description: serine/threonine protein kinase, putative
MKYIERGPKIDENVAREIINHRSLRHPNIIRFKEVVLTPTHIAIAMEYAAGGELFERICSAGRFSEDEARYFFQQLISGVSYCHAMQICHRDLKLENTLLDGSPAPRLKICDFGYSKSSLLHSMPKSTVGTPAYIAPEVLSRGEYDGKMADVWSCGVTLYVMLVGAYPFEDQEDPKNFKKTIQRIMAVKYKIPDYVHISQDCKHLLSRIFVTNSNKRITIGDIKKHPWFLKNLPRELTEIAQAAYFRKENPTFSLQSVEEIMKIVEEAKTPARVSRSIGAFGWGGGEDAEGKEEDAEEEVEEVEEEEDEEDEYDKTVKQVHASMGEVRVS

SEQ ID NO: 2034 - DNA, 1241 bp, Arabidopsis thaliana
  misc_feature (1)..(1241): Ceres Seq. ID no. 12337172
acatcaacacgccctaaaaccgctctcgagagacgaatcgctctcagcttcttctagaaccttctccttctccttcgacgcatcgtcgccttcaagatcacactacctcgcacaacaatggagttctggggtgttgaagttaagaatggcaaaccacttcacctagatcctgggctagacaggctcgtgcacatctctcaggttgctttgggagagagtaagaacaatgtaaccgaaccaatccagctttacgtgactgttggatcggataagcttctcattggaacgctatctcatgagaagtttcctcagctgtctacggagattgtcttggaaaggaactttgcgctgtctcatacttggaagaatgggagcgttttcttctctggttacaaagttgatgcatctgatcccgagcctgaggatttgattgatgatcaacttgaggctgctggtttcaaagctgctccgaaatctgctgcgaaacaggtgaactttcagttgccaaatgaagatgtcaaagccaagcaagatgatgacgctgacggtagtgaagaagattcttcagatgatgatgatagtgaaaactctggagacgaggaggaagagaaggttactgctgaatctgacagtgaggaagatgactcatcagacgacgaagaagatgactcctcagaagaggaaaccccaaagaagcctgaagaacccaagaagaggtctgcagaacccaactcctccaagaaccctgcgtccaacaagaaggctaagtttgtaactcctcagaaaacagattcgaagaaaccgcatgtccatgttgcaactcctcatccctcaaaacaggcgggtaagaattctggtggaggcagcactggagagacatcgaagcagcagcagacaccgaagtctgcaggagcgtttgggtgcaagtcgtgcaccagaacctttacttcggaaatgggattgcagtctcacacaaaggccaaacacagtgcagctgcttgagaagaagaagcagcatgatgactactctctataatatctactctagaactttgatgtcttttggtacttaaatctggaacttgcgagtgagccagttttagttggtcttttttttcaggcatttcttcctgtttaactttatcgttttggtagctgaaactgtgctaaacctttgtttgtgtttagtggtatggatattaagtctttttgtagacttttctagtgaaaatctacatttg

SEQ ID NO: 2035 - protein, 294 aa, Arabidopsis thaliana
  peptide (1)..(294): Ceres Seq. ID no. 12337173
  misc_feature (92)..(234): Pfam Name: Pfam Description:  Chromadorea ALT protein
  misc_feature (1)..(294): NCBI GI NO: 7804963 NR Description: putative histone deacetylase HD2c
  misc_feature (1)..(294): NCBI GI NO: 30680179 NR Description: histone deacetylase -related protein
  misc_feature (1)..(294): NCBI GI NO: 11282318 NR Description: histone deacetylase-like protein
  misc_feature (1)..(292): NCBI GI NO: 7804960 NR Description: putative histone deacetylase HD2 [Oryza sativa]
  misc_feature (1)..(292): NCBI GI NO: 7716948 NR Description: histone deacetylase 2 isoform b [Zea mays]
  misc_feature (1)..(290): NCBI GI NO: 22597156 NR Description: nucleolar histone deacetylase HD2-P39
  misc_feature (1)..(292): NCBI GI NO: 33667906 NR Description: histone deacetylase [Solanum chacoense]
  misc_feature (1)..(293): NCBI GI NO: 7489751 NR Description: histone deacetylase (EC 3
  misc_feature (1)..(290): NCBI GI NO: 7716950 NR Description: histone deacetylase 2 isoform c [Zea mays]
  misc_feature (1)..(268): NCBI GI NO: 30688577 NR Description: histone deacetylase-related protein
MEFWGVEVKNGKPLHLDPGLDRLVHISQVALGESKNNVTEPIQLYVTVGSDKLLIGTLSHEKFPQLSTEIVLERNFALSHTWKNGSVFFSGYKVDASDPEPEDLIDDQLEAAGFKAAPKSAAKQVNFQLPNEDVKAKQDDDADGSEEDSSDDDDSENSGDEEEEKVTAESDSEEDDSSDDEEDDSSEEETPKKPEEPKKRSAEPNSSKNPASNKKAKFVTPQKTDSKKPHVHVATPHPSKQAGKNSGGGSTGETSKQQQTPKSAGAFGCKSCTRTFTSEMGLQSHTKAKHSAAA

SEQ ID NO: 2036 - DNA, 1394 bp, Arabidopsis thaliana
  misc_feature (1)..(1394): Ceres Seq. ID no. 13495730
tgagacgagaggcacacaaaaagagatacaaaaccaaaactttcaagcaaagcaattcaatttcaatcaaaaaccaaatcgaagatctttgaaagtttcctttttttccgaaatctgagcttgggtattgttggataagcttctcggagattgagattgaggattttgataggtgaggagattgaaagatttggatttttgggcggcaaaaatggtgatgcagacggaagctagggttggtgtgagctcaggacatggcgtagcttcgtcttctcatcgtttaacgcaggaccagagatcacatatcgaatcggcgtcgcagctcttagccggaggactcgctggtgcttttagcaagacttgtactgctcctctatctcgtctcaccattctcttccaggtgcaaggtatgcacacaaatgctgcagctttaagaaagccaagcatattacacgaggcttcacggatattgaatgaagaaggattgaaagctttttggaaagggaatctagttactattgctcaccggcttccatattcttctgttaatttctacgcatatgaacactacaagaagttcatgtatatggttactgggatggaaaatcacaaggagggtataagttcaaacctttttgtacattttgtagccggtggtttggctggaatcacagctgcttctgccacttatccacttgatcttgttagaactcgtcttgctgctcagacaaaagtaatctactactcgggtatctggcatactctgcgctctattacaaccgatgaaggtatcttgggcctctacaagggactaggaacaacgcttgtgggtgttgggcctagtattgccattagcttttctgtgtatgaatcattgagatcttattggaggtcaactaggccccatgattcccctatcatggtcagtctagcttgtggaagtctttcaggaatagcatcttcaacagctacgtttccattggatctggtgagaagaaggaagcagctggaaggaataggcgggcgagcggtagtgtacaagacaggtttgttaggcacattaaagcgtattgttcaaacggaaggagcgagaggcctgtacagaggaattcttccagagtactacaaagtggtacctggtgtagggatttgcttcatgacctacgagacactcaagctttacttcaaggatctttcttcgaatctataacggtttaaaaggttggtagatttgtttaggtctatttttggtgagaggaaaaaaactgtaaaaaccaaacagcggaaaatgataatgtatacgaaatgtagaattatatatgtagttgttggatgtagcttatacgagattaacatttgtattggtacaatccttttccattgttacatggctt

SEQ ID NO: 2037 - protein, 332 aa, Arabidopsis thaliana
  peptide (1)..(332): Ceres Seq. ID no. 13495731
  misc_feature (1)..(332): NCBI GI NO: 15228163 NR Description: mitochondrial carrier protein family
  misc_feature (3)..(332): NCBI GI NO: 21554682 NR Description: Ca-dependent solute carrier-like protein
  misc_feature (1)..(322): NCBI GI NO: 22331775 NR Description: mitochondrial carrier protein family
  misc_feature (38)..(331): NCBI GI NO: 34902034 NR Description: putative peroxisomal Ca-dependent solute carrier protein
  misc_feature (1)..(322): NCBI GI NO: 11277067 NR Description: hypothetical protein F5K20
  misc_feature (3)..(322): NCBI GI NO: 30687297 NR Description: mitochondrial carrier protein family
  misc_feature (3)..(322): NCBI GI NO: 34895726 NR Description: putative peroxisomal Ca-dependent solute carrier protein
  misc_feature (3)..(322): NCBI GI NO: 25295875 NR Description: probable mitochondrial carrier protein
  misc_feature (1)..(268): NCBI GI NO: 15234063 NR Description: mitochondrial carrier protein family
  misc_feature (236)..(322): NCBI GI NO: 15234063 NR Description: mitochondrial carrier protein family
MVMQTEARVGVSSGHGVASSSHRLTQDQRSHIESASQLLAGGLAGAFSKTCTAPLSRLTILFQVQGMHTNAAALRKPSILHEASRILNEEGLKAFWKGNLVTIAHRLPYSSVNFYAYEHYKKFMYMVTGMENHKEGISSNLFVHFVAGGLAGITAASATYPLDLVRTRLAAQTKVIYYSGIWHTLRSITTDEGILGLYKGLGTTLVGVGPSIAISFSVYESLRSYWRSTRPHDSPIMVSLACGSLSGIASSTATFPLDLVRRRKQLEGIGGRAVVYKTGLLGTLKRIVQTEGARGLYRGILPEYYKVVPGVGICFMTYETLKLYFKDLSSNL

SEQ ID NO: 2038 - protein, 330 aa, Arabidopsis thaliana
  peptide (1)..(330): Ceres Seq. ID no. 13495732
  misc_feature (1)..(330): NCBI GI NO: 15228163 NR Description: mitochondrial carrier protein family
  misc_feature (1)..(330): NCBI GI NO: 21554682 NR Description: Ca-dependent solute carrier-like protein
  misc_feature (1)..(320): NCBI GI NO: 22331775 NR Description: mitochondrial carrier protein family
  misc_feature (36)..(329): NCBI GI NO: 34902034 NR Description: putative peroxisomal Ca-dependent solute carrier protein
  misc_feature (1)..(320): NCBI GI NO: 11277067 NR Description: hypothetical protein F5K20
  misc_feature (1)..(320): NCBI GI NO: 30687297 NR Description: mitochondrial carrier protein family
  misc_feature (1)..(320): NCBI GI NO: 34895726 NR Description: putative peroxisomal Ca-dependent solute carrier protein
  misc_feature (1)..(320): NCBI GI NO: 25295875 NR Description: probable mitochondrial carrier protein
  misc_feature (1)..(266): NCBI GI NO: 15234063 NR Description: mitochondrial carrier protein family
  misc_feature (234)..(320): NCBI GI NO: 15234063 NR Description: mitochondrial carrier protein family
MQTEARVGVSSGHGVASSSHRLTQDQRSHIESASQLLAGGLAGAFSKTCTAPLSRLTILFQVQGMHTNAAALRKPSILHEASRILNEEGLKAFWKGNLVTIAHRLPYSSVNFYAYEHYKKFMYMVTGMENHKEGISSNLFVHFVAGGLAGITAASATYPLDLVRTRLAAQTKVIYYSGIWHTLRSITTDEGILGLYKGLGTTLVGVGPSIAISFSVYESLRSYWRSTRPHDSPIMVSLACGSLSGIASSTATFPLDLVRRRKQLEGIGGRAVVYKTGLLGTLKRIVQTEGARGLYRGILPEYYKVVPGVGICFMTYETLKLYFKDLSSNL

SEQ ID NO: 2039 - protein, 266 aa, Arabidopsis thaliana
  peptide (1)..(266): Ceres Seq. ID no. 13495733
  misc_feature (1)..(266): NCBI GI NO: 15228163 NR Description: mitochondrial carrier protein family
  misc_feature (1)..(266): NCBI GI NO: 21554682 NR Description: Ca-dependent solute carrier-like protein
  misc_feature (1)..(256): NCBI GI NO: 22331775 NR Description: mitochondrial carrier protein family
  misc_feature (1)..(265): NCBI GI NO: 34902034 NR Description: putative peroxisomal Ca-dependent solute carrier protein
  misc_feature (1)..(256): NCBI GI NO: 11277067 NR Description: hypothetical protein F5K20
  misc_feature (1)..(256): NCBI GI NO: 30687297 NR Description: mitochondrial carrier protein family
  misc_feature (1)..(256): NCBI GI NO: 34895726 NR Description: putative peroxisomal Ca-dependent solute carrier protein
  misc_feature (1)..(256): NCBI GI NO: 25295875 NR Description: probable mitochondrial carrier protein
  misc_feature (1)..(202): NCBI GI NO: 15234063 NR Description: mitochondrial carrier protein family
  misc_feature (170)..(256): NCBI GI NO: 15234063 NR Description: mitochondrial carrier protein family
MHTNAAALRKPSILHEASRILNEEGLKAFWKGNLVTIAHRLPYSSVNFYAYEHYKKFMYMVTGMENHKEGISSNLFVHFVAGGLAGITAASATYPLDLVRTRLAAQTKVIYYSGIWHTLRSITTDEGILGLYKGLGTTLVGVGPSIAISFSVYESLRSYWRSTRPHDSPIMVSLACGSLSGIASSTATFPLDLVRRRKQLEGIGGRAVVYKTGLLGTLKRIVQTEGARGLYRGILPEYYKVVPGVGICFMTYETLKLYFKDLSSNL

SEQ ID NO: 2040 - DNA, 932 bp, Arabidopsis thaliana
  misc_feature (1)..(932): Ceres Seq. ID no. 13646128
gtgttatgtctgctcaaagacagcctttgtaaccaaaaccaaagtgtctctcttttcttcttcctaaatttctttccacgagaattgatttgggtttgtgttgtttttttctttcttttttgggtttttgtaattgggttggtgaataatcctgcaaaagtgttcgatgattttctccagagaagaattttgaagtttctctttttagagattttttttgttgttggggttttttgttttctgggggaaattgaaaagagatggcaggtgaagaagattggatagaactaaagtttagactagcagatggtacagacataggtccaagcaagtataatcaatctatgactgtttcttctcttaaagagaaactcatttctcaatggcctaaagataaagaaaatactccaaaaactgtaaatgatatgaagctcatcaatgccgggaaaatactggagaacaataggacacttgctgaatccaggcttcctgtttgtgaacttcctggaatgatcattactatgcatattgttcttcgccttcctacgttagacaaaaagagcgaaaaactgcagaatgatccaccgatgaagaatcgctgcgtgtgcaccattttgtagctgcaagtaaattggatcatagagatttatatccgtcatgatcatggcactagatgatgctccacggaacaacttccatggcatcaaacaagctttgagaagttccttcagtacagaatgattggcataggcatgaaaacaaaagatcttcattacagaatttggttccatgtgtgtggttgttaattattattttttaaaaatcaaaatggcttgagaaaatgtactatgattcttgaaggttggttcttttataaatatatacaatatgttcaatacaacagtaaataacaagaatggtattgtccttac

SEQ ID NO: 2041 - protein, 119 aa, Arabidopsis thaliana
  peptide (1)..(119): Ceres Seq. ID no. 13646129
  misc_feature (8)..(95): Pfam Name: Pfam Description:  Ubiquitin family
  misc_feature (1)..(119): NCBI GI NO: 15219188 NR Description: ubiquitin family [Arabidopsis thaliana]
  misc_feature (1)..(101): NCBI GI NO: 25402954 NR Description: protein F2E2.12 [imported] - Arabidopsis thaliana
  misc_feature (3)..(119): NCBI GI NO: 21592966 NR Description: ubiquitin-fusion protein, putative
  misc_feature (3)..(119): NCBI GI NO: 15218145 NR Description: expressed protein [Arabidopsis thaliana]
  misc_feature (5)..(119): NCBI GI NO: 4097587 NR Description: NTGP5 [Nicotiana tabacum]
  misc_feature (4)..(119): NCBI GI NO: 22331362 NR Description: ubiquitin family [Arabidopsis thaliana]
  misc_feature (1)..(119): NCBI GI NO: 15232032 NR Description: ubiquitin family [Arabidopsis thaliana]
  misc_feature (1)..(116): NCBI GI NO: 18417680 NR Description: expressed protein [Arabidopsis thaliana]
  misc_feature (1)..(119): NCBI GI NO: 38347220 NR Description: OSJNBa0055C08.14
  misc_feature (4)..(119): NCBI GI NO: 15234839 NR Description: ubiquitin family [Arabidopsis thaliana]
MAGEEDWIELKFRLADGTDIGPSKYNQSMTVSSLKEKLISQWPKDKENTPKTVNDMKLINAGKILENNRTLAESRLPVCELPGMIITMHIVLRLPTLDKKSEKLQNDPPMKNRCVCTIL

SEQ ID NO: 2042 - protein, 94 aa, Arabidopsis thaliana
  peptide (1)..(94): Ceres Seq. ID no. 13646130
VLCLLKDSLCNQNQSVSLFFFLNFFPRELIWVCVVFFFLFWVFVIGLVNNPAKVFDDFLQRRILKFLFLEIFFVVGVFCFLGEIEKRWQVKKIG

SEQ ID NO: 2043 - protein, 91 aa, Arabidopsis thaliana
  peptide (1)..(91): Ceres Seq. ID no. 13646131
  misc_feature (1)..(67): Pfam Name: Pfam Description:  Ubiquitin family
  misc_feature (1)..(91): NCBI GI NO: 15219188 NR Description: ubiquitin family [Arabidopsis thaliana]
  misc_feature (1)..(73): NCBI GI NO: 25402954 NR Description: protein F2E2.12 [imported] - Arabidopsis thaliana
  misc_feature (1)..(91): NCBI GI NO: 21592966 NR Description: ubiquitin-fusion protein, putative
  misc_feature (1)..(91): NCBI GI NO: 15218145 NR Description: expressed protein [Arabidopsis thaliana]
  misc_feature (1)..(91): NCBI GI NO: 4097587 NR Description: NTGP5 [Nicotiana tabacum]
  misc_feature (1)..(91): NCBI GI NO: 22331362 NR Description: ubiquitin family [Arabidopsis thaliana]
  misc_feature (1)..(91): NCBI GI NO: 15232032 NR Description: ubiquitin family [Arabidopsis thaliana]
  misc_feature (1)..(88): NCBI GI NO: 18417680 NR Description: expressed protein [Arabidopsis thaliana]
  misc_feature (1)..(91): NCBI GI NO: 38347220 NR Description: OSJNBa0055C08.14
  misc_feature (1)..(91): NCBI GI NO: 15234839 NR Description: ubiquitin family [Arabidopsis thaliana]
MTVSSLKEKLISQWPKDKENTPKTVNDMKLINAGKILENNRTLAESRLPVCELPGMIITMHIVLRLPTLDKKSEKLQNDPPMKNRCVCTIL

SEQ ID NO: 2044 - DNA, 810 bp, Arabidopsis thaliana
  misc_feature (1)..(810): Ceres Seq. ID no. 13592949
caattctctttaacattctccttgatttctgacactaccctcatcgggtctccaagaggccaagaaagacctctttctcggcttctaggagtctcatcattctcttttttcacatttgcttcctccacacgcaacctccaaaaagccctaaatttattaaaacaaatggattccacggagctgaaccgtgtgttccaaatgttcgacaaggacggagacgggaagatcactacgaaggagctgaacgagtcattcaagaacctcggtatcataatacccgaagacgaactaacacaaattatccaaaagatcgatgttaatggtgacggttgtgttgacattgaagagtttggagagctctacaagacgataatggtagaagatgaggacgaggtaggagaagaagatatgaaggaagcgttcaacgtatttgatcggaacggagatgggtttataacggtggatgaattgaaagcggttttatcttccttgggactcaagcaaggtaagaccttggaggaatgtaggaagatgataatgcaagtggatgttgatggtgatggtagggttaattacatggagtttagacaaatgatgaaaaagggtcgcttttttagctctttgagctgataataactttttttcttctttttttaccttctcttgtttttaattttggttatttgcttaaccattttctcttgcggtctaaatggaaaatacatgatcatagactaattattttatcttcaagacatgcgagagcacattgtaaaaaaaaaaaaaaaaaagcttatcgataccgtcgac

SEQ ID NO: 2045 - protein, 209 aa, Arabidopsis thaliana
  peptide (1)..(209): Ceres Seq. ID no. 13592950
  misc_feature (174)..(202): Pfam Name: Pfam Description:  EF hand
  misc_feature (56)..(209): NCBI GI NO: 15236276 NR Description: calcium-binding protein, putative
  misc_feature (56)..(206): NCBI GI NO: 15221358 NR Description: calcium-binding protein, putative
  misc_feature (51)..(209): NCBI GI NO: 28301674 NR Description: calcium-binding protein [Lotus japonicus]
  misc_feature (54)..(207): NCBI GI NO: 18406202 NR Description: calmodulin-like protein (MSS3)
  misc_feature (54)..(207): NCBI GI NO: 25295758 NR Description: probable calcium binding protein
  misc_feature (56)..(204): NCBI GI NO: 15231470 NR Description: calcium-binding protein, putative
  misc_feature (56)..(209): NCBI GI NO: 15235516 NR Description: calcium-binding protein, putative
  misc_feature (60)..(204): NCBI GI NO: 15231685 NR Description: calcium-binding protein, putative
  misc_feature (54)..(204): NCBI GI NO: 21740787 NR Description: OSJNBb0091E11.1
  misc_feature (60)..(199): NCBI GI NO: 4959165 NR Description: calmodulin mutant SYNCAM57D [synthetic construct]
QFSLTFSLISDTTLIGSPRGQERPLSRLLGVSSFSFFTFASSTRNLQKALNLLKQMDSTELNRVFQMFDKDGDGKITTKELNESFKNLGIIIPEDELTQIIQKIDVNGDGCVDIEEFGELYKTIMVEDEDEVGEEDMKEAFNVFDRNGDGFITVDELKAVLSSLGLKQGKTLEECRKMIMQVDVDGDGRVNYMEFRQMMKKGRFFSSLS

SEQ ID NO: 2046 - protein, 154 aa, Arabidopsis thaliana
  peptide (1)..(154): Ceres Seq. ID no. 13592951
  misc_feature (119)..(147): Pfam Name: Pfam Description:  EF hand
  misc_feature (1)..(154): NCBI GI NO: 15236276 NR Description: calcium-binding protein, putative
  misc_feature (1)..(151): NCBI GI NO: 15221358 NR Description: calcium-binding protein, putative
  misc_feature (1)..(154): NCBI GI NO: 28301674 NR Description: calcium-binding protein [Lotus japonicus]
  misc_feature (1)..(152): NCBI GI NO: 18406202 NR Description: calmodulin-like protein (MSS3)
  misc_feature (1)..(152): NCBI GI NO: 25295758 NR Description: probable calcium binding protein
  misc_feature (1)..(149): NCBI GI NO: 15231470 NR Description: calcium-binding protein, putative
  misc_feature (1)..(154): NCBI GI NO: 15235516 NR Description: calcium-binding protein, putative
  misc_feature (5)..(149): NCBI GI NO: 15231685 NR Description: calcium-binding protein, putative
  misc_feature (1)..(149): NCBI GI NO: 21740787 NR Description: OSJNBb0091E11.1
  misc_feature (5)..(144): NCBI GI NO: 4959165 NR Description: calmodulin mutant SYNCAM57D [synthetic construct]
MDSTELNRVFQMFDKDGDGKITTKELNESFKNLGIIIPEDELTQIIQKIDVNGDGCVDIEEFGELYKTIMVEDEDEVGEEDMKEAFNVFDRNGDGFITVDELKAVLSSLGLKQGKTLEECRKMIMQVDVDGDGRVNYMEFRQMMKKGRFFSSLS

SEQ ID NO: 2047 - protein, 143 aa, Arabidopsis thaliana
  peptide (1)..(143): Ceres Seq. ID no. 13592952
  misc_feature (108)..(136): Pfam Name: Pfam Description:  EF hand
  misc_feature (1)..(143): NCBI GI NO: 15236276 NR Description: calcium-binding protein, putative
  misc_feature (1)..(140): NCBI GI NO: 15221358 NR Description: calcium-binding protein, putative
  misc_feature (1)..(143): NCBI GI NO: 28301674 NR Description: calcium-binding protein [Lotus japonicus]
  misc_feature (1)..(141): NCBI GI NO: 18406202 NR Description: calmodulin-like protein (MSS3)
  misc_feature (1)..(141): NCBI GI NO: 25295758 NR Description: probable calcium binding protein
  misc_feature (1)..(138): NCBI GI NO: 15231470 NR Description: calcium-binding protein, putative
  misc_feature (1)..(143): NCBI GI NO: 15235516 NR Description: calcium-binding protein, putative
  misc_feature (1)..(138): NCBI GI NO: 15231685 NR Description: calcium-binding protein, putative
  misc_feature (1)..(138): NCBI GI NO: 21740787 NR Description: OSJNBb0091E11.1
  misc_feature (1)..(133): NCBI GI NO: 4959165 NR Description: calmodulin mutant SYNCAM57D [synthetic construct]
MFDKDGDGKITTKELNESFKNLGIIIPEDELTQIIQKIDVNGDGCVDIEEFGELYKTIMVEDEDEVGEEDMKEAFNVFDRNGDGFITVDELKAVLSSLGLKQGKTLEECRKMIMQVDVDGDGRVNYMEFRQMMKKGRFFSSLS

SEQ ID NO: 2048 - DNA, 1505 bp, Arabidopsis thaliana
  misc_feature (1)..(1505): Ceres Seq. ID no. 12394634
attatacaaaaactgtatcatcatcatcatcaagcttgaaatcactctctttcatccttccccgcgcactgtgtctcgctctctctctcccacatttccattatctcctttactttctttctttgagaatgtcttctacaacaatcggcgagcacatcagactccgacgagctagaaaccaaacaatccgtcatctccacgccgccgacgatgatccgccgctaagccacgtcgttcttccgatttcacaacctaatcgcttctgtaactccgcaatgtcttccttctttcccctcccgacttcctcctccaacgaaagcacgaggaagaaaccgtaccaaacgtcgtcgtttcgagggatgggttgctatgccgcagcagcagcagcagctcaagaggtttctgttccctccgtcattcgctactccgcggatttggatgccagaattagaaaagataagaagaagaagaagcataagcataagaaaaagaaaaagaagaataaaggaagctacgaagatggttcgattaggattttaagcgaagaagctagagacgttattgatgtttggtgcagacctggattaggcttctccacggatgctgtaattggtcgatcggttgatcctcctcggggaaggaatattccgtcgtctcgtcgcaaaattgatgtggataacaacaattataatcacacactgggttcttctgttcttcccattcggtttctcaatcaagaaactcattctcatgatatcttcaactctgattctacttttgtgacatcatcacgcgctgaaccaacgatgttgtcaagtagatgtcgtggccatcttccacgctcttaccctgatgatcttaccgagatgaggatgctccagaatggttttgtaatgggaagaataacagattcccgtgataactaccacgaattgaggctcgatgttgatagcatgtcatacgagcaacttcttgagcttggtgatagaattggttatgtgaatactggactaaaagaaagcgagatacatcgttgtcttgggaaaatcaaaccatccgtatcacatactcttgttgatagaaaatgtagcatctgtcaggatgagtatgagagagaggatgaggttggggaattgaactgtggacacagctttcatgtccattgcgtgaaacaatggctttcgaggaagaatgcttgtccggtctgtaagaaggcagcatatggcaagccttaaaagacttttgtatctcgtcgggtttctgatagctcaagatctttcaagccaccttgctgtatagagatctgtatcatctgatacttgattcatatttgttgtttttgcatttagcaatcacaattttttttttttaagatcttatattctttgttgggtctatttatgtgattgaaatcaagagtttgaaatctatgttttctgttgcctaggtagatttaagacaggtagagagtaatttagcatatagcatacacgcacgtaactagg

SEQ ID NO: 2049 - protein, 410 aa, Arabidopsis thaliana
  peptide (1)..(410): Ceres Seq. ID no. 12394635
  misc_feature (362)..(402): Pfam Name: RING finger Pfam Description: Zinc finger, C3HC4 type
  misc_feature (43)..(410): NCBI GI NO: 15220912 NR Description: zinc-finger protein
  misc_feature (43)..(410): NCBI GI NO: 21554695 NR Description: zinc-finger protein (C-terminal), putative
  misc_feature (43)..(410): NCBI GI NO: 25511721 NR Description: F2H15.19 protein - Arabidopsis thaliana
  misc_feature (44)..(409): NCBI GI NO: 15219544 NR Description: putative RING zinc finger protein
  misc_feature (93)..(348): NCBI GI NO: 34911396 NR Description: RING zinc finger protein-like
  misc_feature (366)..(405): NCBI GI NO: 34911396 NR Description: RING zinc finger protein-like
  misc_feature (284)..(407): NCBI GI NO: 15221230 NR Description: zinc finger protein, putative
  misc_feature (306)..(406): NCBI GI NO: 38344153 NR Description: OSJNBa0041A02.20
  misc_feature (225)..(403): NCBI GI NO: 15220067 NR Description: hypothetical protein; protein id: At1g45180.1
  misc_feature (306)..(406): NCBI GI NO: 30687050 NR Description: zinc finger
YTKTVSSSSSSLKSLSFILPRALCLALSLPHFHYLLYFLSLRMSSTTIGEHIRLRRARNQTIRHLHAADDDPPLSHVVLPISQPNRFCNSAMSSFFPLPTSSSNESTRKKPYQTSSFRGMGCYAAAAAAAQEVSVPSVIRYSADLDARIRKDKKKKKHKHKKKKKKNKGSYEDGSIRILSEEARDVIDVWCRPGLGFSTDAVIGRSVDPPRGRNIPSSRRKIDVDNNNYNHTLGSSVLPIRFLNQETHSHDIFNSDSTFVTSSRAEPTMLSSRCRGHLPRSYPDDLTEMRMLQNGFVMGRITDSRDNYHELRLDVDSMSYEQLLELGDRIGYVNTGLKESEIHRCLGKIKPSVSHTLVDRKCSICQDEYEREDEVGELNCGHSFHVHCVKQWLSRKNACPVCKKAAYGKP

SEQ ID NO: 2050 - protein, 368 aa, Arabidopsis thaliana
  peptide (1)..(368): Ceres Seq. ID no. 12394636
  misc_feature (320)..(360): Pfam Name: RING finger Pfam Description: Zinc finger, C3HC4 type
  misc_feature (1)..(368): NCBI GI NO: 15220912 NR Description: zinc-finger protein
  misc_feature (1)..(368): NCBI GI NO: 21554695 NR Description: zinc-finger protein (C-terminal), putative
  misc_feature (1)..(368): NCBI GI NO: 25511721 NR Description: F2H15.19 protein - Arabidopsis thaliana
  misc_feature (2)..(367): NCBI GI NO: 15219544 NR Description: putative RING zinc finger protein
  misc_feature (51)..(306): NCBI GI NO: 34911396 NR Description: RING zinc finger protein-like
  misc_feature (324)..(363): NCBI GI NO: 34911396 NR Description: RING zinc finger protein-like
  misc_feature (242)..(365): NCBI GI NO: 15221230 NR Description: zinc finger protein, putative
  misc_feature (264)..(364): NCBI GI NO: 38344153 NR Description: OSJNBa0041A02.20
  misc_feature (183)..(361): NCBI GI NO: 15220067 NR Description: hypothetical protein; protein id: At1g45180.1
  misc_feature (264)..(364): NCBI GI NO: 30687050 NR Description: zinc finger
MSSTTIGEHIRLRRARNQTIRHLHAADDDPPLSHVVLPISQPNRFCNSAMSSFFPLPTSSSNESTRKKPYQTSSFRGMGCYAAAAAAAQEVSVPSVIRYSADLDARIRKDKKKKKHKHKKKKKKNKGSYEDGSIRILSEEARDVIDVWCRPGLGFSTDAVIGRSVDPPRGRNIPSSRRKIDVDNNNYNHTLGSSVLPIRFLNQETHSHDIFNSDSTFVTSSRAEPTMLSSRCRGHLPRSYPDDLTEMRMLQNGFVMGRITDSRDNYHELRLDVDSMSYEQLLELGDRIGYVNTGLKESEIHRCLGKIKPSVSHTLVDRKCSICQDEYEREDEVGELNCGHSFHVHCVKQWLSRKNACPVCKKAAYGKP

SEQ ID NO: 2051 - protein, 319 aa, Arabidopsis thaliana
  peptide (1)..(319): Ceres Seq. ID no. 12394637
  misc_feature (271)..(311): Pfam Name: RING finger Pfam Description: Zinc finger, C3HC4 type
  misc_feature (1)..(319): NCBI GI NO: 15220912 NR Description: zinc-finger protein
  misc_feature (1)..(319): NCBI GI NO: 21554695 NR Description: zinc-finger protein (C-terminal), putative
  misc_feature (1)..(319): NCBI GI NO: 25511721 NR Description: F2H15.19 protein - Arabidopsis thaliana
  misc_feature (1)..(318): NCBI GI NO: 15219544 NR Description: putative RING zinc finger protein
  misc_feature (2)..(257): NCBI GI NO: 34911396 NR Description: RING zinc finger protein-like
  misc_feature (275)..(314): NCBI GI NO: 34911396 NR Description: RING zinc finger protein-like
  misc_feature (193)..(316): NCBI GI NO: 15221230 NR Description: zinc finger protein, putative
  misc_feature (215)..(315): NCBI GI NO: 38344153 NR Description: OSJNBa0041A02.20
  misc_feature (134)..(312): NCBI GI NO: 15220067 NR Description: hypothetical protein; protein id: At1g45180.1
  misc_feature (215)..(315): NCBI GI NO: 30687050 NR Description: zinc finger
MSSFFPLPTSSSNESTRKKPYQTSSFRGMGCYAAAAAAAQEVSVPSVIRYSADLDARIRKDKKKKKHKHKKKKKKNKGSYEDGSIRILSEEARDVIDVWCRPGLGFSTDAVIGRSVDPPRGRNIPSSRRKIDVDNNNYNHTLGSSVLPIRFLNQETHSHDIFNSDSTFVTSSRAEPTMLSSRCRGHLPRSYPDDLTEMRMLQNGFVMGRITDSRDNYHELRLDVDSMSYEQLLELGDRIGYVNTGLKESEIHRCLGKIKPSVSHTLVDRKCSICQDEYEREDEVGELNCGHSFHVHCVKQWLSRKNACPVCKKAAYGKP

SEQ ID NO: 2052 - DNA, 889 bp, Arabidopsis thaliana
  misc_feature (1)..(889): Ceres Seq. ID no. 13496329
aaaaaaagagtattttcctccgaattcgccgacgactaatcacgagatggcgccgccggtgacggagcggtggtgcttagctttgattcttctctttctctccttgttcgtccaatcttcaacggcaatttactgcggtgctgaagattgttatgctcttctcggagtcgctcaagatgcgaacgcatcggatatcaagagatcttattataagctctctcttcaacatcatccagataagaatccggatcctgaatcgaggaaactgtttgttaaaatcgccactgcttatgagattttgaaagataatactactcgggcacaatatgattatgcaattgaacatccagaagaggtattttacaacaccgctcaatattaccgcgcgaaatatggacataaatcggatccccgtgctgttcttgttggtctattggtggttttatctgcatttcaatatctgaacaacgtggcaaggtataatgaggctatagcgacggttaagcgaacacctgcttacaaaaataagctcaaggcattagaactcgaacgcacaggtggagtaagtaacaagaagaagggttcaaagcagattgaccagaaactacaggaagagctaagcaacgaacttgacttacaaatcaaaggagctgaaaaaccatcggtctgggaacttctcggtgttcgattcattctcctaccatacactatcattaagcttctagtatggtacagcagttgggtgtggagatataaggtcaagaaagctccttattcatgggaagacgcatcatacctaacccgaagatcacttagtgtgcctgccgacgcatgggctaatctaggtatccttctattctctaatttccaacctgaaccgacatattga

SEQ ID NO: 2053 - protein, 295 aa, Arabidopsis thaliana
  peptide (1)..(295): Ceres Seq. ID no. 13496330
  misc_feature (49)..(113): Pfam Name: Pfam Description:  DnaJ domain
  misc_feature (16)..(295): NCBI GI NO: 25404348 NR Description: hypothetical protein T13M11.13
  misc_feature (16)..(281): NCBI GI NO: 30696610 NR Description: DnaJ protein family [Arabidopsis thaliana]
  misc_feature (117)..(281): NCBI GI NO: 19347731 NR Description: unknown protein [Arabidopsis thaliana]
  misc_feature (26)..(273): NCBI GI NO: 18859921 NR Description: CG7872-PA [Drosophila melanogaster]
  misc_feature (24)..(281): NCBI GI NO: 34868434 NR Description: similar to bA16L21
  misc_feature (24)..(281): NCBI GI NO: 38078426 NR Description: RIKEN cDNA 2010203O07 [Mus musculus]
  misc_feature (24)..(281): NCBI GI NO: 12313893 NR Description: bA16L21
  misc_feature (28)..(273): NCBI GI NO: 17538212 NR Description: DNaJ domain
  misc_feature (25)..(273): NCBI GI NO: 39593758 NR Description: Hypothetical protein CBG06069
  misc_feature (25)..(281): NCBI GI NO: 23508632 NR Description: hypothetical protein, conserved
KKEYFPPNSPTTNHEMAPPVTERWCLALILLFLSLFVQSSTAIYCGAEDCYALLGVAQDANASDIKRSYYKLSLQHHPDKNPDPESRKLFVKIATAYEILKDNTTRAQYDYAIEHPEEVFYNTAQYYRAKYGHKSDPRAVLVGLLVVLSAFQYLNNVARYNEAIATVKRTPAYKNKLKALELERTGGVSNKKKGSKQIDQKLQEELSNELDLQIKGAEKPSVWELLGVRFILLPYTIIKLLVWYSSWVWRYKVKKAPYSWEDASYLTRRSLSVPADAWANLGILLFSNFQPEPTY

SEQ ID NO: 2054 - protein, 280 aa, Arabidopsis thaliana
  peptide (1)..(280): Ceres Seq. ID no. 13496331
  misc_feature (34)..(98): Pfam Name: Pfam Description:  DnaJ domain
  misc_feature (1)..(280): NCBI GI NO: 25404348 NR Description: hypothetical protein T13M11.13
  misc_feature (1)..(266): NCBI GI NO: 30696610 NR Description: DnaJ protein family [Arabidopsis thaliana]
  misc_feature (102)..(266): NCBI GI NO: 19347731 NR Description: unknown protein [Arabidopsis thaliana]
  misc_feature (11)..(258): NCBI GI NO: 18859921 NR Description: CG7872-PA [Drosophila melanogaster]
  misc_feature (9)..(266): NCBI GI NO: 34868434 NR Description: similar to bA16L21
  misc_feature (9)..(266): NCBI GI NO: 38078426 NR Description: RIKEN cDNA 2010203O07 [Mus musculus]
  misc_feature (9)..(266): NCBI GI NO: 12313893 NR Description: bA16L21
  misc_feature (13)..(258): NCBI GI NO: 17538212 NR Description: DNaJ domain
  misc_feature (10)..(258): NCBI GI NO: 39593758 NR Description: Hypothetical protein CBG06069
  misc_feature (10)..(266): NCBI GI NO: 23508632 NR Description: hypothetical protein, conserved
MAPPVTERWCLALILLFLSLFVQSSTAIYCGAEDCYALLGVAQDANASDIKRSYYKLSLQHHPDKNPDPESRKLFVKIATAYEILKDNTTRAQYDYAIEHPEEVFYNTAQYYRAKYGHKSDPRAVLVGLLVVLSAFQYLNNVARYNEAIATVKRTPAYKNKLKALELERTGGVSNKKKGSKQIDQKLQEELSNELDLQIKGAEKPSVWELLGVRFILLPYTIIKLLVWYSSWVWRYKVKKAPYSWEDASYLTRRSLSVPADAWANLGILLFSNFQPEPTY

SEQ ID NO: 2055 - DNA, 1183 bp, Arabidopsis thaliana
  misc_feature (1)..(1183): Ceres Seq. ID no. 12482638
tcgatgaacagttcaattgtattaccaacggaagaccagacaaagatttccagaaattgaagtggaaacctaagaaatgtagtttaccaaggttaaatggagctatattgttggagatgcttagaggaagaagacttgtctttgtgggtgattcactaaataggaacatgtgggaatctctggtttgtattctcaaaggatcagtgaaagatgagactaaagtctatgaggctagaggaagacatcatttccgtggggaggctgagtactcattcgtcttccaagattataactgcacggtggagttctttgtttcacccttcttggttcaagagtgggaaattgtagacaagaaaggaacaaagaaggagactttaaggttggatttggttgggaagtcctctgagcagtacaaaggagctgatgttattgtctttaataccggacattggtggactcatgagaaaacatccaaaggggaggattattatcaagaaggaagtaatgtttatcatgaactcgctgttcttgaagcttttcgtaaagctttgactacatggggtcgatgggttgagaagaatgtgaatccggcaaagtccctcgttttctttcggggctattccgcatcccatttcagtggtgggcaatggaactcaggaggagcatgcgatagcgaaacagaaccgatcaagaacgatacatacctaaccccgtacccgtctaaaatgaaagtgcttgagaaagtgttaagaggtatgaaaacacctgtcacttatctaaacatcacgagattaacggactacaggaaggacggtcacccgtcagtataccggaaacagagcttatcggaaaaagagaaaaagtcgccattgctgtaccaagactgcagccattggtgcctccccggggttccagactcttggaatgaaatcctctacgctgagctgatcgtcaaactcaatcagctcagccaaacacaacgaaaaacttaaggttcttccacccccaatacttgtttgatctcaacacttttactttctattttgatggtaattgttgattatagaatgtgtagagtaaaaaagaaagatggaatataatggatcactcgatatctttgttactattggtttgtaaatgcttttgtcacgacgaatacaatatttagctccaaagagaggtt

SEQ ID NO: 2056 - protein, 329 aa, Arabidopsis thaliana
  peptide (1)..(329): Ceres Seq. ID no. 12482639
  misc_feature (1)..(329): NCBI GI NO: 9759298 NR Description: emb|CAB82953
  misc_feature (1)..(329): NCBI GI NO: 21618305 NR Description: unknown [Arabidopsis thaliana]
  misc_feature (39)..(329): NCBI GI NO: 18415287 NR Description: putative protein; protein id: At5g06700
  misc_feature (1)..(328): NCBI GI NO: 15229945 NR Description: hypothetical protein; protein id: At3g12060.1
  misc_feature (1)..(316): NCBI GI NO: 22330347 NR Description: hypothetical protein; protein id: At1g60790
  misc_feature (1)..(322): NCBI GI NO: 15239856 NR Description: putative protein; protein id: At5g49340.1
  misc_feature (1)..(318): NCBI GI NO: 15242021 NR Description: putative protein; protein id: At5g20590
  misc_feature (1)..(318): NCBI GI NO: 21592371 NR Description: unknown [Arabidopsis thaliana]
  misc_feature (1)..(318): NCBI GI NO: 15228743 NR Description: putative protein; protein id: At3g62390
  misc_feature (1)..(316): NCBI GI NO: 9759321 NR Description: gb|AAF00670
DEQFNCITNGRPDKDFQKLKWKPKKCSLPRLNGAILLEMLRGRRLVFVGDSLNRNMWESLVCILKGSVKDETKVYEARGRHHFRGEAEYSFVFQDYNCTVEFFVSPFLVQEWEIVDKKGTKKETLRLDLVGKSSEQYKGADVIVFNTGHWWTHEKTSKGEDYYQEGSNVYHELAVLEAFRKALTTWGRWVEKNVNPAKSLVFFRGYSASHFSGGQWNSGGACDSETEPIKNDTYLTPYPSKMKVLEKVLRGMKTPVTYLNITRLTDYRKDGHPSVYRKQSLSEKEKKSPLLYQDCSHWCLPGVPDSWNEILYAELIVKLNQLSQTQRKT

SEQ ID NO: 2057 - protein, 291 aa, Arabidopsis thaliana
  peptide (1)..(291): Ceres Seq. ID no. 12482640
  misc_feature (1)..(291): NCBI GI NO: 9759298 NR Description: emb|CAB82953
  misc_feature (1)..(291): NCBI GI NO: 21618305 NR Description: unknown [Arabidopsis thaliana]
  misc_feature (1)..(291): NCBI GI NO: 18415287 NR Description: putative protein; protein id: At5g06700
  misc_feature (1)..(290): NCBI GI NO: 15229945 NR Description: hypothetical protein; protein id: At3g12060.1
  misc_feature (1)..(278): NCBI GI NO: 22330347 NR Description: hypothetical protein; protein id: At1g60790
  misc_feature (1)..(284): NCBI GI NO: 15239856 NR Description: putative protein; protein id: At5g49340.1
  misc_feature (1)..(280): NCBI GI NO: 15242021 NR Description: putative protein; protein id: At5g20590
  misc_feature (1)..(280): NCBI GI NO: 21592371 NR Description: unknown [Arabidopsis thaliana]
  misc_feature (1)..(280): NCBI GI NO: 15228743 NR Description: putative protein; protein id: At3g62390
  misc_feature (1)..(278): NCBI GI NO: 9759321 NR Description: gb|AAF00670
MLRGRRLVFVGDSLNRNMWESLVCILKGSVKDETKVYEARGRHHFRGEAEYSFVFQDYNCTVEFFVSPFLVQEWEIVDKKGTKKETLRLDLVGKSSEQYKGADVIVFNTGHWWTHEKTSKGEDYYQEGSNVYHELAVLEAFRKALTTWGRWVEKNVNPAKSLVFFRGYSASHFSGGQWNSGGACDSETEPIKNDTYLTPYPSKMKVLEKVLRGMKTPVTYLNITRLTDYRKDGHPSVYRKQSLSEKEKKSPLLYQDCSHWCLPGVPDSWNEILYAELIVKLNQLSQTQRKT

SEQ ID NO: 2058 - protein, 274 aa, Arabidopsis thaliana
  peptide (1)..(274): Ceres Seq. ID no. 12482641
  misc_feature (1)..(274): NCBI GI NO: 9759298 NR Description: emb|CAB82953
  misc_feature (1)..(274): NCBI GI NO: 21618305 NR Description: unknown [Arabidopsis thaliana]
  misc_feature (1)..(274): NCBI GI NO: 18415287 NR Description: putative protein; protein id: At5g06700
  misc_feature (1)..(273): NCBI GI NO: 15229945 NR Description: hypothetical protein; protein id: At3g12060.1
  misc_feature (1)..(261): NCBI GI NO: 22330347 NR Description: hypothetical protein; protein id: At1g60790
  misc_feature (1)..(267): NCBI GI NO: 15239856 NR Description: putative protein; protein id: At5g49340.1
  misc_feature (1)..(263): NCBI GI NO: 15242021 NR Description: putative protein; protein id: At5g20590
  misc_feature (1)..(263): NCBI GI NO: 21592371 NR Description: unknown [Arabidopsis thaliana]
  misc_feature (1)..(263): NCBI GI NO: 15228743 NR Description: putative protein; protein id: At3g62390
  misc_feature (1)..(261): NCBI GI NO: 9759321 NR Description: gb|AAF00670
MWESLVCILKGSVKDETKVYEARGRHHFRGEAEYSFVFQDYNCTVEFFVSPFLVQEWEIVDKKGTKKETLRLDLVGKSSEQYKGADVIVFNTGHWWTHEKTSKGEDYYQEGSNVYHELAVLEAFRKALTTWGRWVEKNVNPAKSLVFFRGYSASHFSGGQWNSGGACDSETEPIKNDTYLTPYPSKMKVLEKVLRGMKTPVTYLNITRLTDYRKDGHPSVYRKQSLSEKEKKSPLLYQDCSHWCLPGVPDSWNEILYAELIVKLNQLSQTQRKT

SEQ ID NO: 2059 - DNA, 1387 bp, Arabidopsis thaliana
  misc_feature (1)..(1387): Ceres Seq. ID no. 12420491
aactttcatccctagttgctcgggagctttccccttcctgttcctgaagcttccgacatccgaccgcctcctcctcctcgttctactcgccgccccttctagaatcatccagaggcgtgccggtgaagcgcgagagcggtgaggcatggcgatgcagacgggggtcgcgacctccaaggtcctcatcctcgtcggtgcagggatgacgggctcgatcctgctgcggaatggccgcttatctgatgtgttgggagaactccagattatgaagggtgtaaatcaaggaacttcttcgggtccctatgacattgcacttattcaagctcagattcggaatttagcccaagaagtcagagatttgacattgtcaaagcccattaccatactgaatggcaaatctgactcgggaggcagtttatcatcctacatactgccagcagcagcagttggagcaatgggttattgctacatgtggtggaaggggttgtctctctcagatgtcatgtttgtcacaaaacacaacatggcaaatgctgttcagagcatgtcaaagcagttggagcaagtttcatcagcactagctgcaacaaaaagacatctaactcaacggcttgagaatttggatggcaaaatggatgaacaagtagaggtctccaaagctattagaaatgaggtcaatgatgttaaagatgacctgtctcaaattggatttgatgtcgaatcaattcagaaaatggttgctggattggagggaaagatcgagttacttgagaacaaacaggacgtggctaatactggtatctggtatctctgccaagtagcaggcggtttaaaagatggaataaacaccaggtttttccaggaaaccagtgagaagctgaagctctcacattcagctcaacctgaaaacaagccagtgaaggggcttgaatttttttcggaaagcaccatggaacagaaagtagctgactccaaaccaattgcggtgacagtcgacgctgagaagcctgagaaaaccgctgctgtaatgggcaccacagtgcacaggtctatcaggttctcatatcggaatgcaggccttgctttgtgatcaaatcctctccgcttgagatgcacgtggccttcctggttgctttttcttttttggcaacaaccttcctggttgctttgtgtgatggtcagaaaacatagaagaataacctgcaactggagtgacagaatttcttttccccgcagtagacaggtgtgcgttatttggttggaattatctccagtccactatcaatttttttttccttggattttgattcattttatgtttcgatttgttgccttatatactgtaaagtcattggaaagaataaataaaacacgaatgttttttgtc

SEQ ID NO: 2060 - protein, 314 aa, Arabidopsis thaliana
  peptide (1)..(314): Ceres Seq. ID no. 12420492
  misc_feature (1)..(302): NCBI GI NO: 18390460 NR Description: expressed protein; protein id: At1g04960
  misc_feature (1)..(282): NCBI GI NO: 21537323 NR Description: unknown [Arabidopsis thaliana]
  misc_feature (1)..(228): NCBI GI NO: 18396143 NR Description: bZIP family transcription factor
  misc_feature (1)..(228): NCBI GI NO: 25361065 NR Description: protein T7N9.6 [imported] - Arabidopsis thaliana
  misc_feature (1)..(248): NCBI GI NO: 15227027 NR Description: expressed protein; protein id: At2g02730
  misc_feature (1)..(248): NCBI GI NO: 7487252 NR Description: hypothetical protein At2g02730
  misc_feature (1)..(224): NCBI GI NO: 34906300 NR Description: unnamed protein product
  misc_feature (12)..(212): NCBI GI NO: 34894218 NR Description: P0439B06.30
  misc_feature (7)..(219): NCBI GI NO: 30688826 NR Description: expressed protein [Arabidopsis thaliana]
  misc_feature (11)..(224): NCBI GI NO: 22329773 NR Description: Expressed protein; protein id: At1g24265
MAMQTGVATSKVLILVGAGMTGSILLRNGRLSDVLGELQIMKGVNQGTSSGPYDIALIQAQIRNLAQEVRDLTLSKPITILNGKSDSGGSLSSYILPAAAVGAMGYCYMWWKGLSLSDVMFVTKHNMANAVQSMSKQLEQVSSALAATKRHLTQRLENLDGKMDEQVEVSKAIRNEVNDVKDDLSQIGFDVESIQKMVAGLEGKIELLENKQDVANTGIWYLCQVAGGLKDGINTRFFQETSEKLKLSHSAQPENKPVKGLEFFSESTMEQKVADSKPIAVTVDAEKPEKTAAVMGTTVHRSIRFSYRNAGLAL

SEQ ID NO: 2061 - protein, 312 aa, Arabidopsis thaliana
  peptide (1)..(312): Ceres Seq. ID no. 12420493
  misc_feature (1)..(300): NCBI GI NO: 18390460 NR Description: expressed protein; protein id: At1g04960
  misc_feature (1)..(280): NCBI GI NO: 21537323 NR Description: unknown [Arabidopsis thaliana]
  misc_feature (1)..(226): NCBI GI NO: 18396143 NR Description: bZIP family transcription factor
  misc_feature (1)..(226): NCBI GI NO: 25361065 NR Description: protein T7N9.6 [imported] - Arabidopsis thaliana
  misc_feature (1)..(246): NCBI GI NO: 15227027 NR Description: expressed protein; protein id: At2g02730
  misc_feature (1)..(246): NCBI GI NO: 7487252 NR Description: hypothetical protein At2g02730
  misc_feature (1)..(222): NCBI GI NO: 34906300 NR Description: unnamed protein product
  misc_feature (10)..(210): NCBI GI NO: 34894218 NR Description: P0439B06.30
  misc_feature (5)..(217): NCBI GI NO: 30688826 NR Description: expressed protein [Arabidopsis thaliana]
  misc_feature (9)..(222): NCBI GI NO: 22329773 NR Description: Expressed protein; protein id: At1g24265
MQTGVATSKVLILVGAGMTGSILLRNGRLSDVLGELQIMKGVNQGTSSGPYDIALIQAQIRNLAQEVRDLTLSKPITILNGKSDSGGSLSSYILPAAAVGAMGYCYMWWKGLSLSDVMFVTKHNMANAVQSMSKQLEQVSSALAATKRHLTQRLENLDGKMDEQVEVSKAIRNEVNDVKDDLSQIGFDVESIQKMVAGLEGKIELLENKQDVANTGIWYLCQVAGGLKDGINTRFFQETSEKLKLSHSAQPENKPVKGLEFFSESTMEQKVADSKPIAVTVDAEKPEKTAAVMGTTVHRSIRFSYRNAGLAL

SEQ ID NO: 2062 - protein, 295 aa, Arabidopsis thaliana
  peptide (1)..(295): Ceres Seq. ID no. 12420494
  misc_feature (1)..(283): NCBI GI NO: 18390460 NR Description: expressed protein; protein id: At1g04960
  misc_feature (1)..(263): NCBI GI NO: 21537323 NR Description: unknown [Arabidopsis thaliana]
  misc_feature (1)..(209): NCBI GI NO: 18396143 NR Description: bZIP family transcription factor
  misc_feature (1)..(209): NCBI GI NO: 25361065 NR Description: protein T7N9.6 [imported] - Arabidopsis thaliana
  misc_feature (1)..(229): NCBI GI NO: 15227027 NR Description: expressed protein; protein id: At2g02730
  misc_feature (1)..(229): NCBI GI NO: 7487252 NR Description: hypothetical protein At2g02730
  misc_feature (1)..(205): NCBI GI NO: 34906300 NR Description: unnamed protein product
  misc_feature (1)..(193): NCBI GI NO: 34894218 NR Description: P0439B06.30
  misc_feature (1)..(200): NCBI GI NO: 30688826 NR Description: expressed protein [Arabidopsis thaliana]
  misc_feature (1)..(205): NCBI GI NO: 22329773 NR Description: Expressed protein; protein id: At1g24265
MTGSILLRNGRLSDVLGELQIMKGVNQGTSSGPYDIALIQAQIRNLAQEVRDLTLSKPITILNGKSDSGGSLSSYILPAAAVGAMGYCYMWWKGLSLSDVMFVTKHNMANAVQSMSKQLEQVSSALAATKRHLTQRLENLDGKMDEQVEVSKAIRNEVNDVKDDLSQIGFDVESIQKMVAGLEGKIELLENKQDVANTGIWYLCQVAGGLKDGINTRFFQETSEKLKLSHSAQPENKPVKGLEFFSESTMEQKVADSKPIAVTVDAEKPEKTAAVMGTTVHRSIRFSYRNAGLAL

SEQ ID NO: 2063 - DNA, 1772 bp, Arabidopsis thaliana
  misc_feature (1)..(1772): Ceres Seq. ID no. 12329490
aacaagtcacacacttaaaacaaaacaaaacaaaacaaaaacagagcacacaaaaagagaaaccaagttttcttaaaaatggagctagaatcttctcctcctctacctcctcatgtgatgctcgtatcttttccagggcaaggccacgttaatccacttcttcgtcttggtaagctcttagcttcaaagggtttgctcataaccttcgtcaccactgagtcatggggcaaaaagatgcgaatctccaacaaaatccaagaccgtgtcctcaaaccggttggtaaaggctatctccggtatgatttcttcgacgacgggcttcctgaagacgacgaagctagcagaaccaacttaaccatcctccgaccacatctagagctggtcggcaaaagagagatcaagaaccttgtgaaacgttacaaggaagtaacgaaacagcccgtgacatgtcttatcaacaaccctttcgtctcttgggtctgtgacgtggcagaagatcttcaaatcccttgtgctgttctttgggttcaatcttgtgcctgcttagctgcttattactattaccaccacaacctagttgacttcccgaccaaaacagaacccgagatcgatgtccaaatctctggcatgcctctcttgaaacatgacgagatcccttctttcattcacccttcaagtcctcactccgctttgcgagaagtgatcatagatcagattaaacggcttcacaagactttctccattttcatcgacactttcaactcattggagaaagacatcattgaccacatgtcgacgctctctctccccggtgttatcagaccgctaggaccactctacaaaatggctaaaaccgtagcttatgatgtcgttaaagtaaacatctctgagccaacggatccttgcatggagtggttagactcgcagccagtttcctccgttgtttacatctcattcgggaccgttgcttacttgaaacaagaacaaatagacgagatcgcttacggtgtgttaaacgccgacgttacgttcttgtgggtgattagacaacaagagttaggtttcaacaaagagaaacatgttttgccggaagaagttaaagggaaagggaagatcgttgaatggtgttcacaagagaaagtattatctcatccttcagtggcatgtttcgtgactcactgtggatggaactcaacgatggaagctgtgtcttccggagtcccgacggtttgttttcctcaatggggagatcaagtcacggacgccgtttacatgatcgatgtttggaagacgggagtgaggctaagccgtggagaggcggaggagaggttagtgccgagggaggaagttgcggagaggttgagagaggttactaaaggagagaaagcgatcgagttgaaaaagaatgctttgaagtggaaggaagaggcggaggcggcggttgctcgcggtggttcgtcggataggaatcttgaaaagtttgtggagaagttgggtgccaaacctgtggggaaagtacaaaacgggagtcataatcatgtcttggctggatcaatcaaaagcttttaaaaagtcatttaagtttttttgttttttgcctttggtttctgcaaattcgtaattgtgtttgtatccatcctcccattgtgttctttgtttttctgtttactatttttttttggtatgggtctaggggagagtcaatgaccttactgaagaatgtcagtcacgcattaaaaaatatattattaatggttaatactatatcttgc

SEQ ID NO: 2064 - protein, 496 aa, Arabidopsis thaliana
  peptide (1)..(496): Ceres Seq. ID no. 12329491
  misc_feature (31)..(476): Pfam Name: Pfam Description:  UDP-glucoronosyl and UDP-glucosyl transferase
  misc_feature (1)..(496): NCBI GI NO: 15233091 NR Description: UDP-glucosyltransferase, putative
  misc_feature (1)..(496): NCBI GI NO: 20259348 NR Description: putative UDP-glucose:indole-3-acetate beta-D-glucosyltransferase
  misc_feature (1)..(494): NCBI GI NO: 9794913 NR Description: UDP-glucose:sinapate glucosyltransferase
  misc_feature (7)..(485): NCBI GI NO: 21593030 NR Description: indole-3-acetate beta-glucosyltransferase like
  misc_feature (7)..(485): NCBI GI NO: 15234616 NR Description: UDP-glycosyltransferase, putative
  misc_feature (1)..(482): NCBI GI NO: 15234619 NR Description: indole-3-acetate beta-glucosyltransferase like
  misc_feature (1)..(483): NCBI GI NO: 25082972 NR Description: indole-3-acetate beta-glucosyltransferase like
  misc_feature (1)..(483): NCBI GI NO: 30683281 NR Description: UDP-glycosyltransferase family
  misc_feature (1)..(483): NCBI GI NO: 7433899 NR Description: probable indole-3-acetate beta-glucosyltransferase -Arabidopsis thaliana
  misc_feature (12)..(472): NCBI GI NO: 13431605 NR Description: Limonoid UDP-glucosyltransferase
MELESSPPLPPHVMLVSFPGQGHVNPLLRLGKLLASKGLLITFVTTESWGKKMRISNKIQDRVLKPVGKGYLRYDFFDDGLPEDDEASRTNLTILRPHLELVGKREIKNLVKRYKEVTKQPVTCLINNPFVSWVCDVAEDLQIPCAVLWVQSCACLAAYYYYHHNLVDFPTKTEPEIDVQISGMPLLKHDEIPSFIHPSSPHSALREVIIDQIKRLHKTFSIFIDTFNSLEKDIIDHMSTLSLPGVIRPLGPLYKMAKTVAYDVVKVNISEPTDPCMEWLDSQPVSSVVYISFGTVAYLKQEQIDEIAYGVLNADVTFLWVIRQQELGFNKEKHVLPEEVKGKGKIVEWCSQEKVLSHPSVACFVTHCGWNSTMEAVSSGVPTVCFPQWGDQVTDAVYMIDVWKTGVRLSRGEAEERLVPREEVAERLREVTKGEKAIELKKNALKWKEEAEAAVARGGSSDRNLEKFVEKLGAKPVGKVQNGSHNHVLAGSIKSF

SEQ ID NO: 2065 - protein, 483 aa, Arabidopsis thaliana
  peptide (1)..(483): Ceres Seq. ID no. 12329492
  misc_feature (18)..(463): Pfam Name: Pfam Description:  UDP-glucoronosyl and UDP-glucosyl transferase
  misc_feature (1)..(483): NCBI GI NO: 15233091 NR Description: UDP-glucosyltransferase, putative
  misc_feature (1)..(483): NCBI GI NO: 20259348 NR Description: putative UDP-glucose:indole-3-acetate beta-D-glucosyltransferase
  misc_feature (1)..(481): NCBI GI NO: 9794913 NR Description: UDP-glucose:sinapate glucosyltransferase
  misc_feature (1)..(472): NCBI GI NO: 21593030 NR Description: indole-3-acetate beta-glucosyltransferase like
  misc_feature (1)..(472): NCBI GI NO: 15234616 NR Description: UDP-glycosyltransferase, putative
  misc_feature (1)..(469): NCBI GI NO: 15234619 NR Description: indole-3-acetate beta-glucosyltransferase like
  misc_feature (1)..(470): NCBI GI NO: 25082972 NR Description: indole-3-acetate beta-glucosyltransferase like
  misc_feature (1)..(470): NCBI GI NO: 30683281 NR Description: UDP-glycosyltransferase family
  misc_feature (1)..(470): NCBI GI NO: 7433899 NR Description: probable indole-3-acetate beta-glucosyltransferase -Arabidopsis thaliana
  misc_feature (1)..(459): NCBI GI NO: 13431605 NR Description: Limonoid UDP-glucosyltransferase
MLVSFPGQGHVNPLLRLGKLLASKGLLITFVTTESWGKKMRISNKIQDRVLKPVGKGYLRYDFFDDGLPEDDEASRTNLTILRPHLELVGKREIKNLVKRYKEVTKQPVTCLINNPFVSWVCDVAEDLQIPCAVLWVQSCACLAAYYYYHHNLVDFPTKTEPEIDVQISGMPLLKHDEIPSFIHPSSPHSALREVIIDQIKRLHKTFSIFIDTFNSLEKDIIDHMSTLSLPGVIRPLGPLYKMAKTVAYDVVKVNISEPTDPCMEWLDSQPVSSVVYISFGTVAYLKQEQIDEIAYGVLNADVTFLWVIRQQELGFNKEKHVLPEEVKGKGKIVEWCSQEKVLSHPSVACFVTHCGWNSTMEAVSSGVPTVCFPQWGDQVTDAVYMIDVWKTGVRLSRGEAEERLVPREEVAERLREVTKGEKAIELKKNALKWKEEAEAAVARGGSSDRNLEKFVEKLGAKPVGKVQNGSHNHVLAGSIKSF

SEQ ID NO: 2066 - protein, 444 aa, Arabidopsis thaliana
  peptide (1)..(444): Ceres Seq. ID no. 12329493
  misc_feature (1)..(424): Pfam Name: Pfam Description:  UDP-glucoronosyl and UDP-glucosyl transferase
  misc_feature (1)..(444): NCBI GI NO: 15233091 NR Description: UDP-glucosyltransferase, putative
  misc_feature (1)..(444): NCBI GI NO: 20259348 NR Description: putative UDP-glucose:indole-3-acetate beta-D-glucosyltransferase
  misc_feature (1)..(442): NCBI GI NO: 9794913 NR Description: UDP-glucose:sinapate glucosyltransferase
  misc_feature (1)..(433): NCBI GI NO: 21593030 NR Description: indole-3-acetate beta-glucosyltransferase like
  misc_feature (1)..(433): NCBI GI NO: 15234616 NR Description: UDP-glycosyltransferase, putative
  misc_feature (1)..(430): NCBI GI NO: 15234619 NR Description: indole-3-acetate beta-glucosyltransferase like
  misc_feature (1)..(431): NCBI GI NO: 25082972 NR Description: indole-3-acetate beta-glucosyltransferase like
  misc_feature (1)..(431): NCBI GI NO: 30683281 NR Description: UDP-glycosyltransferase family
  misc_feature (1)..(431): NCBI GI NO: 7433899 NR Description: probable indole-3-acetate beta-glucosyltransferase -Arabidopsis thaliana
  misc_feature (1)..(420): NCBI GI NO: 13431605 NR Description: Limonoid UDP-glucosyltransferase
MRISNKIQDRVLKPVGKGYLRYDFFDDGLPEDDEASRTNLTILRPHLELVGKREIKNLVKRYKEVTKQPVTCLINNPFVSWVCDVAEDLQIPCAVLWVQSCACLAAYYYYHHNLVDFPTKTEPEIDVQISGMPLLKHDEIPSFIHPSSPHSALREVIIDQIKRLHKTFSIFIDTFNSLEKDIIDHMSTLSLPGVIRPLGPLYKMAKTVAYDVVKVNISEPTDPCMEWLDSQPVSSVVYISFGTVAYLKQEQIDEIAYGVLNADVTFLWVIRQQELGFNKEKHVLPEEVKGKGKIVEWCSQEKVLSHPSVACFVTHCGWNSTMEAVSSGVPTVCFPQWGDQVTDAVYMIDVWKTGVRLSRGEAEERLVPREEVAERLREVTKGEKAIELKKNALKWKEEAEAAVARGGSSDRNLEKFVEKLGAKPVGKVQNGSHNHVLAGSIKSF

SEQ ID NO: 2067 - DNA, 780 bp, Arabidopsis thaliana
  misc_feature (1)..(780): Ceres Seq. ID no. 12603324
acaatggcgaatcttcccaccgttctcgtcaccggcgctagtggcagaacaggccagattgtgtataagaagctgaaggaggggtcagacaagtttgtagcaaagggtttagttagaagtgctcaaggaaaagagaaaattggaggagaagctgatgttttcattggggatataacagatgctgatagcattaaccctgcgtttcaaggaatcgatgcgcttgtgattctcactagtgctgtgcctaaaatgaaacctggttttgatcccactaaaggtggaagacctgagttcattttcgaagatggacagtatcctgatcatcctttgaacaaactgggaaatgggaatatactggtttggaagagaaaggctgaacagtaccttgctgattctggaactccttacacaattatcagagctggaggacttctagataaggaaggcggtgtacagctgctagttggtaaagacgatgagctacttcagacagacacgaaaaccgtccccagggctgatgttgcagaagtctgcattcaggcattgctgttcgaggaggccaagaacaaagctttcgatctcggctcaaagccagagggaaccagtaccccaaccaaagacttcaaggctctcttctctcaagtcacctctcgtttttaaatcattatctttgttgccaataagaacatttgggatcaaaccttctaaaataaattctgtagtgtctatttgaaaggatacgttctttcaattcaatgagaatattggggttgaatgtcc

SEQ ID NO: 2068 - protein, 219 aa, Arabidopsis thaliana
  peptide (1)..(219): Ceres Seq. ID no. 12603325
  misc_feature (103)..(219): NCBI GI NO: 18413869 NR Description: putative protein; protein id: At5g02240
  misc_feature (2)..(117): NCBI GI NO: 18413869 NR Description: putative protein; protein id: At5g02240
  misc_feature (2)..(117): NCBI GI NO: 11358410 NR Description: hypothetical protein T7H20
  misc_feature (103)..(214): NCBI GI NO: 11358410 NR Description: hypothetical protein T7H20
  misc_feature (107)..(219): NCBI GI NO: 14719331 NR Description: putative 3-beta hydroxysteroid dehydrogenase/isomeraseprotein
  misc_feature (5)..(117): NCBI GI NO: 14719331 NR Description: putative 3-beta hydroxysteroid dehydrogenase/isomeraseprotein
  misc_feature (103)..(219): NCBI GI NO: 34897418 NR Description: unknown protein
  misc_feature (6)..(117): NCBI GI NO: 34897418 NR Description: unknown protein
  misc_feature (107)..(219): NCBI GI NO: 7485430 NR Description: hypothetical protein At2g37660
  misc_feature (107)..(219): NCBI GI NO: 18404496 NR Description: expressed protein; protein id: At2g37660
TMANLPTVLVTGASGRTGQIVYKKLKEGSDKFVAKGLVRSAQGKEKIGGEADVFIGDITDADSINPAFQGIDALVILTSAVPKMKPGFDPTKGGRPEFIFEDGQYPDHPLNKLGNGNILVWKRKAEQYLADSGTPYTIIRAGGLLDKEGGVQLLVGKDDELLQTDTKTVPRADVAEVCIQALLFEEAKNKAFDLGSKPEGTSTPTKDFKALFSQVTSRF

SEQ ID NO: 2069 - protein, 218 aa, Arabidopsis thaliana
  peptide (1)..(218): Ceres Seq. ID no. 12603326
  misc_feature (102)..(218): NCBI GI NO: 18413869 NR Description: putative protein; protein id: At5g02240
  misc_feature (1)..(116): NCBI GI NO: 18413869 NR Description: putative protein; protein id: At5g02240
  misc_feature (1)..(116): NCBI GI NO: 11358410 NR Description: hypothetical protein T7H20
  misc_feature (102)..(213): NCBI GI NO: 11358410 NR Description: hypothetical protein T7H20
  misc_feature (106)..(218): NCBI GI NO: 14719331 NR Description: putative 3-beta hydroxysteroid dehydrogenase/isomeraseprotein
  misc_feature (4)..(116): NCBI GI NO: 14719331 NR Description: putative 3-beta hydroxysteroid dehydrogenase/isomeraseprotein
  misc_feature (102)..(218): NCBI GI NO: 34897418 NR Description: unknown protein
  misc_feature (5)..(116): NCBI GI NO: 34897418 NR Description: unknown protein
  misc_feature (106)..(218): NCBI GI NO: 7485430 NR Description: hypothetical protein At2g37660
  misc_feature (106)..(218): NCBI GI NO: 18404496 NR Description: expressed protein; protein id: At2g37660
MANLPTVLVTGASGRTGQIVYKKLKEGSDKFVAKGLVRSAQGKEKIGGEADVFIGDITDADSINPAFQGIDALVILTSAVPKMKPGFDPTKGGRPEFIFEDGQYPDHPLNKLGNGNILVWKRKAEQYLADSGTPYTIIRAGGLLDKEGGVQLLVGKDDELLQTDTKTVPRADVAEVCIQALLFEEAKNKAFDLGSKPEGTSTPTKDFKALFSQVTSRF

SEQ ID NO: 2070 - protein, 136 aa, Arabidopsis thaliana
  peptide (1)..(136): Ceres Seq. ID no. 12603327
  misc_feature (20)..(136): NCBI GI NO: 18413869 NR Description: putative protein; protein id: At5g02240
  misc_feature (1)..(34): NCBI GI NO: 18413869 NR Description: putative protein; protein id: At5g02240
  misc_feature (1)..(34): NCBI GI NO: 11358410 NR Description: hypothetical protein T7H20
  misc_feature (20)..(131): NCBI GI NO: 11358410 NR Description: hypothetical protein T7H20
  misc_feature (24)..(136): NCBI GI NO: 14719331 NR Description: putative 3-beta hydroxysteroid dehydrogenase/isomeraseprotein
  misc_feature (1)..(34): NCBI GI NO: 14719331 NR Description: putative 3-beta hydroxysteroid dehydrogenase/isomeraseprotein
  misc_feature (20)..(136): NCBI GI NO: 34897418 NR Description: unknown protein
  misc_feature (1)..(34): NCBI GI NO: 34897418 NR Description: unknown protein
  misc_feature (24)..(136): NCBI GI NO: 7485430 NR Description: hypothetical protein At2g37660
  misc_feature (24)..(136): NCBI GI NO: 18404496 NR Description: expressed protein; protein id: At2g37660
MKPGFDPTKGGRPEFIFEDGQYPDHPLNKLGNGNILVWKRKAEQYLADSGTPYTIIRAGGLLDKEGGVQLLVGKDDELLQTDTKTVPRADVAEVCIQALLFEEAKNKAFDLGSKPEGTSTPTKDFKALFSQVTSRF

SEQ ID NO: 2071 - DNA, 1041 bp, Arabidopsis thaliana
  misc_feature (1)..(1041): Ceres Seq. ID no. 12420773
ctccgatttagatagaaacaacaatcctccggtggtcactcgctaatctccgtttgatctcgccgacactcgagccttttaccgatgaaggatggagattccttaccaataagcacttcttccgtcacggcgacgacggtgaccggaaagaaggaaaccggttattccgctctcttctcgaaaggccggtacaagttttgggccttagctgcgattctgttactcgctttctggtcaatgctcactggcacggtcaatctccgttggtctgccggtaacattaaccatttcaccgacgatctcgtctttcccatccacgaggatctcgatgttcttgtgagtcttcttcttcttcgcgatctgttttctgatttctgtgaattacgtttgttttgtgttgtgttgatgaggttattaggaaatggaggagagggagaaagtggtgaagcacatgtgggatgtgtataacaatggccgtcgtatcagattacctaggttttggcaagaggccttcgaggctgcttacgaggagcttaccagtgatgtacccgatgtggttgaggctgccatttccgagatcgctaggatgtctattcgctccattgttatagatccgcctccgcttcattccacgaatgtacgagaattgacaaagactctaaaacttgcggacaaaggaagagcaactcaaatatcaaaaccaagcagccgtcgattgaaatagctatggaggctttacgaaaaaggtagtgtagcagtcagccgtcgtggcgtgaccatacatatacttgatgtcagaaagatcaatcaacctcatccctagaatatatgtccatcattagtgttattttttcttccactaggggcattaatcctttcactatcatcatcatctcttctataaacaaaattttgaggaagctttttatccactccttattagctctgaacggtaatgtcttctattttggatttatgaaatatttcatatgtagttagcccatacatttaaataccttccaatgaattttctagttatat

SEQ ID NO: 2072 - protein, 127 aa, Arabidopsis thaliana
  peptide (1)..(127): Ceres Seq. ID no. 12420774
  misc_feature (1)..(84): NCBI GI NO: 18424975 NR Description: putative protein; protein id: At5g65650
  misc_feature (1)..(84): NCBI GI NO: 15234477 NR Description: hypothetical protein; protein id: At4g36660.1
  misc_feature (1)..(84): NCBI GI NO: 9858772 NR Description: BAC19.4 [Lycopersicon esculentum]
  misc_feature (31)..(84): NCBI GI NO: 28209490 NR Description: unknown protein
  misc_feature (36)..(84): NCBI GI NO: 15222008 NR Description: hypothetical protein; protein id: At1g19380.1
MKDGDSLPISTSSVTATTVTGKKETGYSALFSKGRYKFWALAAILLLAFWSMLTGTVNLRWSAGNINHFTDDLVFPIHEDLDVLVSLLLLRDLFSDFCELRLFCVVLMRLLGNGGEGESGEAHVGCV

SEQ ID NO: 2073 - protein, 100 aa, Arabidopsis thaliana
  peptide (1)..(100): Ceres Seq. ID no. 12420775
  misc_feature (1)..(100): NCBI GI NO: 18424975 NR Description: putative protein; protein id: At5g65650
  misc_feature (1)..(71): NCBI GI NO: 9858772 NR Description: BAC19.4 [Lycopersicon esculentum]
  misc_feature (1)..(70): NCBI GI NO: 15234477 NR Description: hypothetical protein; protein id: At4g36660.1
  misc_feature (1)..(66): NCBI GI NO: 28209490 NR Description: unknown protein
  misc_feature (1)..(58): NCBI GI NO: 15222008 NR Description: hypothetical protein; protein id: At1g19380.1
MEEREKVVKHMWDVYNNGRRIRLPRFWQEAFEAAYEELTSDVPDVVEAAISEIARMSIRSIVIDPPPLHSTNVRELTKTLKLADKGRATQISKPSSRRLK

SEQ ID NO: 2074 - protein, 90 aa, Arabidopsis thaliana
  peptide (1)..(90): Ceres Seq. ID no. 12420776
  misc_feature (1)..(90): NCBI GI NO: 18424975 NR Description: putative protein; protein id: At5g65650
  misc_feature (1)..(61): NCBI GI NO: 9858772 NR Description: BAC19.4 [Lycopersicon esculentum]
  misc_feature (1)..(60): NCBI GI NO: 15234477 NR Description: hypothetical protein; protein id: At4g36660.1
  misc_feature (1)..(56): NCBI GI NO: 28209490 NR Description: unknown protein
  misc_feature (1)..(48): NCBI GI NO: 15222008 NR Description: hypothetical protein; protein id: At1g19380.1
MWDVYNNGRRIRLPRFWQEAFEAAYEELTSDVPDVVEAAISEIARMSIRSIVIDPPPLHSTNVRELTKTLKLADKGRATQISKPSSRRLK

SEQ ID NO: 2075 - DNA, 825 bp, Arabidopsis thaliana
  misc_feature (1)..(825): Ceres Seq. ID no. 12336410
attaaaaagctaatatggctactagggaagagagagataagtatagatcagtccttgaagatgcatgacaggttcaatggaggtatgataaccctccagacttcaatagtgtgaaccagctctttgaagaaggccagactaaggtgtggccagaaggttcgttagaagagacagtgcaaaacgcgatcaagtcatgggagatggagttctcacataagatccgtttacaggacttcaagactataaaccctgagaagtttaagctctttgtcaatggtttatcagctgaagagacgcttaggcttgggagttacaatgctttgctcaagaactctttgcctgaagagtttcagtactataagcccgaggaagagagctttgagtcatcacatgacgcctttagatctgctttaccacgcgggtttgcgtgggaaatactctctgtgtactcggggccgcctgttatagccttcaaatttagacactggggatactttgaaggaactttcaaaggtcatgctcctactggggaaatggttcaattcctgggtctaggagttctaaaggttgacgaatcacttagagcagaggagattgagatttactatgatccaggagagctgttcgggggactactcaagggacctcctatatcagagaccaaaaccacagacagtggagacaacactgcagagaaacaaagctgcccattcacacactaagataataagaaaagcagaagtgtatttgaccctttaaagaatatattgtaacagtctcttggttattgatgcatggaataaattataagttatgttaggcgcc

SEQ ID NO: 2076 - protein, 173 aa, Arabidopsis thaliana
  peptide (1)..(173): Ceres Seq. ID no. 12336411
  misc_feature (1)..(173): NCBI GI NO: 18412106 NR Description: expressed protein; protein id: At1g78780
  misc_feature (1)..(173): NCBI GI NO: 25372796 NR Description: hypothetical protein F9K20.18
  misc_feature (1)..(173): NCBI GI NO: 30699354 NR Description: expressed protein [Arabidopsis thaliana]
  misc_feature (1)..(166): NCBI GI NO: 34910864 NR Description: putative pathogenesis related protein
  misc_feature (1)..(149): NCBI GI NO: 34910862 NR Description: putative pathogenesis related protein
  misc_feature (1)..(160): NCBI GI NO: 34904656 NR Description: putative pathogenesis related protein
  misc_feature (1)..(154): NCBI GI NO: 34904652 NR Description: putative pathogenesis related protein
  misc_feature (1)..(152): NCBI GI NO: 1346809 NR Description: Pathogen-related protein
  misc_feature (1)..(173): NCBI GI NO: 23129762 NR Description: hypothetical protein [Nostoc punctiforme]
  misc_feature (1)..(148): NCBI GI NO: 17227713 NR Description: similar to pathogenesis related protein
MEFSHKIRLQDFKTINPEKFKLFVNGLSAEETLRLGSYNALLKNSLPEEFQYYKPEEESFESSHDAFRSALPRGFAWEILSVYSGPPVIAFKFRHWGYFEGTFKGHAPTGEMVQFLGLGVLKVDESLRAEEIEIYYDPGELFGGLLKGPPISETKTTDSGDNTAEKQSCPFTH

SEQ ID NO: 2077 - DNA, 1977 bp, Arabidopsis thaliana
  misc_feature (1)..(1977): Ceres Seq. ID no. 13497255
acaaaattcctctttttttttatttaattaaaattgcatcaaaatgtttgttttcttgagccgaattattctattaagcgcattaaaaaagaaaaaaaaaaaagaaataggagctaatgtaatttagagaaactctatcaaagacttataataaccaaaacgaagacctattgtgaccaaatacaaagggtggggcagatcgtttctttgaatactatgatgtcttttagtttatgagttgctttatttctgatacttctcctccccattctcttatcctatcctcagccattgaagcctctgtgtcccaatttgttttgcagatcatccatgttaaaactattgtctgaaccacggtccccgtcaacattccacaccagattcccattacaccatagttaagcttgtaccccaataatagaccaaatgggattccaaacacgtaatagcaggcgatgttaacgtaggccaccactgcttgccatccagctcccacagccacactgataagacaggttggacattgttgatgacaatggaaagtgcaagtattggtgtgagttctttaacaagaatgatgactttttcgtctttcacaaaaagtgatggatattgatctctaaagatgagtagaatcattgatacaatgaatccgattagcgtcgatgttatcactgccacaagtagtgagaatttcgcggttcttggatggttagctcctaattcattagacactctcacacttacggctgtgttcatcccaatagcaatcatagcagtccatcccaaaatattcatgcagatggagagggcagctacagagatttcagcattcttcaaatatccagcaaataatatgattgccataaaataccaaacctccaaacagagcataacagcagaagccaaagataatctaacgaaactccacaaattatgaaaagcctcccacgagaaaccagaccaagcctcaccacacgtaccactaaatatgtacacaagctgagccatgtcaatgaagcaccacgacgcgttaagcactacggctagacctggcataccccactggagcttcacaatgacaaaccacgtgagaggcacgtgtataacaagtgcaacagccgatatcacggccatgaccattatcttgctttgcgattgcaaaaatttagcggttggaaaattgatggcgtaggcaaagatttgagggatcatgtagatggaaaatattccggccgcgctagagattgccgccgtttgaccaatggacgcgaggataggggcggcgaaaatgtaaaggagagagaggataagagcagtcacgtttagtatcacccatgatcgttgcaagtaaacgccaagcattgacaattttcctgctccaaacgcttgtccacatagcgtttctaacgcacttcccattccaagcatgatgccgaatgagaagccggcaacgacggagttttcgacggagacagcggcaagagcgatggtgctgatgtgaccggcgaagacctgagtaatagcgccgagagaatattggttcacggatgtgaaaatggcgggaccggccaagtaccatagctttttggtttccacgttgaattccctaacgaagccaccgacggtggtgatcggaggaatatcgtcgacggataagaaaggaagatcagaacgttcttccgccgcagtgagaagcgtctccgttatatctttgtcttttgccatcttaaggagaaagagatggagagattaaaggaggtcgaagactaaggaccaacgagtgaggatcttgggtttaatcattcatgaattatataggaaaaaaaaatgttaatacgtgcgaccaaaaaaattgtttttatgatataaaggaaaaaatagctaatatagcaactagcatttaataaaatggctaaatgtagacaaaatcattgttgtattaatcaaattatggtatatattatggatggattc

SEQ ID NO: 2078 - protein, 104 aa, Arabidopsis thaliana
  peptide (1)..(104): Ceres Seq. ID no. 13497256
MSRIIDTMNPISVDVITATSSENFAVLGWLAPNSLDTLTLTAVFIPIAIIAVHPKIFMQMERAATEISAFFKYPANNMIAIKYQTSKQSITAEAKDNLTKLHKL

SEQ ID NO: 2079 - protein, 97 aa, Arabidopsis thaliana
  peptide (1)..(97): Ceres Seq. ID no. 13497257
MNPISVDVITATSSENFAVLGWLAPNSLDTLTLTAVFIPIAIIAVHPKIFMQMERAATEISAFFKYPANNMIAIKYQTSKQSITAEAKDNLTKLHKL

SEQ ID NO: 2080 - protein, 65 aa, Arabidopsis thaliana
  peptide (1)..(65): Ceres Seq. ID no. 13497258
  misc_feature (1)..(61): NCBI GI NO: 18405005 NR Description: expressed protein [Arabidopsis thaliana]
MAGPAKYHSFLVSTLNSLTKPPTVVIGGISSTDKKGRSERSSAAVRSVSVISLSFAILRRKRWRD

SEQ ID NO: 2081 - DNA, 924 bp, Arabidopsis thaliana
  misc_feature (1)..(924): Ceres Seq. ID no. 12421272
aaggagacccaaatttcctgcaacaaacaaagtaaaaaagttgagaatggattcatcgcagggaagtacacaacagaagactgtgattctgaacagccacaatgagaacctggtgggtctgcttcatgaaactggttctacagaaattgtagtcttgtgtcatggctttcgatcaaacaagaacttcgaaattatgaaaaatgtggctgttgctatagagagagaagggattagtgctttccgttttgatttctccgggaatggagagagtgaaggcagtttctattatggtaactacaattacgaagctgatgatctacattctgttatccaatacttctctaacttgaaccgtgttgttactataattctcggtcacagtaaaggaggtgatgtggtcctcctctatgcctccaagtatcacgatatccccaatgtgatcaatctctcgggacgttatgatctgaagaaaggcataggagaacgtcttggtgaagattttttggaaagaattaagcaacaaggatacatcgatgttaaagatggagattctggttaccgtgttaccgaggagagtttgatggaccggttaaacacagatatgcatgaagcttgcctcaagattgacaaagaatgcagggtcttgacggtccatggatcgggtgacgagacagtaccagtggaagatgcaaaggagtttgcaaagataataccgaaccacgagctacagattgtggaaggagctgatcattgttataccaattatcaaagtcaattggttttaacggttatggagttcataaagagtcattgtgaagaaaaaaacgacaagacttgtaattgaccctccaatattgcattggacatttatttatgtttggttgaccaaataaatttataaaaggtaaataaaaatataatact

SEQ ID NO: 2082 - protein, 280 aa, Arabidopsis thaliana
  peptide (1)..(280): Ceres Seq. ID no. 12421273
  misc_feature (16)..(280): NCBI GI NO: 22135864 NR Description: putative protein [Arabidopsis thaliana]
  misc_feature (16)..(280): NCBI GI NO: 15232826 NR Description: putative protein; protein id: At3g47560
  misc_feature (16)..(280): NCBI GI NO: 21554728 NR Description: putative esterase [Arabidopsis thaliana]
  misc_feature (16)..(275): NCBI GI NO: 15220578 NR Description: hypothetical protein; protein id: At1g29840.1
  misc_feature (9)..(275): NCBI GI NO: 15228202 NR Description: putative protein; protein id: At3g47590.1
  misc_feature (26)..(276): NCBI GI NO: 15224799 NR Description: putative esterase; protein id: At2g19550.1
  misc_feature (24)..(270): NCBI GI NO: 34913068 NR Description: P0013G02.26
  misc_feature (18)..(269): NCBI GI NO: 34913064 NR Description: P0013G02.24
  misc_feature (25)..(278): NCBI GI NO: 11358640 NR Description: probable esterase-like protein - Arabidopsis thaliana
  misc_feature (25)..(278): NCBI GI NO: 18416707 NR Description: putative esterase - like protein
RRPKFPATNKVKKLRMDSSQGSTQQKTVILNSHNENLVGLLHETGSTEIVVLCHGFRSNKNFEIMKNVAVAIEREGISAFRFDFSGNGESEGSFYYGNYNYEADDLHSVIQYFSNLNRVVTIILGHSKGGDVVLLYASKYHDIPNVINLSGRYDLKKGIGERLGEDFLERIKQQGYIDVKDGDSGYRVTEESLMDRLNTDMHEACLKIDKECRVLTVHGSGDETVPVEDAKEFAKIIPNHELQIVEGADHCYTNYQSQLVLTVMEFIKSHCEEKNDKTCN

SEQ ID NO: 2083 - protein, 265 aa, Arabidopsis thaliana
  peptide (1)..(265): Ceres Seq. ID no. 12421274
  misc_feature (1)..(265): NCBI GI NO: 22135864 NR Description: putative protein [Arabidopsis thaliana]
  misc_feature (1)..(265): NCBI GI NO: 15232826 NR Description: putative protein; protein id: At3g47560
  misc_feature (1)..(265): NCBI GI NO: 21554728 NR Description: putative esterase [Arabidopsis thaliana]
  misc_feature (1)..(260): NCBI GI NO: 15220578 NR Description: hypothetical protein; protein id: At1g29840.1
  misc_feature (1)..(260): NCBI GI NO: 15228202 NR Description: putative protein; protein id: At3g47590.1
  misc_feature (11)..(261): NCBI GI NO: 15224799 NR Description: putative esterase; protein id: At2g19550.1
  misc_feature (9)..(255): NCBI GI NO: 34913068 NR Description: P0013G02.26
  misc_feature (3)..(254): NCBI GI NO: 34913064 NR Description: P0013G02.24
  misc_feature (10)..(263): NCBI GI NO: 11358640 NR Description: probable esterase-like protein - Arabidopsis thaliana
  misc_feature (10)..(263): NCBI GI NO: 18416707 NR Description: putative esterase - like protein
MDSSQGSTQQKTVILNSHNENLVGLLHETGSTEIVVLCHGFRSNKNFEIMKNVAVAIEREGISAFRFDFSGNGESEGSFYYGNYNYEADDLHSVIQYFSNLNRVVTIILGHSKGGDVVLLYASKYHDIPNVINLSGRYDLKKGIGERLGEDFLERIKQQGYIDVKDGDSGYRVTEESLMDRLNTDMHEACLKIDKECRVLTVHGSGDETVPVEDAKEFAKIIPNHELQIVEGADHCYTNYQSQLVLTVMEFIKSHCEEKNDKTCN

SEQ ID NO: 2084 - protein, 216 aa, Arabidopsis thaliana
  peptide (1)..(216): Ceres Seq. ID no. 12421275
  misc_feature (1)..(216): NCBI GI NO: 22135864 NR Description: putative protein [Arabidopsis thaliana]
  misc_feature (1)..(216): NCBI GI NO: 15232826 NR Description: putative protein; protein id: At3g47560
  misc_feature (1)..(216): NCBI GI NO: 21554728 NR Description: putative esterase [Arabidopsis thaliana]
  misc_feature (1)..(211): NCBI GI NO: 15220578 NR Description: hypothetical protein; protein id: At1g29840.1
  misc_feature (1)..(211): NCBI GI NO: 15228202 NR Description: putative protein; protein id: At3g47590.1
  misc_feature (1)..(212): NCBI GI NO: 15224799 NR Description: putative esterase; protein id: At2g19550.1
  misc_feature (1)..(206): NCBI GI NO: 34913068 NR Description: P0013G02.26
  misc_feature (1)..(205): NCBI GI NO: 34913064 NR Description: P0013G02.24
  misc_feature (1)..(214): NCBI GI NO: 11358640 NR Description: probable esterase-like protein - Arabidopsis thaliana
  misc_feature (1)..(214): NCBI GI NO: 18416707 NR Description: putative esterase - like protein
MKNVAVAIEREGISAFRFDFSGNGESEGSFYYGNYNYEADDLHSVIQYFSNLNRVVTIILGHSKGGDVVLLYASKYHDIPNVINLSGRYDLKKGIGERLGEDFLERIKQQGYIDVKDGDSGYRVTEESLMDRLNTDMHEACLKIDKECRVLTVHGSGDETVPVEDAKEFAKIIPNHELQIVEGADHCYTNYQSQLVLTVMEFIKSHCEEKNDKTCN

SEQ ID NO: 2085 - DNA, 1546 bp, Arabidopsis thaliana
  misc_feature (1)..(1546): Ceres Seq. ID no. 12712755
agagcttccacttccatcgtcgtcttctattttttcttctttcttcgatttcataccaaaacaagaactctctgttttcgacaaaaacgaaaccttgagatctattttgattgacttttaagaaagagagagatctttcttagaagattttgtctcgtcggcattgaagatccagggtttgtctttcgaaattcagagagaaaatgggtgatgaggcagagatcaaggaacatttaaagccacaagcttcatctgaaacaatggacaagaaacataatgtgaaagggaagaggttatggcagaaagtcaagtatcaattggtggagtttcattcattgcctgcttatttaagagacaatgagtacatcattggtcattaccgatccgaatggccgatcaaacagattcttctcagcatctttaccattcataatgagactttgaatgtttggacgcacttgattgggtttttcctgtttttggcgctcactatatacactgcaacgaaagtaccgagtgtcgtggatcttcattcgcttcaacaccgtttacccgatttgttgaggaaaacagatctccacaaacttcattctgagctcatggctcgccttccttctagtccatctagttggcatgtgatggaccttctttataactgtttgcctgaaagattttctcatggcaactacactgacatgtgtgttctgcattctgtgagggaagatcttgcaaacttgatagctcctttgatcttcaggccaattactcgatggccgttttatgcatttctaggtggtgctatgttctgtctattagcaagcagcacgtgccacctcctctcatgtcactccgagcgagtctcctacataatgcttaggcttgattacgccggcatcgcagctctaatagcgacttccttctaccctccggtttattactccttcatgtgtgatcctttcttctgcaacctctacttaggattcataaccatcttaggaatcgccactgtgcttgtttctctcctcccggttttccaaagcccggagtttcgggtggtgagggcgtctctgttctttggaatgggattctctggcttagctccgattcttcacaagctgataatcttttgggaccaacctgaagcccttcacacgacaggttatgagattttgatgggtttgctttatgggttaggagctctggtttatgcaactaggatcccagagagatggatgccgggtaaattcgatatagcaggacatagccatcagttgtttcatgttctggttgttgctggtgcgttcacgcactatagagctgggctagtgtatcttaagtggagagatattgaaggatgttgaagatgaagattgaagattagatggaatctttgaatcttgtttgtagtagcttcatataaaagttggattatgtaaagtcttatatgtaatcaaacgtttaattgtttcctttattcaacaaaggatttatattgttaatccacatatgtattactggttaaagaagctgaaggattcatattttt

SEQ ID NO: 2086 - protein, 385 aa, Arabidopsis thaliana
  peptide (1)..(385): Ceres Seq. ID no. 12712756
  misc_feature (73)..(374): Pfam Name: Hly-III / UPF0073 Pfam Description: Uncharacterised protein family
  misc_feature (1)..(385): NCBI GI NO: 15235657 NR Description: expressed protein; protein id: At4g37680
  misc_feature (1)..(374): NCBI GI NO: 15233813 NR Description: putative protein; protein id: At4g38320.1
  misc_feature (108)..(334): NCBI GI NO: 20330770 NR Description: Hypothetical protein
  misc_feature (187)..(385): NCBI GI NO: 15241302 NR Description: putative protein; protein id: At5g20270
  misc_feature (9)..(97): NCBI GI NO: 15241302 NR Description: putative protein; protein id: At5g20270
  misc_feature (164)..(380): NCBI GI NO: 18377749 NR Description: unknown protein [Arabidopsis thaliana]
  misc_feature (187)..(369): NCBI GI NO: 13272399 NR Description: hypothetical protein [Arabidopsis thaliana]
  misc_feature (187)..(369): NCBI GI NO: 18400468 NR Description: expressed protein; protein id: At2g24150
  misc_feature (22)..(100): NCBI GI NO: 18377749 NR Description: unknown protein [Arabidopsis thaliana]
  misc_feature (34)..(106): NCBI GI NO: 13272399 NR Description: hypothetical protein [Arabidopsis thaliana]
MGDEAEIKEHLKPQASSETMDKKHNVKGKRLWQKVKYQLVEFHSLPAYLRDNEYIIGHYRSEWPIKQILLSIFTIHNETLNVWTHLIGFFLFLALTIYTATKVPSVVDLHSLQHRLPDLLRKTDLHKLHSELMARLPSSPSSWHVMDLLYNCLPERFSHGNYTDMCVLHSVREDLANLIAPLIFRPITRWPFYAFLGGAMFCLLASSTCHLLSCHSERVSYIMLRLDYAGIAALIATSFYPPVYYSFMCDPFFCNLYLGFITILGIATVLVSLLPVFQSPEFRVVRASLFFGMGFSGLAPILHKLIIFWDQPEALHTTGYEILMGLLYGLGALVYATRIPERWMPGKFDIAGHSHQLFHVLVVAGAFTHYRAGLVYLKWRDIEGC

SEQ ID NO: 2087 - protein, 366 aa, Arabidopsis thaliana
  peptide (1)..(366): Ceres Seq. ID no. 12712757
  misc_feature (54)..(355): Pfam Name: Hly-III / UPF0073 Pfam Description: Uncharacterised protein family
  misc_feature (1)..(366): NCBI GI NO: 15235657 NR Description: expressed protein; protein id: At4g37680
  misc_feature (1)..(355): NCBI GI NO: 15233813 NR Description: putative protein; protein id: At4g38320.1
  misc_feature (89)..(315): NCBI GI NO: 20330770 NR Description: Hypothetical protein
  misc_feature (168)..(366): NCBI GI NO: 15241302 NR Description: putative protein; protein id: At5g20270
  misc_feature (1)..(78): NCBI GI NO: 15241302 NR Description: putative protein; protein id: At5g20270
  misc_feature (145)..(361): NCBI GI NO: 18377749 NR Description: unknown protein [Arabidopsis thaliana]
  misc_feature (168)..(350): NCBI GI NO: 13272399 NR Description: hypothetical protein [Arabidopsis thaliana]
  misc_feature (168)..(350): NCBI GI NO: 18400468 NR Description: expressed protein; protein id: At2g24150
  misc_feature (3)..(81): NCBI GI NO: 18377749 NR Description: unknown protein [Arabidopsis thaliana]
  misc_feature (15)..(87): NCBI GI NO: 13272399 NR Description: hypothetical protein [Arabidopsis thaliana]
MDKKHNVKGKRLWQKVKYQLVEFHSLPAYLRDNEYIIGHYRSEWPIKQILLSIFTIHNETLNVWTHLIGFFLFLALTIYTATKVPSVVDLHSLQHRLPDLLRKTDLHKLHSELMARLPSSPSSWHVMDLLYNCLPERFSHGNYTDMCVLHSVREDLANLIAPLIFRPITRWPFYAFLGGAMFCLLASSTCHLLSCHSERVSYIMLRLDYAGIAALIATSFYPPVYYSFMCDPFFCNLYLGFITILGIATVLVSLLPVFQSPEFRVVRASLFFGMGFSGLAPILHKLIIFWDQPEALHTTGYEILMGLLYGLGALVYATRIPERWMPGKFDIAGHSHQLFHVLVVAGAFTHYRAGLVYLKWRDIEGC

SEQ ID NO: 2088 - protein, 253 aa, Arabidopsis thaliana
  peptide (1)..(253): Ceres Seq. ID no. 12712758
  misc_feature (1)..(242): Pfam Name: Hly-III / UPF0073 Pfam Description: Uncharacterised protein family
  misc_feature (1)..(253): NCBI GI NO: 15235657 NR Description: expressed protein; protein id: At4g37680
  misc_feature (1)..(242): NCBI GI NO: 15233813 NR Description: putative protein; protein id: At4g38320.1
  misc_feature (1)..(202): NCBI GI NO: 20330770 NR Description: Hypothetical protein
  misc_feature (55)..(253): NCBI GI NO: 15241302 NR Description: putative protein; protein id: At5g20270
  misc_feature (32)..(248): NCBI GI NO: 18377749 NR Description: unknown protein [Arabidopsis thaliana]
  misc_feature (55)..(237): NCBI GI NO: 13272399 NR Description: hypothetical protein [Arabidopsis thaliana]
  misc_feature (55)..(237): NCBI GI NO: 18400468 NR Description: expressed protein; protein id: At2g24150
  misc_feature (32)..(248): NCBI GI NO: 30688829 NR Description: expressed protein [Arabidopsis thaliana]
  misc_feature (71)..(248): NCBI GI NO: 25407688 NR Description: hypothetical protein AT4g30850
  misc_feature (74)..(237): NCBI GI NO: 25309925 NR Description: hypothetical protein At2g24150
MARLPSSPSSWHVMDLLYNCLPERFSHGNYTDMCVLHSVREDLANLIAPLIFRPITRWPFYAFLGGAMFCLLASSTCHLLSCHSERVSYIMLRLDYAGIAALIATSFYPPVYYSFMCDPFFCNLYLGFITILGIATVLVSLLPVFQSPEFRVVRASLFFGMGFSGLAPILHKLIIFWDQPEALHTTGYEILMGLLYGLGALVYATRIPERWMPGKFDIAGHSHQLFHVLVVAGAFTHYRAGLVYLKWRDIEGC

SEQ ID NO: 2089 - DNA, 910 bp, Arabidopsis thaliana
  misc_feature (1)..(910): Ceres Seq. ID no. 13489408
atcaactctctctctcactttcacaactctccctttctatttctctctctagaaaaatatcatcatctatcaattatatagagtacttatttagattcatttcataaaaatggagaaaagagaaagtagtggtggttctggatcaggagatgcagaggtgagaaaagggccatggacgatggaagaagatttgattctcatcaattatatcgccaatcatggtgaaggtgtttggaactctctcgccaaatctgcaggactaaaacgcaccgggaaaagttgccggctccggtggctgaactacctccgacctgatgtgcgacggggaaatatcacaccagaagaacagctcaccatcatggaacttcatgcaaaatggggaaataggtggtcaaaaattgcaaagcatttaccaggaaggaccgacaatgagataaagaacttttggaggactaagatccagaaatacatcatcaagagcggagaaacgacgaccgttggatcacaaagctccgagtttataaaccatcatgcgacaacgagccatgtcatgaatgatactcaagaaaccatggatatgtattctccaacgacgtcgtatcaacatgccagcaatattaatcagcagcttaattatggtaattatgtgcctgaatccagttcgatcatgatgccattatctgttgatcaatccgaacaaaactattggagcgtcgatgatctttggcccatgaatatatataatggtaattaataaataagttcgttaaaacttatatatatttacggtccaaagagggttctatataaacagagtactgtatgggtttgcctcattgtttagaggtaggtacttaatataaggttggagatcttatatgaattaataaataactcgtatttactagat

SEQ ID NO: 2090 - protein, 214 aa, Arabidopsis thaliana
  peptide (1)..(214): Ceres Seq. ID no. 13489409
  misc_feature (19)..(66): Pfam Name: Pfam Description:  Myb-like DNA-binding domain
  misc_feature (1)..(214): NCBI GI NO: 21554734 NR Description: putative transcription factor MYB24
  misc_feature (1)..(214): NCBI GI NO: 15242669 NR Description: myb family transcription factor
  misc_feature (1)..(214): NCBI GI NO: 30688935 NR Description: myb family transcription factor (ATMYB3)
  misc_feature (1)..(214): NCBI GI NO: 2280528 NR Description: ATMYB3 [Arabidopsis thaliana]
  misc_feature (10)..(214): NCBI GI NO: 7438338 NR Description: Myb26 protein - garden pea
  misc_feature (12)..(214): NCBI GI NO: 82306 NR Description: myb-related protein 305 - garden snapdragon
  misc_feature (12)..(212): NCBI GI NO: 82311 NR Description: myb-related protein 340 - garden snapdragon
  misc_feature (1)..(168): NCBI GI NO: 40643882 NR Description: MYB8 protein [Gerbera hybrid cv. 'Terra Regina']
  misc_feature (14)..(171): NCBI GI NO: 13537530 NR Description: LhMyb [Lilium hybrid division I]
  misc_feature (14)..(179): NCBI GI NO: 15232137 NR Description: myb family transcription factor
MEKRESSGGSGSGDAEVRKGPWTMEEDLILINYIANHGEGVWNSLAKSAGLKRTGKSCRLRWLNYLRPDVRRGNITPEEQLTIMELHAKWGNRWSKIAKHLPGRTDNEIKNFWRTKIQKYIIKSGETTTVGSQSSEFINHHATTSHVMNDTQETMDMYSPTTSYQHASNINQQLNYGNYVPESSSIMMPLSVDQSEQNYWSVDDLWPMNIYNGN

SEQ ID NO: 2091 - protein, 191 aa, Arabidopsis thaliana
  peptide (1)..(191): Ceres Seq. ID no. 13489410
  misc_feature (1)..(43): Pfam Name: Pfam Description:  Myb-like DNA-binding domain
  misc_feature (1)..(191): NCBI GI NO: 21554734 NR Description: putative transcription factor MYB24
  misc_feature (1)..(191): NCBI GI NO: 15242669 NR Description: myb family transcription factor
  misc_feature (1)..(191): NCBI GI NO: 30688935 NR Description: myb family transcription factor (ATMYB3)
  misc_feature (1)..(191): NCBI GI NO: 2280528 NR Description: ATMYB3 [Arabidopsis thaliana]
  misc_feature (1)..(191): NCBI GI NO: 7438338 NR Description: Myb26 protein - garden pea
  misc_feature (1)..(191): NCBI GI NO: 82306 NR Description: myb-related protein 305 - garden snapdragon
  misc_feature (1)..(189): NCBI GI NO: 82311 NR Description: myb-related protein 340 - garden snapdragon
  misc_feature (1)..(145): NCBI GI NO: 40643882 NR Description: MYB8 protein [Gerbera hybrid cv. 'Terra Regina']
  misc_feature (1)..(148): NCBI GI NO: 13537530 NR Description: LhMyb [Lilium hybrid division I]
  misc_feature (1)..(156): NCBI GI NO: 15232137 NR Description: myb family transcription factor
MEEDLILINYIANHGEGVWNSLAKSAGLKRTGKSCRLRWLNYLRPDVRRGNITPEEQLTIMELHAKWGNRWSKIAKHLPGRTDNEIKNFWRTKIQKYIIKSGETTTVGSQSSEFINHHATTSHVMNDTQETMDMYSPTTSYQHASNINQQLNYGNYVPESSSIMMPLSVDQSEQNYWSVDDLWPMNIYNGN

SEQ ID NO: 2092 - protein, 131 aa, Arabidopsis thaliana
  peptide (1)..(131): Ceres Seq. ID no. 13489411
  misc_feature (1)..(131): NCBI GI NO: 21554734 NR Description: putative transcription factor MYB24
  misc_feature (1)..(131): NCBI GI NO: 15242669 NR Description: myb family transcription factor
  misc_feature (1)..(131): NCBI GI NO: 30688935 NR Description: myb family transcription factor (ATMYB3)
  misc_feature (1)..(131): NCBI GI NO: 2280528 NR Description: ATMYB3 [Arabidopsis thaliana]
  misc_feature (1)..(131): NCBI GI NO: 7438338 NR Description: Myb26 protein - garden pea
  misc_feature (1)..(131): NCBI GI NO: 82306 NR Description: myb-related protein 305 - garden snapdragon
  misc_feature (1)..(129): NCBI GI NO: 82311 NR Description: myb-related protein 340 - garden snapdragon
  misc_feature (1)..(85): NCBI GI NO: 40643882 NR Description: MYB8 protein [Gerbera hybrid cv. 'Terra Regina']
  misc_feature (1)..(88): NCBI GI NO: 13537530 NR Description: LhMyb [Lilium hybrid division I]
  misc_feature (1)..(96): NCBI GI NO: 15232137 NR Description: myb family transcription factor
MELHAKWGNRWSKIAKHLPGRTDNEIKNFWRTKIQKYIIKSGETTTVGSQSSEFINHHATTSHVMNDTQETMDMYSPTTSYQHASNINQQLNYGNYVPESSSIMMPLSVDQSEQNYWSVDDLWPMNIYNGN

SEQ ID NO: 2093 - DNA, 712 bp, Arabidopsis thaliana
  misc_feature (1)..(712): Ceres Seq. ID no. 12329505
agacaaatctccattccaactgtaaccaaaaaaagagaaaagcaaaaaaacactctctgcgattcacactaagtatctaatgtatcaagatcgtcaaggcgttgtaggaggcggaggcggtggcggttctgcgccacacggaatcatactcgccgtcgttgttgcattagtggtgcttgttccgttcttcatcggagacagtggtgaagccattacagatgcgatcgcagagcttcttagtccggtgggacttctattgcttcctatcatcctcctcctcactatacagtttctctcgtcggaacgtggttccttcgtgtcggccattttctccaccggagaacccgaatcgattcacagggttagcggatctcccgtgggtgttgctctcttcctcgtactgatcttgttcttactctactaccgcttctctatcttcggcggagatgatggttccgatgactgatgcgacgtcgtattttcagatctagttttttccctctttttcttttttagggaaaacaatatatttatgtctttattcgattttcgtttttattttattttgtttgacagttgaaagtcaaactatatacagcagttgcatttcatgtaggtacgcacgtgtgagtcacgtgagtgatgagtgtactgaggttgtataatttagtaaacatgatgtgattacgattaatatgaatcccgaactttt

SEQ ID NO: 2094 - protein, 128 aa, Arabidopsis thaliana
  peptide (1)..(128): Ceres Seq. ID no. 12329506
  misc_feature (1)..(128): NCBI GI NO: 18397751 NR Description: expressed protein; protein id: At3g06890
  misc_feature (10)..(126): NCBI GI NO: 22831149 NR Description: hypothetical protein~similar to Arabidopsis thalianachromosome3
  misc_feature (16)..(116): NCBI GI NO: 18402822 NR Description: hypothetical protein; protein id: At2g31940.1
MYQDRQGVVGGGGGGGSAPHGIILAVVVALVVLVPFFIGDSGEAITDAIAELLSPVGLLLLPIILLLTIQFLSSERGSFVSAIFSTGEPESIHRVSGSPVGVALFLVLILFLLYYRFSIFGGDDGSDD

SEQ ID NO: 2095 - DNA, 700 bp, Arabidopsis thaliana
  misc_feature (1)..(700): Ceres Seq. ID no. 12393963
gtgccgctttgttcctaaacgattttctgtctgttctctctttgctctctcgccctctcttgctcttctgggttcgccttcctcggctagggtttatcagtggtttgtcaatggaggcttcatcatctcaaccatccgattcttctgatcaaactgcttccaagttcctttctgacctcccgtctcgaggtttcttgtcttctaccgtcgtctcttccaatccgggaagcttgcgggtctacatttgtgagcatgacacatctcccccagaaggacagcttatcaaaacaaaccagcaaaatatactaatcagatctctcttgttaaagaagcaaaaaggcgaatctagttctaaagactcaaaaggaactgctgaagatggtcctaaaaagagggctgcaaatagagctctggacgacagaagctcagctaaaagagctgctaatgcatctagacaagaaggatcaagcagtcgcacaggcgaaagagactttcagtctttgaccgttgagaagctccgcgccatgctcaaggagaagggccttccaacaaaaggaagaaaggatgagctcattgcgcgtctgaagagtgccaactgaaatgaagttgagaagggtgctctggtgaatatatgtatctttagaggtttcccaaataggagagaattgttgttgttcttgatcaaatacaaatccttttg

SEQ ID NO: 2096 - protein, 198 aa, Arabidopsis thaliana
  peptide (1)..(198): Ceres Seq. ID no. 12393964
  misc_feature (37)..(187): NCBI GI NO: 15242782 NR Description: unknown protein; protein id: At5g63460.1
AALFLNDFLSVLSLLSRPLLLFWVRLPRLGFISGLSMEASSSQPSDSSDQTASKFLSDLPSRGFLSSTVVSSNPGSLRVYICEHDTSPPEGQLIKTNQQNILIRSLLLKKQKGESSSKDSKGTAEDGPKKRAANRALDDRSSAKRAANASRQEGSSSRTGERDFQSLTVEKLRAMLKEKGLPTKGRKDELIARLKSAN

SEQ ID NO: 2097 - protein, 162 aa, Arabidopsis thaliana
  peptide (1)..(162): Ceres Seq. ID no. 12393965
  misc_feature (1)..(151): NCBI GI NO: 15242782 NR Description: unknown protein; protein id: At5g63460.1
MEASSSQPSDSSDQTASKFLSDLPSRGFLSSTVVSSNPGSLRVYICEHDTSPPEGQLIKTNQQNILIRSLLLKKQKGESSSKDSKGTAEDGPKKRAANRALDDRSSAKRAANASRQEGSSSRTGERDFQSLTVEKLRAMLKEKGLPTKGRKDELIARLKSAN

SEQ ID NO: 2098 - DNA, 697 bp, Arabidopsis thaliana
  misc_feature (1)..(697): Ceres Seq. ID no. 12604897
  misc_feature (613)..(613): n is a, c, t, g, unknown, or other
  misc_feature (519)..(519): n is a, c, t, g, unknown, or other
  misc_feature (524)..(524): n is a, c, t, g, unknown, or other
  misc_feature (638)..(638): n is a, c, t, g, unknown, or other
  misc_feature (585)..(585): n is a, c, t, g, unknown, or other
  misc_feature (521)..(521): n is a, c, t, g, unknown, or other
  misc_feature (567)..(567): n is a, c, t, g, unknown, or other
  misc_feature (575)..(575): n is a, c, t, g, unknown, or other
  misc_feature (532)..(532): n is a, c, t, g, unknown, or other
  misc_feature (541)..(541): n is a, c, t, g, unknown, or other
  misc_feature (616)..(616): n is a, c, t, g, unknown, or other
  misc_feature (667)..(667): n is a, c, t, g, unknown, or other
  misc_feature (650)..(650): n is a, c, t, g, unknown, or other
  misc_feature (651)..(651): n is a, c, t, g, unknown, or other
  misc_feature (555)..(555): n is a, c, t, g, unknown, or other
  misc_feature (581)..(581): n is a, c, t, g, unknown, or other
  misc_feature (633)..(633): n is a, c, t, g, unknown, or other
  misc_feature (551)..(551): n is a, c, t, g, unknown, or other
  misc_feature (648)..(648): n is a, c, t, g, unknown, or other
  misc_feature (603)..(603): n is a, c, t, g, unknown, or other
  misc_feature (574)..(574): n is a, c, t, g, unknown, or other
atctttagccgcctacttggtatcatcaaatcgaggagattcgaagaagcatggtgggatttaagaacagatacatgttaatggaagtttttctggatccggacaaggatcttctcggagaaggaacaccgatcattcttacacaattcaatctctcgaaagcaatcaaagacagtatcctcgtcaatttcggcgagtgtggtctaggttcgtctctcggttccttccaagtgaaatatgtgaatccaatcacgaagctgtgcattgtaagatcatcaagagaagaacacagacaagtttggttagcaatcacattggtcaaaagcatcggaaactgtccggtgatcttaaacttgctcgatatcagcggttgcatcagagcgtgtagagacacagccttgaagtgcgacaaggagaagtttgagcagtgtagcaaaagcttgtctgaagaggagattaggcagatgaatactttctctttgagaagatcaaacctattggaaacttgaaccttttctnanccntttttccnttcgatttngccccttaantttngaaatggtccantcttggnntttttnttanttttgaaatccaaagggntaagaaccanctncattccctgaaaagatngtttncgatttgaancnntgggtttttatatgtnggaattaaaataagagggtgtgaattgttg

SEQ ID NO: 2099 - protein, 152 aa, Arabidopsis thaliana
  peptide (1)..(152): Ceres Seq. ID no. 12604898
  misc_feature (7)..(97): Pfam Name: Pfam Description:  Rpp14 family
  misc_feature (1)..(151): NCBI GI NO: 22329330 NR Description: similar to Probable lipoate-protein ligase B
  misc_feature (1)..(97): NCBI GI NO: 3122357 NR Description: Probable lipoate-protein ligase
  misc_feature (1)..(125): NCBI GI NO: 38343977 NR Description: OSJNBa0041M21.1
  misc_feature (1)..(125): NCBI GI NO: 38568007 NR Description: OSJNBb0068N06.26
  misc_feature (1)..(136): NCBI GI NO: 19075979 NR Description: putative pre-tRNA/pre-rRNA processing protein
  misc_feature (1)..(151): NCBI GI NO: 20270249 NR Description: RNase MRP/RNase P protein-like [Homo sapiens]
MVGFKNRYMLMEVFLDPDKDLLGEGTPIILTQFNLSKAIKDSILVNFGECGLGSSLGSFQVKYVNPITKLCIVRSSREEHRQVWLAITLVKSIGNCPVILNLLDISGCIRACRDTALKCDKEKFEQCSKSLSEEEIRQMNTFSLRRSNLLET

SEQ ID NO: 2100 - protein, 144 aa, Arabidopsis thaliana
  peptide (1)..(144): Ceres Seq. ID no. 12604899
  misc_feature (1)..(89): Pfam Name: Pfam Description:  Rpp14 family
  misc_feature (1)..(143): NCBI GI NO: 22329330 NR Description: similar to Probable lipoate-protein ligase B
  misc_feature (1)..(89): NCBI GI NO: 3122357 NR Description: Probable lipoate-protein ligase
  misc_feature (1)..(117): NCBI GI NO: 38343977 NR Description: OSJNBa0041M21.1
  misc_feature (1)..(117): NCBI GI NO: 38568007 NR Description: OSJNBb0068N06.26
  misc_feature (1)..(128): NCBI GI NO: 19075979 NR Description: putative pre-tRNA/pre-rRNA processing protein
  misc_feature (1)..(143): NCBI GI NO: 20270249 NR Description: RNase MRP/RNase P protein-like [Homo sapiens]
MLMEVFLDPDKDLLGEGTPIILTQFNLSKAIKDSILVNFGECGLGSSLGSFQVKYVNPITKLCIVRSSREEHRQVWLAITLVKSIGNCPVILNLLDISGCIRACRDTALKCDKEKFEQCSKSLSEEEIRQMNTFSLRRSNLLET

SEQ ID NO: 2101 - protein, 142 aa, Arabidopsis thaliana
  peptide (1)..(142): Ceres Seq. ID no. 12604900
  misc_feature (1)..(87): Pfam Name: Pfam Description:  Rpp14 family
  misc_feature (1)..(141): NCBI GI NO: 22329330 NR Description: similar to Probable lipoate-protein ligase B
  misc_feature (1)..(87): NCBI GI NO: 3122357 NR Description: Probable lipoate-protein ligase
  misc_feature (1)..(115): NCBI GI NO: 38343977 NR Description: OSJNBa0041M21.1
  misc_feature (1)..(115): NCBI GI NO: 38568007 NR Description: OSJNBb0068N06.26
  misc_feature (1)..(126): NCBI GI NO: 19075979 NR Description: putative pre-tRNA/pre-rRNA processing protein
  misc_feature (1)..(141): NCBI GI NO: 20270249 NR Description: RNase MRP/RNase P protein-like [Homo sapiens]
MEVFLDPDKDLLGEGTPIILTQFNLSKAIKDSILVNFGECGLGSSLGSFQVKYVNPITKLCIVRSSREEHRQVWLAITLVKSIGNCPVILNLLDISGCIRACRDTALKCDKEKFEQCSKSLSEEEIRQMNTFSLRRSNLLET

SEQ ID NO: 2102 - DNA, 1637 bp, Arabidopsis thaliana
  misc_feature (1)..(1637): Ceres Seq. ID no. 13497284
atcgataaccaaataaaaaatggcgatctctttcctctgtgtttttctcatcaccttcgtttcgttaatcttttttgccaagaaaatcaaacgatcaaaatggaatcttcctccaagccctcccaagtttccggtcatcgggaacttacatcagattggagaattgcctcacaggtcacttcaacatctcgccgaaagatacggacctgtgatgcttcttcactttgggtttgtccctataactgtggtctcatcgagagaagccgctgaagaagtgcttagaactcatgacctagactgttgcagcaggcctaagcttgtcgggacaaggttactctcgcgggattttaaagatatcggttttacgccatacggtaacgagtggaaggcgcggcgtaagtttgccctgcgtgagcttttctgtttgaaaaaggttcagtcctttaggcatatccgagaggaagaatgtaactttctggtcaagcaactgtcggaatctgcggttgatcgctctccggtcgatttgagcaaatcccttttctggctaaccgctagtatcctttttagagttgccttaggacagaattttcacgagagcgattttatcgataaagaaaagatcgaagagctcgtgttcgaagctgagactgccctagcaagtttcacttgttctgatttcttccctgttgccggacttggatggctcgttgattggttttccggacaacacaagagactcaacgatgttttttacaagctcgatgctctgtttcaacatgtcatagatgatcatttaaatcctggaagatcaaaagagcacgaagacatcatcgattcaatgttggatgtgattcataaacaaggagaggacagttccttagagctcacaatagatcatatcaaggggtttctcgcgaatatatttcttgcagggatagacacaggggccatcaccatgatatgggcagtgacggagctcgttaaaaacccgaaactgataaagaaagttcaaggcgatatccgagaacaacttggcagcaataaggagagaatcaccgaggaagatatcgagaaagttccttacttgaagatggtaatcaaagaaacattcaggttacacccagcagctcctcttatacttccaagggaaacaatggctcacatcaaagttcaagggtatgatattcctcccaagaggaggatcttggtcaatgtttcggcaataggaagagatcccaaactctggacaaacccgaaagagtttgaccctgagaggtttatggatagctttgttgattataggggacaacattacgagctcttaccatttgggtccggtcgaaggatatgtcccgggatgccaatggggattgctgccgtcgaattgggactcttgaacttactttacttcttcgattggaagttgcctgatgggatgacacataaagatatcgatactgaagaagctggtactcttacaatagtcaagaaagtacctctcaagctcgttccagttcgagttcagtgatcagaccaaactccaaaccttttgaataaatatatcatgcaaatcatgtaagcttctctgatgatgtatgaagtatatttttcagtaaaatactaagttgaaatttcat

SEQ ID NO: 2103 - protein, 502 aa, Arabidopsis thaliana
  peptide (1)..(502): Ceres Seq. ID no. 13497285
  misc_feature (31)..(496): Pfam Name: Pfam Description:  Cytochrome P450
  misc_feature (1)..(502): NCBI GI NO: 15231520 NR Description: cytochrome P450 71B19 [Arabidopsis thaliana]
  misc_feature (1)..(502): NCBI GI NO: 21554748 NR Description: cytochrome P450, putative [Arabidopsis thaliana]
  misc_feature (1)..(502): NCBI GI NO: 15231522 NR Description: cytochrome P450 71B20 [Arabidopsis thaliana]
  misc_feature (1)..(502): NCBI GI NO: 16226474 NR Description: AT3g26180/MTC11_8 [Arabidopsis thaliana]
  misc_feature (1)..(501): NCBI GI NO: 15231517 NR Description: cytochrome p450 family [Arabidopsis thaliana]
  misc_feature (1)..(502): NCBI GI NO: 15231516 NR Description: cytochrome P450 71B16 [Arabidopsis thaliana]
  misc_feature (34)..(252): NCBI GI NO: 11994435 NR Description: cytochrome P450 [Arabidopsis thaliana]
  misc_feature (300)..(502): NCBI GI NO: 11994435 NR Description: cytochrome P450 [Arabidopsis thaliana]
  misc_feature (1)..(498): NCBI GI NO: 15231525 NR Description: cytochrome P450 71B22 [Arabidopsis thaliana]
  misc_feature (6)..(500): NCBI GI NO: 15222174 NR Description: cytochrome P450 family [Arabidopsis thaliana]
MAISFLCVFLITFVSLIFFAKKIKRSKWNLPPSPPKFPVIGNLHQIGELPHRSLQHLAERYGPVMLLHFGFVPITVVSSREAAEEVLRTHDLDCCSRPKLVGTRLLSRDFKDIGFTPYGNEWKARRKFALRELFCLKKVQSFRHIREEECNFLVKQLSESAVDRSPVDLSKSLFWLTASILFRVALGQNFHESDFIDKEKIEELVFEAETALASFTCSDFFPVAGLGWLVDWFSGQHKRLNDVFYKLDALFQHVIDDHLNPGRSKEHEDIIDSMLDVIHKQGEDSSLELTIDHIKGFLANIFLAGIDTGAITMIWAVTELVKNPKLIKKVQGDIREQLGSNKERITEEDIEKVPYLKMVIKETFRLHPAAPLILPRETMAHIKVQGYDIPPKRRILVNVSAIGRDPKLWTNPKEFDPERFMDSFVDYRGQHYELLPFGSGRRICPGMPMGIAAVELGLLNLLYFFDWKLPDGMTHKDIDTEEAGTLTIVKKVPLKLVPVRVQ

SEQ ID NO: 2104 - protein, 438 aa, Arabidopsis thaliana
  peptide (1)..(438): Ceres Seq. ID no. 13497286
  misc_feature (1)..(432): Pfam Name: Pfam Description:  Cytochrome P450
  misc_feature (1)..(438): NCBI GI NO: 15231520 NR Description: cytochrome P450 71B19 [Arabidopsis thaliana]
  misc_feature (1)..(438): NCBI GI NO: 21554748 NR Description: cytochrome P450, putative [Arabidopsis thaliana]
  misc_feature (1)..(438): NCBI GI NO: 15231522 NR Description: cytochrome P450 71B20 [Arabidopsis thaliana]
  misc_feature (1)..(438): NCBI GI NO: 16226474 NR Description: AT3g26180/MTC11_8 [Arabidopsis thaliana]
  misc_feature (1)..(437): NCBI GI NO: 15231517 NR Description: cytochrome p450 family [Arabidopsis thaliana]
  misc_feature (1)..(438): NCBI GI NO: 15231516 NR Description: cytochrome P450 71B16 [Arabidopsis thaliana]
  misc_feature (1)..(188): NCBI GI NO: 11994435 NR Description: cytochrome P450 [Arabidopsis thaliana]
  misc_feature (236)..(438): NCBI GI NO: 11994435 NR Description: cytochrome P450 [Arabidopsis thaliana]
  misc_feature (1)..(434): NCBI GI NO: 15231525 NR Description: cytochrome P450 71B22 [Arabidopsis thaliana]
  misc_feature (1)..(436): NCBI GI NO: 15222174 NR Description: cytochrome P450 family [Arabidopsis thaliana]
MLLHFGFVPITVVSSREAAEEVLRTHDLDCCSRPKLVGTRLLSRDFKDIGFTPYGNEWKARRKFALRELFCLKKVQSFRHIREEECNFLVKQLSESAVDRSPVDLSKSLFWLTASILFRVALGQNFHESDFIDKEKIEELVFEAETALASFTCSDFFPVAGLGWLVDWFSGQHKRLNDVFYKLDALFQHVIDDHLNPGRSKEHEDIIDSMLDVIHKQGEDSSLELTIDHIKGFLANIFLAGIDTGAITMIWAVTELVKNPKLIKKVQGDIREQLGSNKERITEEDIEKVPYLKMVIKETFRLHPAAPLILPRETMAHIKVQGYDIPPKRRILVNVSAIGRDPKLWTNPKEFDPERFMDSFVDYRGQHYELLPFGSGRRICPGMPMGIAAVELGLLNLLYFFDWKLPDGMTHKDIDTEEAGTLTIVKKVPLKLVPVRVQ

SEQ ID NO: 2105 - DNA, 1674 bp, Arabidopsis thaliana
  misc_feature (1)..(1674): Ceres Seq. ID no. 12731360
acaccaaaaaacacagaaacattttgagaaaccaaagaagaagaagaagaagaagaacaagcagaagctaaagaagaagacttgaacttgagagatggagcgcagacagtcatatgtgcttgtcgcgctcattggattgcttctcttgacagatattgtcattgcacagagcgatggcggcaaaggcaacggtaacaatggcaaggggaacgaggtacaagtagacaagggtaaaggagataatggcaaaagtaacggtaacggtccaaaggataaagaacaggagaagaaggacaaggagaaggcagccaaggacaagaaggagaaggagaaaaaggataaggaggaaaaggagaagaaggataaggaaaggaaggaaaaggagaagaaggataaactggaaaaggaaaagaaggataaggaaaggaaggagaaggagaggaaggagaaagagagaaaggcgaaggagaagaaagacaaagaggagagtgaagcagctgcgagatacagaatattatcaccgttgcctacaggacaagagcaggccatgtgccaaggtcggggatcatgttactacaagactcttgtttgccctggtgagtgtcccaagaggaagcccacgaagaacaagaacaccaaaggttgcttcattgactgcactaacaaatgtgaagctacctgcaaatggagaaaaacgaactgcaatggttacggatctctgtgctacgaccctcgatttgtgggaggagacggtgtgatgttctatttccacggatccaaaggaggaaactttgcgattgtttcagacaacaatctccaaattaacgctcacttcatcggtacaagacccgttgggagaaccagagacttcacatgggttcaggccctaaatgtcatgttcgaaaaccacaagctcgtgatcacagccaacagagtgaatcaatgggatgaaacatctgacgcctttaccatcagatatgatggagaactcatcacactccctgaagacgaacaatcagaatggagggaaatttcaggacaaaagaaggatatcatcatcgaaagaactgatgagagaaacagcgtaagagtacttgtctctgatcttgttcagatggacatcagagtgagacctatagggaaagaagagaacagagttcacaactatcagttgccgcaggatgacgcttttgcccatctcgagactcagttcaagttcttagacctaagtgagctcgtcgagggtgttttggggaaaacctaccgtcctgattacgtcagctctgccaagactggagtcccaatgcctgtattgggaggagaagacaaataccaaacgccttctctgttctcgccgacttgcagactgtgcaggttcaagcctcaagaagaatcactttctgctgatatctaatgagaagaaggagaaagatggaaacttctttgatttttaaataaattcatggaaatttcgtgtttgtaactgttttgtttctggaaatattttatattcataaaaagtgatgtaataaaagccaaaaagataacatttggcctgtttgtgatgtttttgagggtttaagaaatgtaaaacatttcttgtgcaagaagcaaccccttgatttcttatcgttcctttgctgtattttgtgtacctatccgtttatcgaacaa

SEQ ID NO: 2106 - protein, 439 aa, Arabidopsis thaliana
  peptide (1)..(439): Ceres Seq. ID no. 12731361
  misc_feature (63)..(157): Pfam Name: Pfam Description:  Caldesmon
  misc_feature (1)..(439): NCBI GI NO: 15239360 NR Description: late embryonic abundant protein - like
  misc_feature (1)..(439): NCBI GI NO: 15809990 NR Description: AT5g60530/muf9_180 [Arabidopsis thaliana]
  misc_feature (122)..(429): NCBI GI NO: 15239359 NR Description: late embryonic abundant protein - like
  misc_feature (159)..(437): NCBI GI NO: 15239629 NR Description: root cap protein 2-like protein
  misc_feature (150)..(439): NCBI GI NO: 15234120 NR Description: putative protein; protein id: At4g27400.1
  misc_feature (140)..(435): NCBI GI NO: 15221921 NR Description: late embryogenesis protein, putative
  misc_feature (147)..(434): NCBI GI NO: 11994465 NR Description: contains similarity to late embryogenesis abundantprotein~gene_id:MLD14
  misc_feature (147)..(434): NCBI GI NO: 30685319 NR Description: late embryogenesis abundant protein -related
  misc_feature (184)..(428): NCBI GI NO: 7484468 NR Description: late embryonic abundant protein EMB7
  misc_feature (136)..(428): NCBI GI NO: 34905930 NR Description: similar to root cap protein
MERRQSYVLVALIGLLLLTDIVIAQSDGGKGNGNNGKGNEVQVDKGKGDNGKSNGNGPKDKEQEKKDKEKAAKDKKEKEKKDKEEKEKKDKERKEKEKKDKLEKEKKDKERKEKERKEKERKAKEKKDKEESEAAARYRILSPLPTGQEQAMCQGRGSCYYKTLVCPGECPKRKPTKNKNTKGCFIDCTNKCEATCKWRKTNCNGYGSLCYDPRFVGGDGVMFYFHGSKGGNFAIVSDNNLQINAHFIGTRPVGRTRDFTWVQALNVMFENHKLVITANRVNQWDETSDAFTIRYDGELITLPEDEQSEWREISGQKKDIIIERTDERNSVRVLVSDLVQMDIRVRPIGKEENRVHNYQLPQDDAFAHLETQFKFLDLSELVEGVLGKTYRPDYVSSAKTGVPMPVLGGEDKYQTPSLFSPTCRLCRFKPQEESLSADI

SEQ ID NO: 2107 - protein, 288 aa, Arabidopsis thaliana
  peptide (1)..(288): Ceres Seq. ID no. 12731362
  misc_feature (1)..(288): NCBI GI NO: 15239360 NR Description: late embryonic abundant protein - like
  misc_feature (1)..(288): NCBI GI NO: 15809990 NR Description: AT5g60530/muf9_180 [Arabidopsis thaliana]
  misc_feature (1)..(278): NCBI GI NO: 15239359 NR Description: late embryonic abundant protein - like
  misc_feature (8)..(286): NCBI GI NO: 15239629 NR Description: root cap protein 2-like protein
  misc_feature (1)..(288): NCBI GI NO: 15234120 NR Description: putative protein; protein id: At4g27400.1
  misc_feature (1)..(284): NCBI GI NO: 15221921 NR Description: late embryogenesis protein, putative
  misc_feature (1)..(283): NCBI GI NO: 11994465 NR Description: contains similarity to late embryogenesis abundantprotein~gene_id:MLD14
  misc_feature (1)..(283): NCBI GI NO: 30685319 NR Description: late embryogenesis abundant protein -related
  misc_feature (33)..(277): NCBI GI NO: 7484468 NR Description: late embryonic abundant protein EMB7
  misc_feature (1)..(277): NCBI GI NO: 34905930 NR Description: similar to root cap protein
MCQGRGSCYYKTLVCPGECPKRKPTKNKNTKGCFIDCTNKCEATCKWRKTNCNGYGSLCYDPRFVGGDGVMFYFHGSKGGNFAIVSDNNLQINAHFIGTRPVGRTRDFTWVQALNVMFENHKLVITANRVNQWDETSDAFTIRYDGELITLPEDEQSEWREISGQKKDIIIERTDERNSVRVLVSDLVQMDIRVRPIGKEENRVHNYQLPQDDAFAHLETQFKFLDLSELVEGVLGKTYRPDYVSSAKTGVPMPVLGGEDKYQTPSLFSPTCRLCRFKPQEESLSADI

SEQ ID NO: 2108 - DNA, 861 bp, Arabidopsis thaliana
  misc_feature (1)..(861): Ceres Seq. ID no. 12489501
aacaacgggtccactctgcatctctctctctctctctagatttgatttctttgcgggcttgttaatggcgaacccagggcaatcaaagggatggataaagaaatggacgtctatggcttcatcggtttacttcgtcttgatcttattccagatccctctcttcagagttccatgtagatctggtatgtgttcatcgccaatccatgtgacatcgtctcagttgatttctagtgagatctttcctgttccgatgattaaggctctcttataccctggtgctgtagtcaatggccttgccatcaacatgacatttccaaagtgggaaaatgtgttagatatctacaatctcaccaatgtgaaagaagcttctgcagtgaccgatcttcaacgcctagaggttcttgcagggagctacttttctgtagctggggcgtttgtgggtttgctaaagcctggaaggatgagcatgtttgggtcattgctactagtatggggtcttgttaaagaagggatcttagggaagccagtaaatactgacccagccaaaactgtttatgtgtacccaactatggtgcttgcgatgatctgcgctttctctatgataaagtatgacttgaggaaagccacgagggcagctccagctcgtcccattgctaaacctctaatgagctcttcaaaatctaagctgaagtgagttttttgagacttaatagggcttgtgtcctgtctttgtaccaacacccgggaaaggaaaatgtcccggaaaatggcattgtcactatattttgctctcagttaccttatgtttcatgaattgtctattttctaggacactgctcagtagtcaatatcttccaatat

SEQ ID NO: 2109 - protein, 230 aa, Arabidopsis thaliana
  peptide (1)..(230): Ceres Seq. ID no. 12489502
  misc_feature (22)..(230): NCBI GI NO: 18416514 NR Description: putative protein; protein id: At5g11280
  misc_feature (22)..(230): NCBI GI NO: 17064978 NR Description: putative protein [Arabidopsis thaliana]
  misc_feature (77)..(230): NCBI GI NO: 8953390 NR Description: putative protein [Arabidopsis thaliana]
  misc_feature (22)..(54): NCBI GI NO: 8953390 NR Description: putative protein [Arabidopsis thaliana]
  misc_feature (34)..(230): NCBI GI NO: 34913974 NR Description: B1110C07.25
  misc_feature (56)..(219): NCBI GI NO: 15220078 NR Description: hypothetical protein; protein id: At1g80200.1
TTGPLCISLSLSRFDFFAGLLMANPGQSKGWIKKWTSMASSVYFVLILFQIPLFRVPCRSGMCSSPIHVTSSQLISSEIFPVPMIKALLYPGAVVNGLAINMTFPKWENVLDIYNLTNVKEASAVTDLQRLEVLAGSYFSVAGAFVGLLKPGRMSMFGSLLLVWGLVKEGILGKPVNTDPAKTVYVYPTMVLAMICAFSMIKYDLRKATRAAPARPIAKPLMSSSKSKLK

SEQ ID NO: 2110 - protein, 209 aa, Arabidopsis thaliana
  peptide (1)..(209): Ceres Seq. ID no. 12489503
  misc_feature (1)..(209): NCBI GI NO: 18416514 NR Description: putative protein; protein id: At5g11280
  misc_feature (1)..(209): NCBI GI NO: 17064978 NR Description: putative protein [Arabidopsis thaliana]
  misc_feature (56)..(209): NCBI GI NO: 8953390 NR Description: putative protein [Arabidopsis thaliana]
  misc_feature (1)..(33): NCBI GI NO: 8953390 NR Description: putative protein [Arabidopsis thaliana]
  misc_feature (13)..(209): NCBI GI NO: 34913974 NR Description: B1110C07.25
  misc_feature (35)..(198): NCBI GI NO: 15220078 NR Description: hypothetical protein; protein id: At1g80200.1
MANPGQSKGWIKKWTSMASSVYFVLILFQIPLFRVPCRSGMCSSPIHVTSSQLISSEIFPVPMIKALLYPGAVVNGLAINMTFPKWENVLDIYNLTNVKEASAVTDLQRLEVLAGSYFSVAGAFVGLLKPGRMSMFGSLLLVWGLVKEGILGKPVNTDPAKTVYVYPTMVLAMICAFSMIKYDLRKATRAAPARPIAKPLMSSSKSKLK

SEQ ID NO: 2111 - protein, 193 aa, Arabidopsis thaliana
  peptide (1)..(193): Ceres Seq. ID no. 12489504
  misc_feature (1)..(193): NCBI GI NO: 18416514 NR Description: putative protein; protein id: At5g11280
  misc_feature (1)..(193): NCBI GI NO: 17064978 NR Description: putative protein [Arabidopsis thaliana]
  misc_feature (40)..(193): NCBI GI NO: 8953390 NR Description: putative protein [Arabidopsis thaliana]
  misc_feature (1)..(17): NCBI GI NO: 8953390 NR Description: putative protein [Arabidopsis thaliana]
  misc_feature (1)..(193): NCBI GI NO: 34913974 NR Description: B1110C07.25
  misc_feature (19)..(182): NCBI GI NO: 15220078 NR Description: hypothetical protein; protein id: At1g80200.1
MASSVYFVLILFQIPLFRVPCRSGMCSSPIHVTSSQLISSEIFPVPMIKALLYPGAVVNGLAINMTFPKWENVLDIYNLTNVKEASAVTDLQRLEVLAGSYFSVAGAFVGLLKPGRMSMFGSLLLVWGLVKEGILGKPVNTDPAKTVYVYPTMVLAMICAFSMIKYDLRKATRAAPARPIAKPLMSSSKSKLK

SEQ ID NO: 2112 - DNA, 1057 bp, Arabidopsis thaliana
  misc_feature (1)..(1057): Ceres Seq. ID no. 12558683
agtgaattcgtctgagaaaacaaaagaaatcgaacgaagagtgtgtgcacttgaggatcgaattaaggtgagaacaaagaagagagaagaatcgaaatagcaaatctcttgatggtcttgatgatcattaaaggtatatttcggagatatgaaaaatggaatcctgtgcatcctacttatggagcattttggggaatggggattgggattggttgtggcgtcggatggggacctggttttggccctgaggtcattggttatgtcggtgctggctgcggtgttggttttagtgttggtataacacttgctggtctcggcattggtcttcccacaaattttcttcttgcagctccttataacactgtggaagcaactagaaagggtgcttttaatttctttggtaaaaacctctcaaccaatggttggagtgatttgatgcctcaaatcgcggggttgcagagacaagtcagtgagatatgctctggttttaacaagaagcctcatttaaataatgccattgacctaaaaagttttcctttgttcatttcacatgattgtggcaaatttggaagtcatcttctccatgtgcgcaaaggttcggaggacaataaatcatcagctatgtaatgctacccaccacgaggatcttaagcatctgagacgcatttcgagatagttactttgatggaatttgtgaatgtgactgaaatattcagcacaaatcagaacatggttcctgtcttgtttggagaagcactatgaaccaaacctgaagcccttgtgatttagagttacagagatacattaaaagggttcgggatttcacagtagcattcatagacagttcaggttagttaaacgtgcttcacaaaaagaaaaaaaacagaagtgtagttgaggtcacaccacaggtttatgctttgctcttaatcaaatatttatctttctcttttttgttatttgtcctttttaattccatttgctttattccttacttgtggggattaaatgtttgcagagaaagataattcgactgaataaatacacttttacctgt

SEQ ID NO: 2113 - protein, 171 aa, Arabidopsis thaliana
  peptide (1)..(171): Ceres Seq. ID no. 12558684
  misc_feature (1)..(171): NCBI GI NO: 15234117 NR Description: cadmium-induced protein; protein id: At4g19070
  misc_feature (4)..(138): NCBI GI NO: 34899622 NR Description: cadmium-induced protein-like
MVLMIIKGIFRRYEKWNPVHPTYGAFWGMGIGIGCGVGWGPGFGPEVIGYVGAGCGVGFSVGITLAGLGIGLPTNFLLAAPYNTVEATRKGAFNFFGKNLSTNGWSDLMPQIAGLQRQVSEICSGFNKKPHLNNAIDLKSFPLFISHDCGKFGSHLLHVRKGSEDNKSSAM

SEQ ID NO: 2114 - protein, 168 aa, Arabidopsis thaliana
  peptide (1)..(168): Ceres Seq. ID no. 12558685
  misc_feature (1)..(168): NCBI GI NO: 15234117 NR Description: cadmium-induced protein; protein id: At4g19070
  misc_feature (1)..(135): NCBI GI NO: 34899622 NR Description: cadmium-induced protein-like
MIIKGIFRRYEKWNPVHPTYGAFWGMGIGIGCGVGWGPGFGPEVIGYVGAGCGVGFSVGITLAGLGIGLPTNFLLAAPYNTVEATRKGAFNFFGKNLSTNGWSDLMPQIAGLQRQVSEICSGFNKKPHLNNAIDLKSFPLFISHDCGKFGSHLLHVRKGSEDNKSSAM

SEQ ID NO: 2115 - protein, 143 aa, Arabidopsis thaliana
  peptide (1)..(143): Ceres Seq. ID no. 12558686
  misc_feature (1)..(143): NCBI GI NO: 15234117 NR Description: cadmium-induced protein; protein id: At4g19070
  misc_feature (1)..(110): NCBI GI NO: 34899622 NR Description: cadmium-induced protein-like
MGIGIGCGVGWGPGFGPEVIGYVGAGCGVGFSVGITLAGLGIGLPTNFLLAAPYNTVEATRKGAFNFFGKNLSTNGWSDLMPQIAGLQRQVSEICSGFNKKPHLNNAIDLKSFPLFISHDCGKFGSHLLHVRKGSEDNKSSAM

SEQ ID NO: 2116 - DNA, 1393 bp, Arabidopsis thaliana
  misc_feature (1)..(1393): Ceres Seq. ID no. 13499692
  misc_feature (1389)..(1389): n is a, c, t, g, unknown, or other
  misc_feature (1390)..(1390): n is a, c, t, g, unknown, or other
cccaaatacaaaactcccgaaaatctctctcttttattctttctttcttcttcttcttccccaacttgaaaaaaaaaagtaaacacgaaaatgtctccgtcttggctccgcccaaccgccgatcacaatcatcctccaccgcaaccgccgtcgcaatcaccgtcccctctatcttccggtgatccgaatctcacaacatgtctctaccaaacagatcacggcgtcttctatctaacatggtcccgaactttcttaggaggccactctgtgaatctcttcctccattcacaagattactacaaccactcttcgccactctctttctcctccgctgatctctctctttcctccgccgtctctttccatctcaacttaaacacattagctttctggaaaaaacgtggatccagattcgtttctcccaaaatccaagtcttctgggacttaagcaaagccaaattcgactctggatccgaacctagatccggattctacatcgctgtagttgttgacggagagatgggactattagtcggagattcagtcaaagaagcttacgctcgtgctaaatcggcgaaacctccgacgaatccgcaagctcttctgttgaggaaagagcacgtgtttggagctagggttttcacaacgaaagcgagatttggagggaagaacagagagatttctattgattgtcgtgttgatgaagacgctaagctctgttttagcgttgattcgaaacaggttctgcagatcaagagacttagatggaaatttagaggaaatgagaaagttgaaatcgatggagttcatgttcagatctcttgggatgtatacaattggttgtttcagagtaaaagttccggtgacggcggaggaggaggaggacacgccgtgtttatgtttagattcgagagtgatccagaagcagaggaggtttgtgaaacgaagaggaaagaagaagaagatgagaaaaatcgaaacggtatcgttttatggaagccgaagaagcaatgtggaaatagttttgggattaaagggattgttgagtggaggaagatgaggaagagatttgttaagagtaagagaagttcttcgtcgtcttcgatttcgatgtcgtcggcttcttcggcgtgtagctcgtcggttatggaatgggctagtagtgctgatgaggcggagtacggcggaggaggttgttctggttccggttccggcaatggtcttggattctcattactggtttacgcttggattaagtgaaaatattctttttcgagggaaataagaagttactgttttcggttaatttttttttttaatatgttcttctttcttttttatattaattttccctctgaaatcacgtacggacgagaagatataaaaatnntgg

SEQ ID NO: 2117 - protein, 389 aa, Arabidopsis thaliana
  peptide (1)..(389): Ceres Seq. ID no. 13499693
  misc_feature (28)..(389): Pfam Name: DUF868 Pfam Description: Plant protein of unknown function
  misc_feature (1)..(389): NCBI GI NO: 15238921 NR Description: expressed protein [Arabidopsis thaliana]
  misc_feature (9)..(339): NCBI GI NO: 30682687 NR Description: expressed protein [Arabidopsis thaliana]
  misc_feature (21)..(278): NCBI GI NO: 30102999 NR Description: hypothetical protein
  misc_feature (21)..(272): NCBI GI NO: 15241702 NR Description: expressed protein [Arabidopsis thaliana]
  misc_feature (100)..(272): NCBI GI NO: 18397034 NR Description: expressed protein [Arabidopsis thaliana]
  misc_feature (100)..(272): NCBI GI NO: 21593854 NR Description: unknown [Arabidopsis thaliana]
  misc_feature (36)..(286): NCBI GI NO: 15235452 NR Description: expressed protein [Arabidopsis thaliana]
  misc_feature (52)..(254): NCBI GI NO: 14719318 NR Description: hypothetical protein [Oryza sativa]
  misc_feature (36)..(272): NCBI GI NO: 15228105 NR Description: hypothetical protein [Arabidopsis thaliana]
  misc_feature (93)..(272): NCBI GI NO: 25334990 NR Description: hypothetical protein At2g04220
MSPSWLRPTADHNHPPPQPPSQSPSPLSSGDPNLTTCLYQTDHGVFYLTWSRTFLGGHSVNLFLHSQDYYNHSSPLSFSSADLSLSSAVSFHLNLNTLAFWKKRGSRFVSPKIQVFWDLSKAKFDSGSEPRSGFYIAVVVDGEMGLLVGDSVKEAYARAKSAKPPTNPQALLLRKEHVFGARVFTTKARFGGKNREISIDCRVDEDAKLCFSVDSKQVLQIKRLRWKFRGNEKVEIDGVHVQISWDVYNWLFQSKSSGDGGGGGGHAVFMFRFESDPEAEEVCETKRKEEEDEKNRNGIVLWKPKKQCGNSFGIKGIVEWRKMRKRFVKSKRSSSSSSISMSSASSACSSSVMEWASSADEAEYGGGGCSGSGSGNGLGFSLLVYAWIK

SEQ ID NO: 2118 - protein, 246 aa, Arabidopsis thaliana
  peptide (1)..(246): Ceres Seq. ID no. 13499694
  misc_feature (1)..(246): Pfam Name: DUF868 Pfam Description: Plant protein of unknown function
  misc_feature (1)..(246): NCBI GI NO: 15238921 NR Description: expressed protein [Arabidopsis thaliana]
  misc_feature (1)..(196): NCBI GI NO: 30682687 NR Description: expressed protein [Arabidopsis thaliana]
  misc_feature (1)..(135): NCBI GI NO: 30102999 NR Description: hypothetical protein
  misc_feature (1)..(129): NCBI GI NO: 15241702 NR Description: expressed protein [Arabidopsis thaliana]
  misc_feature (1)..(129): NCBI GI NO: 18397034 NR Description: expressed protein [Arabidopsis thaliana]
  misc_feature (1)..(129): NCBI GI NO: 21593854 NR Description: unknown [Arabidopsis thaliana]
  misc_feature (1)..(143): NCBI GI NO: 15235452 NR Description: expressed protein [Arabidopsis thaliana]
  misc_feature (1)..(111): NCBI GI NO: 14719318 NR Description: hypothetical protein [Oryza sativa]
  misc_feature (1)..(129): NCBI GI NO: 15228105 NR Description: hypothetical protein [Arabidopsis thaliana]
  misc_feature (1)..(129): NCBI GI NO: 25334990 NR Description: hypothetical protein At2g04220
MGLLVGDSVKEAYARAKSAKPPTNPQALLLRKEHVFGARVFTTKARFGGKNREISIDCRVDEDAKLCFSVDSKQVLQIKRLRWKFRGNEKVEIDGVHVQISWDVYNWLFQSKSSGDGGGGGGHAVFMFRFESDPEAEEVCETKRKEEEDEKNRNGIVLWKPKKQCGNSFGIKGIVEWRKMRKRFVKSKRSSSSSSISMSSASSACSSSVMEWASSADEAEYGGGGCSGSGSGNGLGFSLLVYAWIK

SEQ ID NO: 2119 - DNA, 1353 bp, Arabidopsis thaliana
  misc_feature (1)..(1353): Ceres Seq. ID no. 13600835
aatttcatttctccaaagctttccagaatactctccactccttcatcatttctctggcaacgatggctatgatatctcaccgtctccgacgagctttactcactgcgacttcctatgttaaccgatcaattagctcttcgatcacaccagcgtctgatttcccttctgtgtcggcggcggtgttaaagagatccgttatagggcgttcgacggaagtagctactcgagcaccggcgagactgttttcaacgaggcagtacaagctttacaaagaaggtgatgagatcacggaagacactgtgttgttcgaaggatgtgattataatcactggcttatcactatggatttctccaaagaggaaactcctaagtctccagaagaaatggtcgctgcttatgaagaaacttgcgcccaaggacttggcatcagcgtggaagaggctaagcaaaggatgtatgcttgtagcacaactacttaccaaggatttcaagcaatcatgactgaacaagaatcagaaaagttcaaggatctacccggagtggttttcatcttgccagattcctacattgatccccagaacaaagagtatggaggagataaatacgagaatggagtgataacacacaggccaccaccgattcagagtggcagagcaagacctcgtcctagatttgaccgttcaggaggaggaagtggtggtccccaaaacttccaaagaaacacacagtatggtcagcaaccaccaatgcaaggtggtggagggagctatggtcctcaacagggctatgccactccaggacaaggtcagggaactcaagcgcctccaccatttcaaggaggttataaccaaggcccgagatctccaccacctccatatcaggcaggttacaatcaaggccagggatctccagtgcctccatatcaggcaggttacaatcaagtccagggatctccagtgcctccataccaaggaacacaaagcagttacggtcaaggtggatctgggaactatagtcaagggccacaaggtggttacaaccaaggaggacctaggaattacaatccacagggagctggaaactttggtcctgcatctggagctggaaacttaggtcctgcacctggagctggaaatcctggctatggtcaggggtattctggaccaggacaagagcagaatcagacattcccacaggcagatcagaggaatcgagactggaacaacaataatccagcaggccagcccgggtctgaccaagtaagatctcgatcaataatgaatcttgcatctttcttttttgatatcctcatcaggcattaaagtaccccattttccccatatttgttactga

SEQ ID NO: 2120 - protein, 439 aa, Arabidopsis thaliana
  peptide (1)..(439): Ceres Seq. ID no. 13600836
  misc_feature (211)..(419): Pfam Name: Pfam Description:  High molecular weight glutenin subunit
  misc_feature (21)..(439): NCBI GI NO: 15235263 NR Description: putative DAG protein [Arabidopsis thaliana]
  misc_feature (249)..(419): NCBI GI NO: 19310564 NR Description: putative DAG protein [Arabidopsis thaliana]
  misc_feature (21)..(394): NCBI GI NO: 15241580 NR Description: expressed protein [Arabidopsis thaliana]
  misc_feature (97)..(409): NCBI GI NO: 18400602 NR Description: expressed protein [Arabidopsis thaliana]
  misc_feature (20)..(247): NCBI GI NO: 21593052 NR Description: DAG protein, putative [Arabidopsis thaliana]
  misc_feature (44)..(230): NCBI GI NO: 38636775 NR Description: putative DAG protein
  misc_feature (20)..(247): NCBI GI NO: 15220382 NR Description: DAG protein -related [Arabidopsis thaliana]
  misc_feature (21)..(219): NCBI GI NO: 6014904 NR Description: DAG PROTEIN, CHLOROPLAST PRECURSOR
  misc_feature (21)..(226): NCBI GI NO: 27754695 NR Description: putative DAG protein [Arabidopsis thaliana]
  misc_feature (21)..(226): NCBI GI NO: 15230785 NR Description: DAG protein -related [Arabidopsis thaliana]
FHFSKAFQNTLHSFIISLATMAMISHRLRRALLTATSYVNRSISSSITPASDFPSVSAAVLKRSVIGRSTEVATRAPARLFSTRQYKLYKEGDEITEDTVLFEGCDYNHWLITMDFSKEETPKSPEEMVAAYEETCAQGLGISVEEAKQRMYACSTTTYQGFQAIMTEQESEKFKDLPGVVFILPDSYIDPQNKEYGGDKYENGVITHRPPPIQSGRARPRPRFDRSGGGSGGPQNFQRNTQYGQQPPMQGGGGSYGPQQGYATPGQGQGTQAPPPFQGGYNQGPRSPPPPYQAGYNQGQGSPVPPYQAGYNQVQGSPVPPYQGTQSSYGQGGSGNYSQGPQGGYNQGGPRNYNPQGAGNFGPASGAGNLGPAPGAGNPGYGQGYSGPGQEQNQTFPQADQRNRDWNNNNPAGQPGSDQVRSRSIMNLASFFFDILIRH

SEQ ID NO: 2121 - protein, 419 aa, Arabidopsis thaliana
  peptide (1)..(419): Ceres Seq. ID no. 13600837
  misc_feature (191)..(399): Pfam Name: Pfam Description:  High molecular weight glutenin subunit
  misc_feature (1)..(419): NCBI GI NO: 15235263 NR Description: putative DAG protein [Arabidopsis thaliana]
  misc_feature (229)..(399): NCBI GI NO: 19310564 NR Description: putative DAG protein [Arabidopsis thaliana]
  misc_feature (1)..(374): NCBI GI NO: 15241580 NR Description: expressed protein [Arabidopsis thaliana]
  misc_feature (77)..(389): NCBI GI NO: 18400602 NR Description: expressed protein [Arabidopsis thaliana]
  misc_feature (1)..(227): NCBI GI NO: 21593052 NR Description: DAG protein, putative [Arabidopsis thaliana]
  misc_feature (24)..(210): NCBI GI NO: 38636775 NR Description: putative DAG protein
  misc_feature (1)..(227): NCBI GI NO: 15220382 NR Description: DAG protein -related [Arabidopsis thaliana]
  misc_feature (1)..(199): NCBI GI NO: 6014904 NR Description: DAG PROTEIN, CHLOROPLAST PRECURSOR
  misc_feature (1)..(206): NCBI GI NO: 27754695 NR Description: putative DAG protein [Arabidopsis thaliana]
  misc_feature (1)..(206): NCBI GI NO: 15230785 NR Description: DAG protein -related [Arabidopsis thaliana]
MAMISHRLRRALLTATSYVNRSISSSITPASDFPSVSAAVLKRSVIGRSTEVATRAPARLFSTRQYKLYKEGDEITEDTVLFEGCDYNHWLITMDFSKEETPKSPEEMVAAYEETCAQGLGISVEEAKQRMYACSTTTYQGFQAIMTEQESEKFKDLPGVVFILPDSYIDPQNKEYGGDKYENGVITHRPPPIQSGRARPRPRFDRSGGGSGGPQNFQRNTQYGQQPPMQGGGGSYGPQQGYATPGQGQGTQAPPPFQGGYNQGPRSPPPPYQAGYNQGQGSPVPPYQAGYNQVQGSPVPPYQGTQSSYGQGGSGNYSQGPQGGYNQGGPRNYNPQGAGNFGPASGAGNLGPAPGAGNPGYGQGYSGPGQEQNQTFPQADQRNRDWNNNNPAGQPGSDQVRSRSIMNLASFFFDILIRH

SEQ ID NO: 2122 - protein, 417 aa, Arabidopsis thaliana
  peptide (1)..(417): Ceres Seq. ID no. 13600838
  misc_feature (189)..(397): Pfam Name: Pfam Description:  High molecular weight glutenin subunit
  misc_feature (1)..(417): NCBI GI NO: 15235263 NR Description: putative DAG protein [Arabidopsis thaliana]
  misc_feature (227)..(397): NCBI GI NO: 19310564 NR Description: putative DAG protein [Arabidopsis thaliana]
  misc_feature (1)..(372): NCBI GI NO: 15241580 NR Description: expressed protein [Arabidopsis thaliana]
  misc_feature (75)..(387): NCBI GI NO: 18400602 NR Description: expressed protein [Arabidopsis thaliana]
  misc_feature (1)..(225): NCBI GI NO: 21593052 NR Description: DAG protein, putative [Arabidopsis thaliana]
  misc_feature (22)..(208): NCBI GI NO: 38636775 NR Description: putative DAG protein
  misc_feature (1)..(225): NCBI GI NO: 15220382 NR Description: DAG protein -related [Arabidopsis thaliana]
  misc_feature (1)..(197): NCBI GI NO: 6014904 NR Description: DAG PROTEIN, CHLOROPLAST PRECURSOR
  misc_feature (1)..(204): NCBI GI NO: 27754695 NR Description: putative DAG protein [Arabidopsis thaliana]
  misc_feature (1)..(204): NCBI GI NO: 15230785 NR Description: DAG protein -related [Arabidopsis thaliana]
MISHRLRRALLTATSYVNRSISSSITPASDFPSVSAAVLKRSVIGRSTEVATRAPARLFSTRQYKLYKEGDEITEDTVLFEGCDYNHWLITMDFSKEETPKSPEEMVAAYEETCAQGLGISVEEAKQRMYACSTTTYQGFQAIMTEQESEKFKDLPGVVFILPDSYIDPQNKEYGGDKYENGVITHRPPPIQSGRARPRPRFDRSGGGSGGPQNFQRNTQYGQQPPMQGGGGSYGPQQGYATPGQGQGTQAPPPFQGGYNQGPRSPPPPYQAGYNQGQGSPVPPYQAGYNQVQGSPVPPYQGTQSSYGQGGSGNYSQGPQGGYNQGGPRNYNPQGAGNFGPASGAGNLGPAPGAGNPGYGQGYSGPGQEQNQTFPQADQRNRDWNNNNPAGQPGSDQVRSRSIMNLASFFFDILIRH

SEQ ID NO: 2123 - DNA, 956 bp, Arabidopsis thaliana
  misc_feature (1)..(956): Ceres Seq. ID no. 12678795
aacattaattgaggaggaggagattggttgttgttgacgacgcgtttccgctcactaattttttttaacctttttgtgtctccgtcgtcttttgatcttcaatctcagttttgagctgaagattatcgtatcgacctgcgattctcttcagatcgataatccatggctgcagctggaaacaagagcattaacgccaaattggtgttgcttggagatgttggtgctggaaaatcaagtcttgtgttacggtttgtcaaagatcagtttgttgaattccaggaatcaaccattggtgctgcttttttctcacaaacgttagctgtgaacgatgccactgtgaagtttgagatttgggatacagcgggtcaggaacggtaccatagtttggctccaatgtactacagaggtgctgctgctgcaatcattgtttttgatgttacgaatcaggcttcgtttgagagggcaaagaaatgggttcaggaactgcaggcacaaggtaaccctaatatggtcatggcccttgctggaaacaaatctgatttattagatgcaaggaaggtgacagcagaggatgcacaaacatatgctcaggaaaacggtcttttcttcatggaaacttcagcaaaaaccgctactaatgtcaaagagatattctatgaaatcgcaagaaggctaccgcgagtacagccaacagaaaacccaacaggaatggttctgccagacagggccatggatagggcagtgagctcatcttgttgtgcttagttatattgtgtaatggcacacacttctcttaaaaagagatcttttggtcactttaaagttatggacttctgtgtttgcgtctctttgctttgttttacgtatttgagatttgatctccactattttgtaaataaatctaatactcaactaagtaactaagtgcgtgagggggctatggatccatttgtcat

SEQ ID NO: 2124 - protein, 200 aa, Arabidopsis thaliana
  peptide (1)..(200): Ceres Seq. ID no. 12678796
  misc_feature (12)..(173): Pfam Name: Pfam Description:  Ras family
  misc_feature (1)..(200): NCBI GI NO: 15235113 NR Description: GTP-binding protein, putative
  misc_feature (1)..(200): NCBI GI NO: 15242309 NR Description: ras-related GTP-binding protein RHA1
  misc_feature (1)..(200): NCBI GI NO: 421941 NR Description: GTP-binding protein, ras-related - common tobacco
  misc_feature (1)..(200): NCBI GI NO: 1370178 NR Description: RAB5A [Lotus japonicus]
  misc_feature (1)..(200): NCBI GI NO: 12311684 NR Description: GTP binding protein
  misc_feature (1)..(200): NCBI GI NO: 12311682 NR Description: GTP binding protein
  misc_feature (1)..(200): NCBI GI NO: 1076545 NR Description: guanine nucleotide regulatory protein - fava bean
  misc_feature (1)..(200): NCBI GI NO: 6010033 NR Description: GTP binding protein
  misc_feature (1)..(200): NCBI GI NO: 6010031 NR Description: GTP binding protein
  misc_feature (5)..(200): NCBI GI NO: 12311680 NR Description: GTP binding protein
MAAAGNKSINAKLVLLGDVGAGKSSLVLRFVKDQFVEFQESTIGAAFFSQTLAVNDATVKFEIWDTAGQERYHSLAPMYYRGAAAAIIVFDVTNQASFERAKKWVQELQAQGNPNMVMALAGNKSDLLDARKVTAEDAQTYAQENGLFFMETSAKTATNVKEIFYEIARRLPRVQPTENPTGMVLPDRAMDRAVSSSCCA

SEQ ID NO: 2125 - protein, 123 aa, Arabidopsis thaliana
  peptide (1)..(123): Ceres Seq. ID no. 12678797
  misc_feature (1)..(96): Pfam Name: Pfam Description:  Ras family
  misc_feature (1)..(123): NCBI GI NO: 15235113 NR Description: GTP-binding protein, putative
  misc_feature (1)..(123): NCBI GI NO: 15242309 NR Description: ras-related GTP-binding protein RHA1
  misc_feature (1)..(123): NCBI GI NO: 421941 NR Description: GTP-binding protein, ras-related - common tobacco
  misc_feature (1)..(123): NCBI GI NO: 1370178 NR Description: RAB5A [Lotus japonicus]
  misc_feature (1)..(123): NCBI GI NO: 12311684 NR Description: GTP binding protein
  misc_feature (1)..(123): NCBI GI NO: 12311682 NR Description: GTP binding protein
  misc_feature (1)..(123): NCBI GI NO: 1076545 NR Description: guanine nucleotide regulatory protein - fava bean
  misc_feature (1)..(123): NCBI GI NO: 6010033 NR Description: GTP binding protein
  misc_feature (1)..(123): NCBI GI NO: 6010031 NR Description: GTP binding protein
  misc_feature (1)..(123): NCBI GI NO: 12311680 NR Description: GTP binding protein
MYYRGAAAAIIVFDVTNQASFERAKKWVQELQAQGNPNMVMALAGNKSDLLDARKVTAEDAQTYAQENGLFFMETSAKTATNVKEIFYEIARRLPRVQPTENPTGMVLPDRAMDRAVSSSCCA

SEQ ID NO: 2126 - DNA, 782 bp, Arabidopsis thaliana
  misc_feature (1)..(782): Ceres Seq. ID no. 12337156
aaaagaaaagatgttgtgtagaatggtggtggtgactggccggaaaaagaaacccggttcggttccggtttatctgaatgtatacgatctcacacccatcaatggctacgcttactggttaggacttgggatctatcactctggtgttgaagttcatggagttgaatatggtttcggagctcacgatcattcgactaccgggatattcgaggtaaccgaagcaatgtccgggtttcacatttaggaagtctatattgattggaagaactgatttagatcctgaaaacgttcgtgtctttatggagaaacttgcggaagaatatagtggaaacagttatcatttgattactaagaattgcaatcacttttgcaatgatgtttgtgtgcaactgactcgaagatcgatccctagttgggttaaccgtcttgctcgctttggtttgttttgcaactgtgttctgccggcggagttgaatgagactaaggtgaggcaggtgagatcaaaggaagagaagattccggaagtagagaagaagaaacttcggagtagatcaagtaggtttccacctggtccttcgctttcttcgtcgggttctttaaaccgaagcagaagaggagaaaggagaagacaatgtcttcctccatcaccaactgtgagtgtttagctctagtcctagtaaaattatacctttttgtttcgcaatttgattctgtagtaatgtttaagctacaagatatggattgaacaaacattttcttgatagtaatggtataagattttc

SEQ ID NO: 2127 - protein, 121 aa, Arabidopsis thaliana
  peptide (1)..(121): Ceres Seq. ID no. 12337157
  misc_feature (1)..(121): NCBI GI NO: 18420889 NR Description: putative protein; protein id: At5g25170
  misc_feature (1)..(120): NCBI GI NO: 18400749 NR Description: expressed protein; protein id: At2g25190
  misc_feature (1)..(120): NCBI GI NO: 17529024 NR Description: unknown protein [Arabidopsis thaliana]
  misc_feature (1)..(120): NCBI GI NO: 15236618 NR Description: putative protein; protein id: At4g31980.1
  misc_feature (1)..(121): NCBI GI NO: 18412886 NR Description: expressed protein; protein id: At1g80690
  misc_feature (1)..(121): NCBI GI NO: 25354458 NR Description: hypothetical protein F23A5.4
  misc_feature (1)..(115): NCBI GI NO: 18401869 NR Description: expressed protein; protein id: At1g47740
  misc_feature (1)..(115): NCBI GI NO: 21593644 NR Description: unknown [Arabidopsis thaliana]
  misc_feature (1)..(115): NCBI GI NO: 9802596 NR Description: T2E6.19 [Arabidopsis thaliana]
  misc_feature (1)..(70): NCBI GI NO: 15238059 NR Description: putative protein; protein id: At5g47310.1
MEKLAEEYSGNSYHLITKNCNHFCNDVCVQLTRRSIPSWVNRLARFGLFCNCVLPAELNETKVRQVRSKEEKIPEVEKKKLRSRSSRFPPGPSLSSSGSLNRSRRGERRRQCLPPSPTVSV

SEQ ID NO: 2128 - protein, 80 aa, Arabidopsis thaliana
  peptide (1)..(80): Ceres Seq. ID no. 12337158
  misc_feature (21)..(71): Pfam Name: DUF862 Pfam Description: Eukaryotic protein of unknown function
  misc_feature (4)..(71): NCBI GI NO: 18420889 NR Description: putative protein; protein id: At5g25170
  misc_feature (4)..(71): NCBI GI NO: 18400749 NR Description: expressed protein; protein id: At2g25190
  misc_feature (4)..(71): NCBI GI NO: 17529024 NR Description: unknown protein [Arabidopsis thaliana]
  misc_feature (4)..(71): NCBI GI NO: 15236618 NR Description: putative protein; protein id: At4g31980.1
  misc_feature (4)..(70): NCBI GI NO: 18412886 NR Description: expressed protein; protein id: At1g80690
  misc_feature (4)..(70): NCBI GI NO: 25354458 NR Description: hypothetical protein F23A5.4
  misc_feature (1)..(71): NCBI GI NO: 18401869 NR Description: expressed protein; protein id: At1g47740
  misc_feature (1)..(71): NCBI GI NO: 21593644 NR Description: unknown [Arabidopsis thaliana]
  misc_feature (1)..(71): NCBI GI NO: 9802596 NR Description: T2E6.19 [Arabidopsis thaliana]
  misc_feature (19)..(78): NCBI GI NO: 15238059 NR Description: putative protein; protein id: At5g47310.1
KEKMLCRMVVVTGRKKKPGSVPVYLNVYDLTPINGYAYWLGLGIYHSGVEVHGVEYGFGAHDHSTTGIFEVTEAMSGFHI

SEQ ID NO: 2129 - protein, 77 aa, Arabidopsis thaliana
  peptide (1)..(77): Ceres Seq. ID no. 12337159
  misc_feature (18)..(68): Pfam Name: DUF862 Pfam Description: Eukaryotic protein of unknown function
  misc_feature (1)..(68): NCBI GI NO: 18420889 NR Description: putative protein; protein id: At5g25170
  misc_feature (1)..(68): NCBI GI NO: 18400749 NR Description: expressed protein; protein id: At2g25190
  misc_feature (1)..(68): NCBI GI NO: 17529024 NR Description: unknown protein [Arabidopsis thaliana]
  misc_feature (1)..(68): NCBI GI NO: 15236618 NR Description: putative protein; protein id: At4g31980.1
  misc_feature (1)..(67): NCBI GI NO: 18412886 NR Description: expressed protein; protein id: At1g80690
  misc_feature (1)..(67): NCBI GI NO: 25354458 NR Description: hypothetical protein F23A5.4
  misc_feature (1)..(68): NCBI GI NO: 18401869 NR Description: expressed protein; protein id: At1g47740
  misc_feature (1)..(68): NCBI GI NO: 21593644 NR Description: unknown [Arabidopsis thaliana]
  misc_feature (1)..(68): NCBI GI NO: 9802596 NR Description: T2E6.19 [Arabidopsis thaliana]
  misc_feature (16)..(75): NCBI GI NO: 15238059 NR Description: putative protein; protein id: At5g47310.1
MLCRMVVVTGRKKKPGSVPVYLNVYDLTPINGYAYWLGLGIYHSGVEVHGVEYGFGAHDHSTTGIFEVTEAMSGFHI

SEQ ID NO: 2130 - DNA, 498 bp, Arabidopsis thaliana
  misc_feature (1)..(498): Ceres Seq. ID no. 1391902
aatttaaaggtttatagacaactcttggaaaaaacaaaatcgactccaggagccaaagtagaaaaccacaagttttgtgcttctgtgcactttcgctgcgtcgatgagaagaaatggagcgaactggttctacaggttcggtcggtattaaagaaattccctacgctgcaactgacccaaggtcggaaggttttcgaaatccgtccaatgattgaatgggataaaggaaaggctcttgagttcttgttagaatcacttggatttgggaacactaacaatgttttcccggtttatattggtgacaatcgaactgacgaagatgcatttaagatgctacgagacagaggcgaaggctttggcattcttgtctccaagtttcccaaggatactgatgcttcgtattctttgcaagatccatccgaggtgatggatttcttacgacgattggtggaatggaaacaaatgcagccaagaatgtgaaatgataatataataaac

SEQ ID NO: 2131 - protein, 159 aa, Arabidopsis thaliana
  peptide (1)..(159): Ceres Seq. ID no. 1391903
  misc_feature (3)..(140): Pfam Name: Pfam Description:  Trehalose-phosphatase
  misc_feature (3)..(159): NCBI GI NO: 30683008 NR Description: trehalose-6-phosphate phosphatase, putative
  misc_feature (3)..(146): NCBI GI NO: 11282598 NR Description: trehalose-6-phosphate phosphatase-like protein -Arabidopsis thaliana
  misc_feature (3)..(159): NCBI GI NO: 15238360 NR Description: trehalose-6-phosphate phosphatase
  misc_feature (3)..(156): NCBI GI NO: 30692524 NR Description: trehalose-6-phosphate phosphatase, putative
  misc_feature (3)..(154): NCBI GI NO: 15227161 NR Description: putative trehalose-6-phosphate phosphatase
  misc_feature (3)..(158): NCBI GI NO: 18399940 NR Description: trehalose-phosphatase, putative
  misc_feature (3)..(158): NCBI GI NO: 25354597 NR Description: probable trehalose-phosphatase
  misc_feature (3)..(158): NCBI GI NO: 21554408 NR Description: trehalose-phosphatase, putative
  misc_feature (3)..(154): NCBI GI NO: 15218205 NR Description: trehalose-6-phosphate phosphatase
  misc_feature (3)..(154): NCBI GI NO: 25354595 NR Description: trehalose-phosphatase (EC 3.1.3.12) B
NLKVYRQLLEKTKSTPGAKVENHKFCASVHFRCVDEKKWSELVLQVRSVLKKFPTLQLTQGRKVFEIRPMIEWDKGKALEFLLESLGFGNTNNVFPVYIGDNRTDEDAFKMLRDRGEGFGILVSKFPKDTDASYSLQDPSEVMDFLRRLVEWKQMQPRM

SEQ ID NO: 2132 - protein, 90 aa, Arabidopsis thaliana
  peptide (1)..(90): Ceres Seq. ID no. 1391904
  misc_feature (1)..(71): Pfam Name: Pfam Description:  Trehalose-phosphatase
  misc_feature (1)..(90): NCBI GI NO: 30683008 NR Description: trehalose-6-phosphate phosphatase, putative
  misc_feature (1)..(77): NCBI GI NO: 11282598 NR Description: trehalose-6-phosphate phosphatase-like protein -Arabidopsis thaliana
  misc_feature (1)..(90): NCBI GI NO: 15238360 NR Description: trehalose-6-phosphate phosphatase
  misc_feature (1)..(87): NCBI GI NO: 30692524 NR Description: trehalose-6-phosphate phosphatase, putative
  misc_feature (1)..(85): NCBI GI NO: 15227161 NR Description: putative trehalose-6-phosphate phosphatase
  misc_feature (1)..(89): NCBI GI NO: 18399940 NR Description: trehalose-phosphatase, putative
  misc_feature (1)..(89): NCBI GI NO: 25354597 NR Description: probable trehalose-phosphatase
  misc_feature (1)..(89): NCBI GI NO: 21554408 NR Description: trehalose-phosphatase, putative
  misc_feature (1)..(85): NCBI GI NO: 15218205 NR Description: trehalose-6-phosphate phosphatase
  misc_feature (1)..(85): NCBI GI NO: 25354595 NR Description: trehalose-phosphatase (EC 3.1.3.12) B
MIEWDKGKALEFLLESLGFGNTNNVFPVYIGDNRTDEDAFKMLRDRGEGFGILVSKFPKDTDASYSLQDPSEVMDFLRRLVEWKQMQPRM

SEQ ID NO: 2133 - DNA, 672 bp, Arabidopsis thaliana
  misc_feature (1)..(672): Ceres Seq. ID no. 12482397
atgggcaaaaatgaggaagtgaagcttttgggaatatgggcgagccctttcagccgtcggatcgagatggctctcaaactcaaaggtgtaccgtacgaatacttggaggaagatttggagaacaagagctctttgcttcttgctctaagccctattcacaagaagatccctgttcttgttcataatggtaaaaccattatcgagtcgcatgtgatcctcgaatacatcgatgagacttggaaacacaatcccattcttcctcaggatcccttccaaagatccaaggctcgagtcttagctaaacttgttgatgaaaagatagtaaatgtgggatttgcctcactggccaaaacagagaaaggaagagaagttctgattgagcagacaagagaattgattatgtgtctcgaaaaagaactcgccggaaaagattacttcggcggcaagacagtcggattcttggactttgtcgccggaagtatgatcccgttttgtttggagagggcttgggaaggaatgggagtggagatgattacagagaaaaagtttccagaatataacaaatgggtgaagaagctgaaggaggttgagatcgttgttgattgtattcctctaagagagaaacatattgaacacatgaacaatatggcagagaaaattagatctgcttaa

SEQ ID NO: 2134 - protein, 223 aa, Arabidopsis thaliana
  peptide (1)..(223): Ceres Seq. ID no. 12482398
  misc_feature (86)..(197): Pfam Name: Pfam Description:  Glutathione S-transferase, C-terminal domain
  misc_feature (1)..(223): NCBI GI NO: 15227084 NR Description: glutathione transferase, putative
  misc_feature (1)..(223): NCBI GI NO: 15227085 NR Description: glutathione transferase
  misc_feature (3)..(223): NCBI GI NO: 15227551 NR Description: glutathione transferase, putative
  misc_feature (3)..(223): NCBI GI NO: 15227086 NR Description: glutathione transferase, putative
  misc_feature (3)..(223): NCBI GI NO: 14423534 NR Description: putative glutathione S-transferase
  misc_feature (1)..(222): NCBI GI NO: 15227550 NR Description: glutathione transferase, putative
  misc_feature (3)..(222): NCBI GI NO: 15227087 NR Description: glutathione transferase, putative
  misc_feature (4)..(223): NCBI GI NO: 15227082 NR Description: glutathione transferase, putative
  misc_feature (7)..(213): NCBI GI NO: 7595790 NR Description: glutathione S-transferase [Euphorbia esula]
  misc_feature (4)..(220): NCBI GI NO: 10567808 NR Description: putative glutathione S-transferase T3
MGKNEEVKLLGIWASPFSRRIEMALKLKGVPYEYLEEDLENKSSLLLALSPIHKKIPVLVHNGKTIIESHVILEYIDETWKHNPILPQDPFQRSKARVLAKLVDEKIVNVGFASLAKTEKGREVLIEQTRELIMCLEKELAGKDYFGGKTVGFLDFVAGSMIPFCLERAWEGMGVEMITEKKFPEYNKWVKKLKEVEIVVDCIPLREKHIEHMNNMAEKIRSA

SEQ ID NO: 2135 - protein, 201 aa, Arabidopsis thaliana
  peptide (1)..(201): Ceres Seq. ID no. 12482399
  misc_feature (64)..(175): Pfam Name: Pfam Description:  Glutathione S-transferase, C-terminal domain
  misc_feature (1)..(201): NCBI GI NO: 15227084 NR Description: glutathione transferase, putative
  misc_feature (1)..(201): NCBI GI NO: 15227085 NR Description: glutathione transferase
  misc_feature (1)..(201): NCBI GI NO: 15227551 NR Description: glutathione transferase, putative
  misc_feature (1)..(201): NCBI GI NO: 15227086 NR Description: glutathione transferase, putative
  misc_feature (1)..(201): NCBI GI NO: 14423534 NR Description: putative glutathione S-transferase
  misc_feature (1)..(200): NCBI GI NO: 15227550 NR Description: glutathione transferase, putative
  misc_feature (1)..(200): NCBI GI NO: 15227087 NR Description: glutathione transferase, putative
  misc_feature (1)..(201): NCBI GI NO: 15227082 NR Description: glutathione transferase, putative
  misc_feature (1)..(191): NCBI GI NO: 7595790 NR Description: glutathione S-transferase [Euphorbia esula]
  misc_feature (1)..(198): NCBI GI NO: 10567808 NR Description: putative glutathione S-transferase T3
MALKLKGVPYEYLEEDLENKSSLLLALSPIHKKIPVLVHNGKTIIESHVILEYIDETWKHNPILPQDPFQRSKARVLAKLVDEKIVNVGFASLAKTEKGREVLIEQTRELIMCLEKELAGKDYFGGKTVGFLDFVAGSMIPFCLERAWEGMGVEMITEKKFPEYNKWVKKLKEVEIVVDCIPLREKHIEHMNNMAEKIRSA

SEQ ID NO: 2136 - DNA, 973 bp, Arabidopsis thaliana
  misc_feature (1)..(973): Ceres Seq. ID no. 12330419
gaacaggatctgttctataggctcgtacctctgtttccttgatttctaaggagacaggccctaaaccctggttgatgaaccatgaccgtgcggtcagagcgtgattgatggctacgatcgtcttcggacgcatccggtgctgtagaggatcgttactcggcttggtcttccttgccggggtggtcgcacggcggtctgacagaaaacaagagataaggttgaagagtgaagcaaagcttagtaatggcttcaatgcacgaagctctgttctcttctcggcttcttcaagtcaattcttctttttccttccgttgcgctcttccaattatctcttcaccagctgcagtatcttgcgcaatcaaatcgacccagttttttaaacagcgttgtagaaccaaagtgagggacttttctctatcttcactgtcccggagagggttccgtttgccagagctgctgagtacaagtttccggatcccatacctgaattcgccgaagctgagactgagaaatttagggaccatatgttaaacaaactatcaaaaagagatctttttgaagactctgttgatgaaattgttggagtctgcactgagatcttcgagacgttcttgcgcagtgagtatggaggacctggtacactcttggtgatacctttcattgacatggcagatactctcaatgaaagggaattgcctggaggtccacaagccgcccgagcagctattaaatgggctcaggatcatgtagacaaggactggaaggaatggaccggcactgattagtcccctgggagcattaagtataatccgtgagttatttagtttagtagtggggtagcagatgtgtcattgtaaaactctgattactatgtcgtgaagcacttaatctttgatcaaaaactgtttggtgtaaacttgtccaaacgactggaaacaagaaaaagaaaagatggcaaaagctttttattgtc

SEQ ID NO: 2137 - protein, 95 aa, Arabidopsis thaliana
  peptide (1)..(95): Ceres Seq. ID no. 12330420
  misc_feature (1)..(66): NCBI GI NO: 18391169 NR Description: Expressed protein; protein id: At1g10522
MASMHEALFSSRLLQVNSSFSFRCALPIISSPAAVSCAIKSTQFFKQRCRTKVRDFSLSSLSRRGFRLPELLSTSFRIPYLNSPKLRLRNLGTIC

SEQ ID NO: 2138 - protein, 92 aa, Arabidopsis thaliana
  peptide (1)..(92): Ceres Seq. ID no. 12330421
  misc_feature (1)..(63): NCBI GI NO: 18391169 NR Description: Expressed protein; protein id: At1g10522
MHEALFSSRLLQVNSSFSFRCALPIISSPAAVSCAIKSTQFFKQRCRTKVRDFSLSSLSRRGFRLPELLSTSFRIPYLNSPKLRLRNLGTIC

SEQ ID NO: 2139 - protein, 90 aa, Arabidopsis thaliana
  peptide (1)..(90): Ceres Seq. ID no. 12330422
  misc_feature (52)..(90): NCBI GI NO: 18391169 NR Description: Expressed protein; protein id: At1g10522
MATIVFGRIRCCRGSLLGLVFLAGVVARRSDRKQEIRLKSEAKLSNGFNARSSVLFSASSSQFFFFLPLRSSNYLFTSCSILRNQIDPVF

SEQ ID NO: 2140 - protein, 86 aa, Arabidopsis thaliana
  peptide (1)..(86): Ceres Seq. ID no. 12330423
  misc_feature (1)..(86): NCBI GI NO: 18391169 NR Description: Expressed protein; protein id: At1g10522
MLNKLSKRDLFEDSVDEIVGVCTEIFETFLRSEYGGPGTLLVIPFIDMADTLNERELPGGPQAARAAIKWAQDHVDKDWKEWTGTD

SEQ ID NO: 2141 - DNA, 649 bp, Arabidopsis thaliana
  misc_feature (1)..(649): Ceres Seq. ID no. 12604901
acacaatcacagaacctaatcttcttctccaatcaatctcagagaaaaaaagaaatggcaacaaaccctaaagtctacttcgacatgaccgtcggtggcaaatccgccggtcgtatcgtgatggagctttacgccgacacaacaccagaaaccgccgagaatttcagagcactctgtaccggagagagaggaatcggtaaacaaggtgatttcacagccgggaatggtaccggaggtgaatctatctatggatcgaagttcaaagacgagaactttatcaagaaacatacaggaccaggtattttgtctatggctaacgctggtgcgaacacgaatggatctcagttttttatttgtactgagaagacttcgtggctcgatgggaaacatgttgtgtttggtcaagttgttgagggattgaatgttgttagagatattgagaaggttggatctgactctggaagaacttctaagcctgttgtcattgctgattgtggtcagatttcttagatctgtctgagattgttgataatgatgatgatgatcttgaggatccaatggtagctttgtgttgtttctctttgatgttttctggtttatgtttttggattttgatatttattgctgttgtgaaactttgagtttggct

SEQ ID NO: 2142 - protein, 169 aa, Arabidopsis thaliana
  peptide (1)..(169): Ceres Seq. ID no. 12604902
  misc_feature (69)..(169): NCBI GI NO: 15227259 NR Description: cytosolic cyclophilin
  misc_feature (19)..(69): NCBI GI NO: 15227259 NR Description: cytosolic cyclophilin
  misc_feature (69)..(168): NCBI GI NO: 1345921 NR Description: PEPTIDYL-PROLYL CIS-TRANS ISOMERASE
  misc_feature (22)..(69): NCBI GI NO: 1345921 NR Description: PEPTIDYL-PROLYL CIS-TRANS ISOMERASE
  misc_feature (69)..(168): NCBI GI NO: 68407 NR Description: peptidylprolyl isomerase (EC 5.2.1.8) - rape
  misc_feature (22)..(69): NCBI GI NO: 68407 NR Description: peptidylprolyl isomerase (EC 5.2.1.8) - rape
  misc_feature (69)..(168): NCBI GI NO: 167138 NR Description: cyclophilin
  misc_feature (23)..(69): NCBI GI NO: 167138 NR Description: cyclophilin
  misc_feature (69)..(169): NCBI GI NO: 17981611 NR Description: cyclophilin [Glycine max]
  misc_feature (22)..(69): NCBI GI NO: 17981611 NR Description: cyclophilin [Glycine max]
TQSQNLIFFSNQSQRKKEMATNPKVYFDMTVGGKSAGRIVMELYADTTPETAENFRALCTGERGIGKQGDFTAGNGTGGESIYGSKFKDENFIKKHTGPGILSMANAGANTNGSQFFICTEKTSWLDGKHVVFGQVVEGLNVVRDIEKVGSDSGRTSKPVVIADCGQIS

SEQ ID NO: 2143 - protein, 151 aa, Arabidopsis thaliana
  peptide (1)..(151): Ceres Seq. ID no. 12604903
  misc_feature (51)..(151): NCBI GI NO: 15227259 NR Description: cytosolic cyclophilin
  misc_feature (1)..(51): NCBI GI NO: 15227259 NR Description: cytosolic cyclophilin
  misc_feature (51)..(150): NCBI GI NO: 1345921 NR Description: PEPTIDYL-PROLYL CIS-TRANS ISOMERASE
  misc_feature (4)..(51): NCBI GI NO: 1345921 NR Description: PEPTIDYL-PROLYL CIS-TRANS ISOMERASE
  misc_feature (51)..(150): NCBI GI NO: 68407 NR Description: peptidylprolyl isomerase (EC 5.2.1.8) - rape
  misc_feature (4)..(51): NCBI GI NO: 68407 NR Description: peptidylprolyl isomerase (EC 5.2.1.8) - rape
  misc_feature (51)..(150): NCBI GI NO: 167138 NR Description: cyclophilin
  misc_feature (5)..(51): NCBI GI NO: 167138 NR Description: cyclophilin
  misc_feature (51)..(151): NCBI GI NO: 17981611 NR Description: cyclophilin [Glycine max]
  misc_feature (4)..(51): NCBI GI NO: 17981611 NR Description: cyclophilin [Glycine max]
MATNPKVYFDMTVGGKSAGRIVMELYADTTPETAENFRALCTGERGIGKQGDFTAGNGTGGESIYGSKFKDENFIKKHTGPGILSMANAGANTNGSQFFICTEKTSWLDGKHVVFGQVVEGLNVVRDIEKVGSDSGRTSKPVVIADCGQIS

SEQ ID NO: 2144 - protein, 141 aa, Arabidopsis thaliana
  peptide (1)..(141): Ceres Seq. ID no. 12604904
  misc_feature (41)..(141): NCBI GI NO: 15227259 NR Description: cytosolic cyclophilin
  misc_feature (1)..(41): NCBI GI NO: 15227259 NR Description: cytosolic cyclophilin
  misc_feature (41)..(140): NCBI GI NO: 1345921 NR Description: PEPTIDYL-PROLYL CIS-TRANS ISOMERASE
  misc_feature (1)..(41): NCBI GI NO: 1345921 NR Description: PEPTIDYL-PROLYL CIS-TRANS ISOMERASE
  misc_feature (41)..(140): NCBI GI NO: 68407 NR Description: peptidylprolyl isomerase (EC 5.2.1.8) - rape
  misc_feature (1)..(41): NCBI GI NO: 68407 NR Description: peptidylprolyl isomerase (EC 5.2.1.8) - rape
  misc_feature (41)..(140): NCBI GI NO: 167138 NR Description: cyclophilin
  misc_feature (1)..(41): NCBI GI NO: 167138 NR Description: cyclophilin
  misc_feature (41)..(141): NCBI GI NO: 17981611 NR Description: cyclophilin [Glycine max]
  misc_feature (1)..(41): NCBI GI NO: 17981611 NR Description: cyclophilin [Glycine max]
MTVGGKSAGRIVMELYADTTPETAENFRALCTGERGIGKQGDFTAGNGTGGESIYGSKFKDENFIKKHTGPGILSMANAGANTNGSQFFICTEKTSWLDGKHVVFGQVVEGLNVVRDIEKVGSDSGRTSKPVVIADCGQIS

SEQ ID NO: 2145 - DNA, 2028 bp, Arabidopsis thaliana
  misc_feature (1)..(2028): Ceres Seq. ID no. 12559842
attgttatttgttttcgttgccactctaacacaatgtgtgggattctcgctgttcttggttgcatcgacaactctcaagctaaacgttctcgtatcatcgaactctctcgcagattgaggcacagaggtcctgattggagtggactccattgttatgaagattgttatcttgcccatgagcgtttagccatcattgaccctacttcaggagaccaacctctctataacgaagacaagaccgtcgctgtcactgtaaatggagagatatacaaccacaagattttgcgtgaaaagcttaagtctcatcagttccgtactggtagtgactgtgaagtgattgcacatctttacgaagaacatggagaggaatttatcgacatgttggatggaatgttcgcgtttgtccttcttgatactcgcgacaaaagttttattgctgcaagggacgctattggtatcactccactttacattggatggggtcttgatggttctgtctggtttgcttcggagatgaaagcgcttagtgatgattgtgaacagtttatgtcttttcctcctggccacatctactcaagtaaacaaggagggcttaggaggtggtacaatcctccgtggtacaatgagcaggttccttcaaccccatatgatcctttagttctgcgcaatgctttcgagaaggctgtaataaagagacttatgactgatgtgccttttggagttctcctatctggaggattggactcgtctctcgttgctgcagtagcattacgccatttggaaaaatcagaagctgctcgtcaatggggttcacaattgcacacgttttgcatcggtttgcagggatcgccagatcttaaagctggcagagaagttgctgactatcttggaacacgccaccacgagtttcagtttacagttcaggacgggatagacgcgatagaggaagtcatttaccatattgagacttatgacgttactacaataagagctagcaccccaatgtttcttatgtccagaaaaattaaatctttaggtgtaaagatggttctttctggggaaggttctgatgaaatactggggggatacttgtacttccataaggctcccaacaagaaagaatttcatgaagaaacatgccgaaagatcaaagctctccaccaatttgattgtttgagagctaacaaatcaacttctgcgtggggtgtcgaagctcgtgtgcctttcctagataaagaatttttaaatgttgcaatgagcatcgatccagagtggaagttgatcaagcctgatctcggaaggatcgagaagtgggtgctacgcaatgcctttgatgatgaagaacgaccttatctaccaaagcacattctatatagacagaaagaacagtttagtgatggagttgggtatagctggatagatggtctgaaagatcatgcaaataaacatgtctctgatactatgctgtcaaacgcaagctttgtcttcccggataacacacctctgacaaaagaagcgtactactacagaaccatcttcgagaagttcttcccgaagagtgctgctagagcgactgtaccaggaggtccaagtatagcttgcagtaccgcgaaagctgtagaatgggatgcaacttggtcaaagaatcttgatccgtcaggccgtgcggctcttggagttcatgttgcagcttatgaagaggataaagcagctgctgctgctaaggctggatcggatttagtagatcctcttcctaagaatggaacataagagaacaacactacaggcattgaggatataagcaaatgttttattcttctacacagagagatcgttatcttctagagggatcaatgaataaaagcttcgtccatttctagctggagattccatggatctccagttagtgcaagtgatacacgttgtctacatttgtacctaagtttctgcattttttgtcgttcttttgtgttagacaagtcttggaccctagatgatacttcagtttcttagacgttaaatttgatg

SEQ ID NO: 2146 - protein, 589 aa, Arabidopsis thaliana
  peptide (1)..(589): Ceres Seq. ID no. 12559843
  misc_feature (204)..(527): Pfam Name: Pfam Description:  Asparagine synthase
  misc_feature (12)..(569): NCBI GI NO: 15238108 NR Description: asparagine synthetase ASN3; protein id: At5g10240
  misc_feature (12)..(569): NCBI GI NO: 25293864 NR Description: asparagine synthase (glutamine-hydrolyzing) (EC 6
  misc_feature (12)..(571): NCBI GI NO: 22208544 NR Description: asparagine synthetase 2 [Striga hermonthica]
  misc_feature (12)..(569): NCBI GI NO: 6049843 NR Description: asparagine synthetase [Helianthus annuus]
  misc_feature (12)..(574): NCBI GI NO: 3182921 NR Description: Asparagine synthetase
  misc_feature (12)..(578): NCBI GI NO: 13925886 NR Description: glutamine-dependent asparagine synthetase 1
  misc_feature (12)..(586): NCBI GI NO: 1617002 NR Description: asparagine synthetase [Asparagus officinalis]
  misc_feature (12)..(586): NCBI GI NO: 399064 NR Description: Asparagine synthase [glutamine-hydrolyzing] (AS)
  misc_feature (12)..(589): NCBI GI NO: 3132675 NR Description: asparagine synthetase [Elaeagnus umbellata]
  misc_feature (6)..(566): NCBI GI NO: 26246639 NR Description: Asparagine synthetase B
IVICFRCHSNTMCGILAVLGCIDNSQAKRSRIIELSRRLRHRGPDWSGLHCYEDCYLAHERLAIIDPTSGDQPLYNEDKTVAVTVNGEIYNHKILREKLKSHQFRTGSDCEVIAHLYEEHGEEFIDMLDGMFAFVLLDTRDKSFIAARDAIGITPLYIGWGLDGSVWFASEMKALSDDCEQFMSFPPGHIYSSKQGGLRRWYNPPWYNEQVPSTPYDPLVLRNAFEKAVIKRLMTDVPFGVLLSGGLDSSLVAAVALRHLEKSEAARQWGSQLHTFCIGLQGSPDLKAGREVADYLGTRHHEFQFTVQDGIDAIEEVIYHIETYDVTTIRASTPMFLMSRKIKSLGVKMVLSGEGSDEILGGYLYFHKAPNKKEFHEETCRKIKALHQFDCLRANKSTSAWGVEARVPFLDKEFLNVAMSIDPEWKLIKPDLGRIEKWVLRNAFDDEERPYLPKHILYRQKEQFSDGVGYSWIDGLKDHANKHVSDTMLSNASFVFPDNTPLTKEAYYYRTIFEKFFPKSAARATVPGGPSIACSTAKAVEWDATWSKNLDPSGRAALGVHVAAYEEDKAAAAAKAGSDLVDPLPKNGT

SEQ ID NO: 2147 - protein, 578 aa, Arabidopsis thaliana
  peptide (1)..(578): Ceres Seq. ID no. 12559844
  misc_feature (193)..(516): Pfam Name: Pfam Description:  Asparagine synthase
  misc_feature (1)..(558): NCBI GI NO: 15238108 NR Description: asparagine synthetase ASN3; protein id: At5g10240
  misc_feature (1)..(558): NCBI GI NO: 25293864 NR Description: asparagine synthase (glutamine-hydrolyzing) (EC 6
  misc_feature (1)..(560): NCBI GI NO: 22208544 NR Description: asparagine synthetase 2 [Striga hermonthica]
  misc_feature (1)..(558): NCBI GI NO: 6049843 NR Description: asparagine synthetase [Helianthus annuus]
  misc_feature (1)..(563): NCBI GI NO: 3182921 NR Description: Asparagine synthetase
  misc_feature (1)..(567): NCBI GI NO: 13925886 NR Description: glutamine-dependent asparagine synthetase 1
  misc_feature (1)..(575): NCBI GI NO: 1617002 NR Description: asparagine synthetase [Asparagus officinalis]
  misc_feature (1)..(575): NCBI GI NO: 399064 NR Description: Asparagine synthase [glutamine-hydrolyzing] (AS)
  misc_feature (1)..(578): NCBI GI NO: 3132675 NR Description: asparagine synthetase [Elaeagnus umbellata]
  misc_feature (1)..(555): NCBI GI NO: 26246639 NR Description: Asparagine synthetase B
MCGILAVLGCIDNSQAKRSRIIELSRRLRHRGPDWSGLHCYEDCYLAHERLAIIDPTSGDQPLYNEDKTVAVTVNGEIYNHKILREKLKSHQFRTGSDCEVIAHLYEEHGEEFIDMLDGMFAFVLLDTRDKSFIAARDAIGITPLYIGWGLDGSVWFASEMKALSDDCEQFMSFPPGHIYSSKQGGLRRWYNPPWYNEQVPSTPYDPLVLRNAFEKAVIKRLMTDVPFGVLLSGGLDSSLVAAVALRHLEKSEAARQWGSQLHTFCIGLQGSPDLKAGREVADYLGTRHHEFQFTVQDGIDAIEEVIYHIETYDVTTIRASTPMFLMSRKIKSLGVKMVLSGEGSDEILGGYLYFHKAPNKKEFHEETCRKIKALHQFDCLRANKSTSAWGVEARVPFLDKEFLNVAMSIDPEWKLIKPDLGRIEKWVLRNAFDDEERPYLPKHILYRQKEQFSDGVGYSWIDGLKDHANKHVSDTMLSNASFVFPDNTPLTKEAYYYRTIFEKFFPKSAARATVPGGPSIACSTAKAVEWDATWSKNLDPSGRAALGVHVAAYEEDKAAAAAKAGSDLVDPLPKNGT

SEQ ID NO: 2148 - protein, 463 aa, Arabidopsis thaliana
  peptide (1)..(463): Ceres Seq. ID no. 12559845
  misc_feature (78)..(401): Pfam Name: Pfam Description:  Asparagine synthase
  misc_feature (1)..(443): NCBI GI NO: 15238108 NR Description: asparagine synthetase ASN3; protein id: At5g10240
  misc_feature (1)..(443): NCBI GI NO: 25293864 NR Description: asparagine synthase (glutamine-hydrolyzing) (EC 6
  misc_feature (1)..(445): NCBI GI NO: 22208544 NR Description: asparagine synthetase 2 [Striga hermonthica]
  misc_feature (1)..(443): NCBI GI NO: 6049843 NR Description: asparagine synthetase [Helianthus annuus]
  misc_feature (1)..(448): NCBI GI NO: 3182921 NR Description: Asparagine synthetase
  misc_feature (1)..(452): NCBI GI NO: 13925886 NR Description: glutamine-dependent asparagine synthetase 1
  misc_feature (1)..(460): NCBI GI NO: 1617002 NR Description: asparagine synthetase [Asparagus officinalis]
  misc_feature (1)..(460): NCBI GI NO: 399064 NR Description: Asparagine synthase [glutamine-hydrolyzing] (AS)
  misc_feature (1)..(463): NCBI GI NO: 3132675 NR Description: asparagine synthetase [Elaeagnus umbellata]
  misc_feature (1)..(440): NCBI GI NO: 26246639 NR Description: Asparagine synthetase B
MLDGMFAFVLLDTRDKSFIAARDAIGITPLYIGWGLDGSVWFASEMKALSDDCEQFMSFPPGHIYSSKQGGLRRWYNPPWYNEQVPSTPYDPLVLRNAFEKAVIKRLMTDVPFGVLLSGGLDSSLVAAVALRHLEKSEAARQWGSQLHTFCIGLQGSPDLKAGREVADYLGTRHHEFQFTVQDGIDAIEEVIYHIETYDVTTIRASTPMFLMSRKIKSLGVKMVLSGEGSDEILGGYLYFHKAPNKKEFHEETCRKIKALHQFDCLRANKSTSAWGVEARVPFLDKEFLNVAMSIDPEWKLIKPDLGRIEKWVLRNAFDDEERPYLPKHILYRQKEQFSDGVGYSWIDGLKDHANKHVSDTMLSNASFVFPDNTPLTKEAYYYRTIFEKFFPKSAARATVPGGPSIACSTAKAVEWDATWSKNLDPSGRAALGVHVAAYEEDKAAAAAKAGSDLVDPLPKNGT

SEQ ID NO: 2149 - DNA, 1254 bp, Arabidopsis thaliana
  misc_feature (1)..(1254): Ceres Seq. ID no. 12329514
atggctcagaatcaacaacctattttccagaccaaacctccagaacaatttgtgcaaatacctatcaacatcgagcgtgattcttcaaccacacgcatgaaccaaaccggaaacacaatccggaaaccaaaccactggccaaccatcaccatctcaatcatcttcgtcatcatcggtcaatccatagcgaaactcctcgaaaacttctactacgacaaaaccaaccgaagcgaatacaacgaaaaccgtcaaaacgatggcgtttggactcaatctcttctccaaactgttggtttccctctccttcttctcccgttcctcatcttcatcaccaagaacaaacgcaaccaccatcaacaacctccgatcacttccgattcaatccacttaaaatccttagctgtgatctacatttgcatcggaattatcatgtccgttcaaggaagactcgcagccatgggaaaactcgagatcccatttggtgttttcactctgatctacacagcacagctcttcttcactcctatcttcgcagctttcattaacaaaatcaaattcaatcgatgggttgttatctctgtgatcttagctatcatcaccggagctcttactctgtcttcttcattcggtggtgagcctgatgaagcagaggagaattacgctagaggctcatgggctgctctgttcgctggaatctgtttcgctcttcttctctgtaacatccaaaacgtcttcgacagttacatcttcaaacgaactgaatcaaccaatcaaaaaccaagctttgcctctgttttcgaagttattatcttctcttctctcgttgctacgatcatctccgtcgtgggtctgcttatagccggtgagcaacacgatttgaagagggaaatgaatggattctcgaaagggaaaggttcttatgtgatggctatggttggtcaagctgtttcgtggcaggtctattgggttgggattgttggacttgtctactctgtttcgagcgtgttgtcgaatgtgatcagtgtcattacgtggccgattgtgtcggttcttgtggtgatcttcttcaatttcatggatgatgagtttgatgccttcaaaggtgttgccttggttactgccgtcttaagcgctgcagcttatttctttaggcttcacaaagacaatcgtatggcttattaggtttggattcttgaatctctaaagaaagtttttttatttcccttgattttttgtgtgtatatctaatcatat

SEQ ID NO: 2150 - protein, 393 aa, Arabidopsis thaliana
  peptide (1)..(393): Ceres Seq. ID no. 12329515
  misc_feature (206)..(393): Pfam Name: Pfam Description:  Domain of unknown function, DUF250
  misc_feature (1)..(393): NCBI GI NO: 15223662 NR Description: unknown protein; protein id: At1g19770.1
  misc_feature (1)..(388): NCBI GI NO: 9369374 NR Description: F10A5.31 [Arabidopsis thaliana]
  misc_feature (11)..(388): NCBI GI NO: 15222257 NR Description: hypothetical protein; protein id: At1g75470.1
  misc_feature (40)..(390): NCBI GI NO: 15217805 NR Description: unknown protein; protein id: At1g57990
  misc_feature (46)..(390): NCBI GI NO: 15217802 NR Description: hypothetical protein; protein id: At1g57980.1
  misc_feature (40)..(390): NCBI GI NO: 15217799 NR Description: hypothetical protein; protein id: At1g57943.1
  misc_feature (46)..(386): NCBI GI NO: 15218319 NR Description: unknown protein; protein id: At1g09860.1
  misc_feature (9)..(390): NCBI GI NO: 25405230 NR Description: F16N3.10 [imported] - Arabidopsis thaliana
  misc_feature (15)..(387): NCBI GI NO: 25405226 NR Description: F16N3.13 [imported] - Arabidopsis thaliana
  misc_feature (89)..(392): NCBI GI NO: 38344290 NR Description: OSJNBa0013K16.22
MAQNQQPIFQTKPPEQFVQIPINIERDSSTTRMNQTGNTIRKPNHWPTITISIIFVIIGQSIAKLLENFYYDKTNRSEYNENRQNDGVWTQSLLQTVGFPLLLLPFLIFITKNKRNHHQQPPITSDSIHLKSLAVIYICIGIIMSVQGRLAAMGKLEIPFGVFTLIYTAQLFFTPIFAAFINKIKFNRWVVISVILAIITGALTLSSSFGGEPDEAEENYARGSWAALFAGICFALLLCNIQNVFDSYIFKRTESTNQKPSFASVFEVIIFSSLVATIISVVGLLIAGEQHDLKREMNGFSKGKGSYVMAMVGQAVSWQVYWVGIVGLVYSVSSVLSNVISVITWPIVSVLVVIFFNFMDDEFDAFKGVALVTAVLSAAAYFFRLHKDNRMAY

SEQ ID NO: 2151 - protein, 361 aa, Arabidopsis thaliana
  peptide (1)..(361): Ceres Seq. ID no. 12329516
  misc_feature (174)..(361): Pfam Name: Pfam Description:  Domain of unknown function, DUF250
  misc_feature (1)..(361): NCBI GI NO: 15223662 NR Description: unknown protein; protein id: At1g19770.1
  misc_feature (1)..(356): NCBI GI NO: 9369374 NR Description: F10A5.31 [Arabidopsis thaliana]
  misc_feature (1)..(356): NCBI GI NO: 15222257 NR Description: hypothetical protein; protein id: At1g75470.1
  misc_feature (8)..(358): NCBI GI NO: 15217805 NR Description: unknown protein; protein id: At1g57990
  misc_feature (14)..(358): NCBI GI NO: 15217802 NR Description: hypothetical protein; protein id: At1g57980.1
  misc_feature (8)..(358): NCBI GI NO: 15217799 NR Description: hypothetical protein; protein id: At1g57943.1
  misc_feature (14)..(354): NCBI GI NO: 15218319 NR Description: unknown protein; protein id: At1g09860.1
  misc_feature (1)..(358): NCBI GI NO: 25405230 NR Description: F16N3.10 [imported] - Arabidopsis thaliana
  misc_feature (1)..(355): NCBI GI NO: 25405226 NR Description: F16N3.13 [imported] - Arabidopsis thaliana
  misc_feature (57)..(360): NCBI GI NO: 38344290 NR Description: OSJNBa0013K16.22
MNQTGNTIRKPNHWPTITISIIFVIIGQSIAKLLENFYYDKTNRSEYNENRQNDGVWTQSLLQTVGFPLLLLPFLIFITKNKRNHHQQPPITSDSIHLKSLAVIYICIGIIMSVQGRLAAMGKLEIPFGVFTLIYTAQLFFTPIFAAFINKIKFNRWVVISVILAIITGALTLSSSFGGEPDEAEENYARGSWAALFAGICFALLLCNIQNVFDSYIFKRTESTNQKPSFASVFEVIIFSSLVATIISVVGLLIAGEQHDLKREMNGFSKGKGSYVMAMVGQAVSWQVYWVGIVGLVYSVSSVLSNVISVITWPIVSVLVVIFFNFMDDEFDAFKGVALVTAVLSAAAYFFRLHKDNRMAY

SEQ ID NO: 2152 - protein, 250 aa, Arabidopsis thaliana
  peptide (1)..(250): Ceres Seq. ID no. 12329517
  misc_feature (63)..(250): Pfam Name: Pfam Description:  Domain of unknown function, DUF250
  misc_feature (1)..(250): NCBI GI NO: 15223662 NR Description: unknown protein; protein id: At1g19770.1
  misc_feature (1)..(245): NCBI GI NO: 9369374 NR Description: F10A5.31 [Arabidopsis thaliana]
  misc_feature (1)..(245): NCBI GI NO: 15222257 NR Description: hypothetical protein; protein id: At1g75470.1
  misc_feature (1)..(247): NCBI GI NO: 15217805 NR Description: unknown protein; protein id: At1g57990
  misc_feature (1)..(247): NCBI GI NO: 15217802 NR Description: hypothetical protein; protein id: At1g57980.1
  misc_feature (1)..(247): NCBI GI NO: 15217799 NR Description: hypothetical protein; protein id: At1g57943.1
  misc_feature (1)..(243): NCBI GI NO: 15218319 NR Description: unknown protein; protein id: At1g09860.1
  misc_feature (1)..(247): NCBI GI NO: 25405230 NR Description: F16N3.10 [imported] - Arabidopsis thaliana
  misc_feature (1)..(244): NCBI GI NO: 25405226 NR Description: F16N3.13 [imported] - Arabidopsis thaliana
  misc_feature (1)..(249): NCBI GI NO: 38344290 NR Description: OSJNBa0013K16.22
MSVQGRLAAMGKLEIPFGVFTLIYTAQLFFTPIFAAFINKIKFNRWVVISVILAIITGALTLSSSFGGEPDEAEENYARGSWAALFAGICFALLLCNIQNVFDSYIFKRTESTNQKPSFASVFEVIIFSSLVATIISVVGLLIAGEQHDLKREMNGFSKGKGSYVMAMVGQAVSWQVYWVGIVGLVYSVSSVLSNVISVITWPIVSVLVVIFFNFMDDEFDAFKGVALVTAVLSAAAYFFRLHKDNRMAY

SEQ ID NO: 2153 - DNA, 662 bp, Arabidopsis thaliana
  misc_feature (1)..(662): Ceres Seq. ID no. 13499574
ttgtttcttcatcttcctcactctctgcgccgcgtttgcttccatctttctctcgattgtttcctctcaagcgaagcttcttcttcttcgatcttcttcctcgtgtgtggattcgtttctgaaataggatcgaagtaatggccagcaaatctggaagcggtggcctaagagaaccgccgaatgagcaagctgttttgaacatgtatgaaggcaagagatcagagctaagccaaatctactccaacataaccgacctcgagatgcaagtgagcgaacattctctggtcattaacgccattcagcctctcgaccaatcgaggaaatgcttccgcatgataggaggcgttcttgtcgaaagaaccatcaaagaggtactaccagctgtccaacgtaacaaggacggacttgaagaggttgtgaggaagctatacgagacattggagaaaaagaagaaagatcttacagagtttgaagctaagtataagatcaggataacgaaacaagaagataacaaggaaggaggtaacaagaaggaaggtaatgctcaaggtgttcttgttggagctgccagttcaagccagtaaaactctatatttggcagtttgttttactgttgtatctcttttttggatcttatggttaaaagccgtaaactttgctgt

SEQ ID NO: 2154 - protein, 148 aa, Arabidopsis thaliana
  peptide (1)..(148): Ceres Seq. ID no. 13499575
  misc_feature (16)..(123): Pfam Name: Pfam Description:  KE2 family protein
  misc_feature (1)..(148): NCBI GI NO: 15228766 NR Description: prefoldin-related protein [Arabidopsis thaliana]
  misc_feature (5)..(141): NCBI GI NO: 12408675 NR Description: prefoldin 2 [Homo sapiens]
  misc_feature (5)..(141): NCBI GI NO: 28189659 NR Description: similar to prefoldin subunit 2 [Bos taurus]
  misc_feature (14)..(141): NCBI GI NO: 5690431 NR Description: prefoldin subunit 2 [Homo sapiens]
  misc_feature (42)..(141): NCBI GI NO: 7106852 NR Description: HSPC231 [Homo sapiens]
  misc_feature (15)..(141): NCBI GI NO: 24662461 NR Description: CG6302-PA [Drosophila melanogaster]
  misc_feature (12)..(138): NCBI GI NO: 39595088 NR Description: Hypothetical protein CBG03668
  misc_feature (85)..(148): NCBI GI NO: 11994282 NR Description: gene_id:F16J14.6~unknown protein
MASKSGSGGLREPPNEQAVLNMYEGKRSELSQIYSNITDLEMQVSEHSLVINAIQPLDQSRKCFRMIGGVLVERTIKEVLPAVQRNKDGLEEVVRKLYETLEKKKKDLTEFEAKYKIRITKQEDNKEGGNKKEGNAQGVLVGAASSSQ

SEQ ID NO: 2155 - protein, 127 aa, Arabidopsis thaliana
  peptide (1)..(127): Ceres Seq. ID no. 13499576
  misc_feature (1)..(102): Pfam Name: Pfam Description:  KE2 family protein
  misc_feature (1)..(127): NCBI GI NO: 15228766 NR Description: prefoldin-related protein [Arabidopsis thaliana]
  misc_feature (1)..(120): NCBI GI NO: 12408675 NR Description: prefoldin 2 [Homo sapiens]
  misc_feature (1)..(120): NCBI GI NO: 28189659 NR Description: similar to prefoldin subunit 2 [Bos taurus]
  misc_feature (1)..(120): NCBI GI NO: 5690431 NR Description: prefoldin subunit 2 [Homo sapiens]
  misc_feature (21)..(120): NCBI GI NO: 7106852 NR Description: HSPC231 [Homo sapiens]
  misc_feature (1)..(120): NCBI GI NO: 24662461 NR Description: CG6302-PA [Drosophila melanogaster]
  misc_feature (1)..(117): NCBI GI NO: 39595088 NR Description: Hypothetical protein CBG03668
  misc_feature (64)..(127): NCBI GI NO: 11994282 NR Description: gene_id:F16J14.6~unknown protein
MYEGKRSELSQIYSNITDLEMQVSEHSLVINAIQPLDQSRKCFRMIGGVLVERTIKEVLPAVQRNKDGLEEVVRKLYETLEKKKKDLTEFEAKYKIRITKQEDNKEGGNKKEGNAQGVLVGAASSSQ

SEQ ID NO: 2156 - protein, 107 aa, Arabidopsis thaliana
  peptide (1)..(107): Ceres Seq. ID no. 13499577
  misc_feature (1)..(82): Pfam Name: Pfam Description:  KE2 family protein
  misc_feature (1)..(107): NCBI GI NO: 15228766 NR Description: prefoldin-related protein [Arabidopsis thaliana]
  misc_feature (1)..(100): NCBI GI NO: 12408675 NR Description: prefoldin 2 [Homo sapiens]
  misc_feature (1)..(100): NCBI GI NO: 28189659 NR Description: similar to prefoldin subunit 2 [Bos taurus]
  misc_feature (1)..(100): NCBI GI NO: 5690431 NR Description: prefoldin subunit 2 [Homo sapiens]
  misc_feature (1)..(100): NCBI GI NO: 7106852 NR Description: HSPC231 [Homo sapiens]
  misc_feature (1)..(100): NCBI GI NO: 24662461 NR Description: CG6302-PA [Drosophila melanogaster]
  misc_feature (1)..(97): NCBI GI NO: 39595088 NR Description: Hypothetical protein CBG03668
  misc_feature (44)..(107): NCBI GI NO: 11994282 NR Description: gene_id:F16J14.6~unknown protein
MQVSEHSLVINAIQPLDQSRKCFRMIGGVLVERTIKEVLPAVQRNKDGLEEVVRKLYETLEKKKKDLTEFEAKYKIRITKQEDNKEGGNKKEGNAQGVLVGAASSSQ

SEQ ID NO: 2157 - DNA, 1499 bp, Arabidopsis thaliana
  misc_feature (1)..(1499): Ceres Seq. ID no. 13593683
gatctaccttctcagaaagggagctgcatcaatggcgaccaataatgattttggagctttcattgagaaagttacaatctctccaacttctacttcctcgtcgcctccttctctacagggtcttactttcgccattaaagacatttttgatgtggaaggacgcgttaccggttttggtaacccggattggttaaggacacactcggcagctacttctacagctccagtagtttcatctctcttagaagctggtgccacagctttgggtattaccattatggatgaaatggcttacagtataaacggagaaaatgcgcattatgggactccgagaaacccgattgctttcgatagagtgcctgggggatcatcgagtggctcagccgtagctgtagctgctcgtcttgtggatttttctattggaactgataccggagggagtgtacgagttccagcatcttactgtgggattttcggtttccggccatcccacggtgcagtttccactgtcggacttactccaatggctcagagcttcgacacagttggatggtttgctcgggacacagccactttgaaacgtgtaggttgcgttctcctgcagcagcatcacttgaaccccatcgaaccatctcaactgattatcgcggatgactgcttcaagctgtgtagtgtaccgcatgatctcttggtgcagcctctggttggatccgtggaaaaatcgtttggaggcaacactgtagtaaagaaggtgaatcttggagagtacattggacagaatgttccaagccttaaacatttcatgacaagtgacgatgtcactacacaacaagagttctgcattccgtctctcatggccctatcgagttcaatgagattgttacaaagacatgaattcaagataaaccacggtgcatggatctcgtcggtgaagccagagtttggtcctggaatatcagaacgaattgaggaagctatcagaacatccgacgagaagatcgaccattgccggtccgtgaaatctgaactgataacggctctttcaactttgctcggggagaagggtgtgttggtgattccaacggtaccaggtcctccaccgcatctccaagctaatgtggctgcacttgaatctttccgcagcagagccttcagcttgttgtcgatcgcaggcgtttctggattctgtcaggtgagcataccattggggctacacgaaaatcttccggtttcggtatcattggtagctaagtatggctcagacggttttcttctgagtcttgtggattcccttgctgcatttatttgattgacatgtcataaacttaatgcactttgagcatatctattttgctttctgtttattatgtcatcgtagcatatctgaatggttttcttgtcccaaacccaacaatgtattaaataaattgttgtatatgttggacaattgtactatttgtcttttagcgaagtattaatgacaacttaatattaactag

SEQ ID NO: 2158 - protein, 435 aa, Arabidopsis thaliana
  peptide (1)..(435): Ceres Seq. ID no. 13593684
  misc_feature (19)..(425): Pfam Name: Pfam Description:  Amidase
  misc_feature (11)..(435): NCBI GI NO: 18390964 NR Description: amidase [Arabidopsis thaliana]
  misc_feature (11)..(234): NCBI GI NO: 25402505 NR Description: hypothetical protein
  misc_feature (260)..(303): NCBI GI NO: 25402505 NR Description: hypothetical protein
  misc_feature (1)..(431): NCBI GI NO: 7453538 NR Description: Toc64 [Pisum sativum]
  misc_feature (1)..(431): NCBI GI NO: 30684733 NR Description: chloroplast outer membrane translocon subunit
  misc_feature (5)..(425): NCBI GI NO: 9955529 NR Description: putative subunit of TOC complex
  misc_feature (5)..(425): NCBI GI NO: 30682691 NR Description: subunit of TOC complex -related
  misc_feature (16)..(435): NCBI GI NO: 13937285 NR Description: chloroplast protein-translocon-like protein
  misc_feature (16)..(351): NCBI GI NO: 38344119 NR Description: OSJNBb0050O03.16
  misc_feature (11)..(200): NCBI GI NO: 23499864 NR Description: conserved hypothetical protein
IYLLRKGAASMATNNDFGAFIEKVTISPTSTSSSPPSLQGLTFAIKDIFDVEGRVTGFGNPDWLRTHSAATSTAPVVSSLLEAGATALGITIMDEMAYSINGENAHYGTPRNPIAFDRVPGGSSSGSAVAVAARLVDFSIGTDTGGSVRVPASYCGIFGFRPSHGAVSTVGLTPMAQSFDTVGWFARDTATLKRVGCVLLQQHHLNPIEPSQLIIADDCFKLCSVPHDLLVQPLVGSVEKSFGGNTVVKKVNLGEYIGQNVPSLKHFMTSDDVTTQQEFCIPSLMALSSSMRLLQRHEFKINHGAWISSVKPEFGPGISERIEEAIRTSDEKIDHCRSVKSELITALSTLLGEKGVLVIPTVPGPPPHLQANVAALESFRSRAFSLLSIAGVSGFCQVSIPLGLHENLPVSVSLVAKYGSDGFLLSLVDSLAAFI

SEQ ID NO: 2159 - protein, 425 aa, Arabidopsis thaliana
  peptide (1)..(425): Ceres Seq. ID no. 13593685
  misc_feature (9)..(415): Pfam Name: Pfam Description:  Amidase
  misc_feature (1)..(425): NCBI GI NO: 18390964 NR Description: amidase [Arabidopsis thaliana]
  misc_feature (1)..(224): NCBI GI NO: 25402505 NR Description: hypothetical protein
  misc_feature (250)..(293): NCBI GI NO: 25402505 NR Description: hypothetical protein
  misc_feature (1)..(421): NCBI GI NO: 7453538 NR Description: Toc64 [Pisum sativum]
  misc_feature (1)..(421): NCBI GI NO: 30684733 NR Description: chloroplast outer membrane translocon subunit
  misc_feature (1)..(415): NCBI GI NO: 9955529 NR Description: putative subunit of TOC complex
  misc_feature (1)..(415): NCBI GI NO: 30682691 NR Description: subunit of TOC complex -related
  misc_feature (6)..(425): NCBI GI NO: 13937285 NR Description: chloroplast protein-translocon-like protein
  misc_feature (6)..(341): NCBI GI NO: 38344119 NR Description: OSJNBb0050O03.16
  misc_feature (1)..(190): NCBI GI NO: 23499864 NR Description: conserved hypothetical protein
MATNNDFGAFIEKVTISPTSTSSSPPSLQGLTFAIKDIFDVEGRVTGFGNPDWLRTHSAATSTAPVVSSLLEAGATALGITIMDEMAYSINGENAHYGTPRNPIAFDRVPGGSSSGSAVAVAARLVDFSIGTDTGGSVRVPASYCGIFGFRPSHGAVSTVGLTPMAQSFDTVGWFARDTATLKRVGCVLLQQHHLNPIEPSQLIIADDCFKLCSVPHDLLVQPLVGSVEKSFGGNTVVKKVNLGEYIGQNVPSLKHFMTSDDVTTQQEFCIPSLMALSSSMRLLQRHEFKINHGAWISSVKPEFGPGISERIEEAIRTSDEKIDHCRSVKSELITALSTLLGEKGVLVIPTVPGPPPHLQANVAALESFRSRAFSLLSIAGVSGFCQVSIPLGLHENLPVSVSLVAKYGSDGFLLSLVDSLAAFI

SEQ ID NO: 2160 - protein, 343 aa, Arabidopsis thaliana
  peptide (1)..(343): Ceres Seq. ID no. 13593686
  misc_feature (1)..(333): Pfam Name: Pfam Description:  Amidase
  misc_feature (1)..(343): NCBI GI NO: 18390964 NR Description: amidase [Arabidopsis thaliana]
  misc_feature (1)..(142): NCBI GI NO: 25402505 NR Description: hypothetical protein
  misc_feature (168)..(211): NCBI GI NO: 25402505 NR Description: hypothetical protein
  misc_feature (1)..(339): NCBI GI NO: 7453538 NR Description: Toc64 [Pisum sativum]
  misc_feature (1)..(339): NCBI GI NO: 30684733 NR Description: chloroplast outer membrane translocon subunit
  misc_feature (1)..(333): NCBI GI NO: 9955529 NR Description: putative subunit of TOC complex
  misc_feature (1)..(333): NCBI GI NO: 30682691 NR Description: subunit of TOC complex -related
  misc_feature (1)..(343): NCBI GI NO: 13937285 NR Description: chloroplast protein-translocon-like protein
  misc_feature (1)..(259): NCBI GI NO: 38344119 NR Description: OSJNBb0050O03.16
  misc_feature (1)..(108): NCBI GI NO: 23499864 NR Description: conserved hypothetical protein
MDEMAYSINGENAHYGTPRNPIAFDRVPGGSSSGSAVAVAARLVDFSIGTDTGGSVRVPASYCGIFGFRPSHGAVSTVGLTPMAQSFDTVGWFARDTATLKRVGCVLLQQHHLNPIEPSQLIIADDCFKLCSVPHDLLVQPLVGSVEKSFGGNTVVKKVNLGEYIGQNVPSLKHFMTSDDVTTQQEFCIPSLMALSSSMRLLQRHEFKINHGAWISSVKPEFGPGISERIEEAIRTSDEKIDHCRSVKSELITALSTLLGEKGVLVIPTVPGPPPHLQANVAALESFRSRAFSLLSIAGVSGFCQVSIPLGLHENLPVSVSLVAKYGSDGFLLSLVDSLAAFI

SEQ ID NO: 2161 - DNA, 930 bp, Arabidopsis thaliana
  misc_feature (1)..(930): Ceres Seq. ID no. 12647740
ataacacatttcaagcattggattaatcaaagacaaagaaaacgaaaatgttggcaatatttcagaaagcttttgctcacccaccggaagaactcaacagtccggcttctcatttctccggcaaaactcctaaacttcccggcgaaactctctccgacttcctctctcatcaccaaaacaatgctttctctatgaacttcggcgactccgccgtcttagcttacgctcgccaagaaacctctcttcgtcaaaggttgttctgtggactagatgggatctactgtatgtttctagggagattgaataatctctgtacattgaatcgacaatacggtttatctgggaagaactcaaacgaggcaatgtttgtgatcgaagcttatcgaacacttcgtgatcgtggtccttacccagcagatcaagttcttagaggtcttgagggaagcttcgctttcgttgtctacgatactcaaacttcctctgttttctcagctctgagttctgatggaggagagagtctttactggggaatttctggagacggatctgttgtaatgtctgatgatattcagatcataaagcaaggctgtgctaaatcgtttgctcctttccctaatggatgtatgtttcatagtgagacagggcttaagagctttgaccatccgactaatatgatgaaggcaatgccgaggattgatagtgaaggtgttctttgtggagctagtttcaaagttgatgcttgttctaagatcaatagtatccctagaagaggaagtgaagctaactgggcgctggctaattctcgttgattttgcttctagtttcgttaactcttgcttctttgttgcgttttctttttatgtactcttgtttatgtaaatatagccttatgaagacgataaagaaataaaattgatttgcttcttcgtg

SEQ ID NO: 2162 - protein, 253 aa, Arabidopsis thaliana
  peptide (1)..(253): Ceres Seq. ID no. 12647741
  misc_feature (1)..(253): NCBI GI NO: 18400774 NR Description: expressed protein; protein id: At3g15450
  misc_feature (1)..(249): NCBI GI NO: 18416995 NR Description: putative protein; protein id: At4g27450
  misc_feature (1)..(247): NCBI GI NO: 9857931 NR Description: unknown [Glycine max]
  misc_feature (1)..(247): NCBI GI NO: 542200 NR Description: hypothetical protein - garden asparagus
  misc_feature (1)..(248): NCBI GI NO: 7489016 NR Description: hypothetical protein - tomato
  misc_feature (65)..(249): NCBI GI NO: 7486256 NR Description: hypothetical protein F27G19
  misc_feature (1)..(130): NCBI GI NO: 11292640 NR Description: hypothetical protein SEN5
  misc_feature (1)..(248): NCBI GI NO: 15239993 NR Description: aluminum-induced protein-like
  misc_feature (1)..(248): NCBI GI NO: 20340249 NR Description: aluminum-induced protein-like protein
  misc_feature (80)..(191): NCBI GI NO: 24417390 NR Description: unknown [Arabidopsis thaliana]
MLAIFQKAFAHPPEELNSPASHFSGKTPKLPGETLSDFLSHHQNNAFSMNFGDSAVLAYARQETSLRQRLFCGLDGIYCMFLGRLNNLCTLNRQYGLSGKNSNEAMFVIEAYRTLRDRGPYPADQVLRGLEGSFAFVVYDTQTSSVFSALSSDGGESLYWGISGDGSVVMSDDIQIIKQGCAKSFAPFPNGCMFHSETGLKSFDHPTNMMKAMPRIDSEGVLCGASFKVDACSKINSIPRRGSEANWALANSR

SEQ ID NO: 2163 - protein, 205 aa, Arabidopsis thaliana
  peptide (1)..(205): Ceres Seq. ID no. 12647742
  misc_feature (1)..(205): NCBI GI NO: 18400774 NR Description: expressed protein; protein id: At3g15450
  misc_feature (1)..(201): NCBI GI NO: 18416995 NR Description: putative protein; protein id: At4g27450
  misc_feature (1)..(199): NCBI GI NO: 9857931 NR Description: unknown [Glycine max]
  misc_feature (1)..(199): NCBI GI NO: 542200 NR Description: hypothetical protein - garden asparagus
  misc_feature (1)..(200): NCBI GI NO: 7489016 NR Description: hypothetical protein - tomato
  misc_feature (17)..(201): NCBI GI NO: 7486256 NR Description: hypothetical protein F27G19
  misc_feature (1)..(82): NCBI GI NO: 11292640 NR Description: hypothetical protein SEN5
  misc_feature (1)..(200): NCBI GI NO: 15239993 NR Description: aluminum-induced protein-like
  misc_feature (1)..(200): NCBI GI NO: 20340249 NR Description: aluminum-induced protein-like protein
  misc_feature (32)..(143): NCBI GI NO: 24417390 NR Description: unknown [Arabidopsis thaliana]
MNFGDSAVLAYARQETSLRQRLFCGLDGIYCMFLGRLNNLCTLNRQYGLSGKNSNEAMFVIEAYRTLRDRGPYPADQVLRGLEGSFAFVVYDTQTSSVFSALSSDGGESLYWGISGDGSVVMSDDIQIIKQGCAKSFAPFPNGCMFHSETGLKSFDHPTNMMKAMPRIDSEGVLCGASFKVDACSKINSIPRRGSEANWALANSR

SEQ ID NO: 2164 - protein, 174 aa, Arabidopsis thaliana
  peptide (1)..(174): Ceres Seq. ID no. 12647743
  misc_feature (1)..(174): NCBI GI NO: 18400774 NR Description: expressed protein; protein id: At3g15450
  misc_feature (1)..(170): NCBI GI NO: 18416995 NR Description: putative protein; protein id: At4g27450
  misc_feature (1)..(168): NCBI GI NO: 9857931 NR Description: unknown [Glycine max]
  misc_feature (1)..(168): NCBI GI NO: 542200 NR Description: hypothetical protein - garden asparagus
  misc_feature (1)..(169): NCBI GI NO: 7489016 NR Description: hypothetical protein - tomato
  misc_feature (1)..(170): NCBI GI NO: 7486256 NR Description: hypothetical protein F27G19
  misc_feature (1)..(51): NCBI GI NO: 11292640 NR Description: hypothetical protein SEN5
  misc_feature (1)..(169): NCBI GI NO: 15239993 NR Description: aluminum-induced protein-like
  misc_feature (1)..(169): NCBI GI NO: 20340249 NR Description: aluminum-induced protein-like protein
  misc_feature (1)..(112): NCBI GI NO: 24417390 NR Description: unknown [Arabidopsis thaliana]
MFLGRLNNLCTLNRQYGLSGKNSNEAMFVIEAYRTLRDRGPYPADQVLRGLEGSFAFVVYDTQTSSVFSALSSDGGESLYWGISGDGSVVMSDDIQIIKQGCAKSFAPFPNGCMFHSETGLKSFDHPTNMMKAMPRIDSEGVLCGASFKVDACSKINSIPRRGSEANWALANSR

SEQ ID NO: 2165 - DNA, 740 bp, Arabidopsis thaliana
  misc_feature (1)..(740): Ceres Seq. ID no. 13646106
acggcgccaccattaaaatctctcgatctctatctgcgaaatttcacggtgagcttagtattactctcaattgttctcagtaggtatttgaaatggcgacagttccaggacaattgatctgggagatcgtgaagaacaacaactgtttcttggtgaagcagttcggtagaggaaactctaaggttcaattcagcaaggagactaacaacctcaccaacgttcactcttacaagcactctggtcttgcaaacaaaaagactgtgaccatccaggccgctgacaaggaccaagctgttgtgctcgccaccaccaagaccaagaagcagaacaagcctaagctctctgtcaacaagtctatcctcaagaaggaattccccaggatgtcaaaggctgttgctaaccaggtggtggacaactactacaggccggacttgaagaaagctgcacttgctagactcagcgccatcagcaaaggtctcagggttgccaagtccggtgccaagcaaagaaacagacaagcttaagcttcttcgtttcacaatctgttttttttgaagtaaaagattctgttgaacaggttttatgtaagttgttgctttgaagatgttccataatgctattctcctttttcattatccttattataaaggagttagaagtttatcttgttatgcttgatgtttctggtgtgcttgtgcttacattttgttagatccttctatcgaatcaggagctttctc

SEQ ID NO: 2166 - protein, 143 aa, Arabidopsis thaliana [sequence omitted]

SEQ ID NO: 2167 - DNA, 1714 bp, Arabidopsis thaliana
  misc_feature (1)..(1714): Ceres Seq. ID no. 12336512
  misc_feature (1527)..(1527): n is a, c, t, g, unknown, or other
  misc_feature (1558)..(1558): n is a, c, t, g, unknown, or other
aatctctctctccctctttcttcctcttctctcattgaaatcgaacgaggatggggaagaagaaatcgaaggaaacggagccggaatctcaaaacgatgaatctcagacaatcttctccactctcttctccggcgaggttgaaagctctggctttgcgagtctcttctccgctgataaccctttccggcgaaaacaacctcaagaaatcaaagagtcgtcaattcctgatgagaagaaaggggataaacgaaatgcagagcaacgaagaaggagaagaagaaacagatttgcctgtgaagacgaagaaatctaaaaaggaaaaaaagcttacagattccggcgacaagaaagagacgatttcggaggctgtagaagaaagtgggttggtttcaaagaggaagaagaggaagagagatgagattgagaacgaatacgagacgaagaagtatggaagcgttgagatgaaagagaagaaggttggtgagaagaggaagaaagctgatgaagtagctgatacaatggtttcaaaggaaggttttgatgatgagagtaagcttcttagaactgttttcgttgggaatttgcctttgaaggttaagaaaaaagtcatcttgaaggagtttagtaaatttggtgaggttgaatctgtgaggatacgctctgtgcctattgttgattcgaagaggacaaggaaaggagctataatgctgaaacaaatcaatgagaaagcttcaagtgttcatgcttatgttgtgtttgaaacagagcaatctgctgcagcttctctggcacataacatgtctctgattgatgggaatcatgtccgcgttgatagagcatgtccgcctcgtaagaaacagaaagggcatgatgatactcatttgtatgatcctaagaggacagtctttatgggtaatctccctttcgatgtgaaggacgaggaagtgtatcaactgtttacgggtaagagtaatctggagaacagtatagaagctgttcgtgtcattagagatcctcacttgaacattgggaaaggaatagcttacgtcttgtttaaaacacgggaagctgcaaatctcgtactcaagaaaggatacttgaagcttagagaaagagagttacggatttctcgagtcaaacctgatacgccatcaaagagaaagagcaatccgtctgaagcttactcgccggcccagaaaagactgcagaaggacaaagtggtcacaccaactccaacagggaaggctaatctttcatatcaaggtgtacgagcttcaagatctggtgatgataagaaaacaccttatcagaaaagctccgcgcagacaaagatgagacctagaggtagcagcagcaatgacaacaaaaaatctgggaataatagtgcttcaaaggaaagaagtcagaagcgaccagctgttgcagcaagaaaggcgaaagcaaacgcaaaaggttcaaaagagagcggtggtaagcggtttgcagggacaaagcgtaaacaagaaaaccggacgcctgaaatcttntctaagaagaaaaaaacaaaacggttttagncggtttctttcaaccataatggtgaacctctttcttcttccttagttttgatactagtagtcgttttgtattgttctcttatatcaatcaatgatgatatactgtaatgttgcaacaattatgttttcgtgcaagtttaaaaggaaagctattttg

SEQ ID NO: 2168 - protein, 518 aa, Arabidopsis thaliana
  peptide (1)..(518): Ceres Seq. ID no. 12336513
  misc_feature (190)..(277): Pfam Name: a.k.a. RRM, RBD, or RNP domain Pfam Description: RNA recognition motif.
  misc_feature (79)..(518): NCBI GI NO: 21554835 NR Description: unknown [Arabidopsis thaliana]
  misc_feature (79)..(518): NCBI GI NO: 15237960 NR Description: RRM-containing protein; protein id: At5g46840
  misc_feature (120)..(517): NCBI GI NO: 29126350 NR Description: unknown protein
  misc_feature (81)..(471): NCBI GI NO: 19115130 NR Description: putative RNA-binding protein
  misc_feature (79)..(446): NCBI GI NO: 37549473 NR Description: similar to DNA segment
  misc_feature (83)..(442): NCBI GI NO: 39593884 NR Description: Hypothetical protein CBG06224
  misc_feature (78)..(378): NCBI GI NO: 27370124 NR Description: RIKEN cDNA 4930547K05 [Mus musculus]
  misc_feature (91)..(442): NCBI GI NO: 17539754 NR Description: RNA recognition motif containing protein (43.9 kD)
  misc_feature (89)..(402): NCBI GI NO: 34863377 NR Description: similar to DNA segment
  misc_feature (91)..(379): NCBI GI NO: 7498869 NR Description: hypothetical protein F11A10
  misc_feature (509)..(509): Xaa is any aa, unknown or other
NLSLPLSSSSLIEIERGWGRRNRRKRSRNLKTMNLRQSSPLSSPARLKALALRVSSPLITLSGENNLKKSKSRQFLMRRKGINEMQSNEEGEEETDLPVKTKKSKKEKKLTDSGDKKETISEAVEESGLVSKRKKRKRDEIENEYETKKYGSVEMKEKKVGEKRKKADEVADTMVSKEGFDDESKLLRTVFVGNLPLKVKKKVILKEFSKFGEVESVRIRSVPIVDSKRTRKGAIMLKQINEKASSVHAYVVFETEQSAAASLAHNMSLIDGNHVRVDRACPPRKKQKGHDDTHLYDPKRTVFMGNLPFDVKDEEVYQLFTGKSNLENSIEAVRVIRDPHLNIGKGIAYVLFKTREAANLVLKKGYLKLRERELRISRVKPDTPSKRKSNPSEAYSPAQKRLQKDKVVTPTPTGKANLSYQGVRASRSGDDKKTPYQKSSAQTKMRPRGSSSNDNKKSGNNSASKERSQKRPAVAARKAKANAKGSKESGGKRFAGTKRKQENRTPEIXSKKKKTKRF

SEQ ID NO: 2169 - protein, 486 aa, Arabidopsis thaliana
  peptide (1)..(486): Ceres Seq. ID no. 12336514
  misc_feature (158)..(245): Pfam Name: a.k.a. RRM, RBD, or RNP domain Pfam Description: RNA recognition motif.
  misc_feature (47)..(486): NCBI GI NO: 21554835 NR Description: unknown [Arabidopsis thaliana]
  misc_feature (47)..(486): NCBI GI NO: 15237960 NR Description: RRM-containing protein; protein id: At5g46840
  misc_feature (88)..(485): NCBI GI NO: 29126350 NR Description: unknown protein
  misc_feature (49)..(439): NCBI GI NO: 19115130 NR Description: putative RNA-binding protein
  misc_feature (47)..(414): NCBI GI NO: 37549473 NR Description: similar to DNA segment
  misc_feature (51)..(410): NCBI GI NO: 39593884 NR Description: Hypothetical protein CBG06224
  misc_feature (46)..(346): NCBI GI NO: 27370124 NR Description: RIKEN cDNA 4930547K05 [Mus musculus]
  misc_feature (59)..(410): NCBI GI NO: 17539754 NR Description: RNA recognition motif containing protein (43.9 kD)
  misc_feature (57)..(370): NCBI GI NO: 34863377 NR Description: similar to DNA segment
  misc_feature (59)..(347): NCBI GI NO: 7498869 NR Description: hypothetical protein F11A10
  misc_feature (477)..(477): Xaa is any aa, unknown or other
MNLRQSSPLSSPARLKALALRVSSPLITLSGENNLKKSKSRQFLMRRKGINEMQSNEEGEEETDLPVKTKKSKKEKKLTDSGDKKETISEAVEESGLVSKRKKRKRDEIENEYETKKYGSVEMKEKKVGEKRKKADEVADTMVSKEGFDDESKLLRTVFVGNLPLKVKKKVILKEFSKFGEVESVRIRSVPIVDSKRTRKGAIMLKQINEKASSVHAYVVFETEQSAAASLAHNMSLIDGNHVRVDRACPPRKKQKGHDDTHLYDPKRTVFMGNLPFDVKDEEVYQLFTGKSNLENSIEAVRVIRDPHLNIGKGIAYVLFKTREAANLVLKKGYLKLRERELRISRVKPDTPSKRKSNPSEAYSPAQKRLQKDKVVTPTPTGKANLSYQGVRASRSGDDKKTPYQKSSAQTKMRPRGSSSNDNKKSGNNSASKERSQKRPAVAARKAKANAKGSKESGGKRFAGTKRKQENRTPEIXSKKKKTKRF

SEQ ID NO: 2170 - protein, 442 aa, Arabidopsis thaliana
  peptide (1)..(442): Ceres Seq. ID no. 12336515
  misc_feature (114)..(201): Pfam Name: a.k.a. RRM, RBD, or RNP domain Pfam Description: RNA recognition motif.
  misc_feature (3)..(442): NCBI GI NO: 21554835 NR Description: unknown [Arabidopsis thaliana]
  misc_feature (3)..(442): NCBI GI NO: 15237960 NR Description: RRM-containing protein; protein id: At5g46840
  misc_feature (44)..(441): NCBI GI NO: 29126350 NR Description: unknown protein
  misc_feature (5)..(395): NCBI GI NO: 19115130 NR Description: putative RNA-binding protein
  misc_feature (3)..(370): NCBI GI NO: 37549473 NR Description: similar to DNA segment
  misc_feature (7)..(366): NCBI GI NO: 39593884 NR Description: Hypothetical protein CBG06224
  misc_feature (2)..(302): NCBI GI NO: 27370124 NR Description: RIKEN cDNA 4930547K05 [Mus musculus]
  misc_feature (15)..(366): NCBI GI NO: 17539754 NR Description: RNA recognition motif containing protein (43.9 kD)
  misc_feature (13)..(326): NCBI GI NO: 34863377 NR Description: similar to DNA segment
  misc_feature (15)..(303): NCBI GI NO: 7498869 NR Description: hypothetical protein F11A10
  misc_feature (433)..(433): Xaa is any aa, unknown or other
MRRKGINEMQSNEEGEEETDLPVKTKKSKKEKKLTDSGDKKETISEAVEESGLVSKRKKRKRDEIENEYETKKYGSVEMKEKKVGEKRKKADEVADTMVSKEGFDDESKLLRTVFVGNLPLKVKKKVILKEFSKFGEVESVRIRSVPIVDSKRTRKGAIMLKQINEKASSVHAYVVFETEQSAAASLAHNMSLIDGNHVRVDRACPPRKKQKGHDDTHLYDPKRTVFMGNLPFDVKDEEVYQLFTGKSNLENSIEAVRVIRDPHLNIGKGIAYVLFKTREAANLVLKKGYLKLRERELRISRVKPDTPSKRKSNPSEAYSPAQKRLQKDKVVTPTPTGKANLSYQGVRASRSGDDKKTPYQKSSAQTKMRPRGSSSNDNKKSGNNSASKERSQKRPAVAARKAKANAKGSKESGGKRFAGTKRKQENRTPEIXSKKKKTKRF

SEQ ID NO: 2171 - DNA, 1123 bp, Arabidopsis thaliana
  misc_feature (1)..(1123): Ceres Seq. ID no. 12336416
aaagttctcagctaatctaaattcctctgttcattttctgggttgtgcgatagtttctgaacagagttaggtttctttgttcatgtctgatttcgcaaaactctgtttgccataatttgtaggtggtttaccagttcatattcttcgtaatcacggctcttttcaaatttgatcaagtcactgactttgctggtagcacaaacttcgttatacttgctgtgttaacacttgttctcaaagcctcttggcattttcgacagatagtattgactttgctagttgtggtatggggtcttcgcttggggattttccttctaatgaggatcttgcaatggggggaagatcgtcgctttgatgaacagcgtggaaatatagtgagactaatcattttctggactcttcaggctgtgtgggtttggacggttagcttacctttaacacttgttaatgcaagtgatggtggtggatctcttaaacccgcagatgttatcggttggactatgtgggttttcggtttcttgattgaagctgcagctgatcaacagaagctatcattcaaaaactctcctgaaaacagaggaaaatggtgtgatgttggagtctggaagtattcaagacatccaaactacttcggtgagatgttactgtggtggggaatctttgtggctgcatcgcctgtgcttgaaggtgcagagtatcttgtcatattcggaccactctttctcactttgctacttctattcgtcagcggcataccattactcgaggcatcggctgacaaaaaacatggaaactcaggagcttacagatcctacaagaagacaacaagtcctctgattctgttcccaagaggagtgtatgggaacttaccaggatggttcaagacggtctttctcttcgagtttccattttacagccgaaatctccctcaagagttagggtagactccaaaacagcaaagagaaagaagtaaaagatgactgatttgtgatactcatatttgagttattgttcttcacaacactctttgataaaatttgtgtaaaaaattgcccgtaagaaactgaatttgtttgaaatattggacagtcttgacagattatctcagttgtatttggttctc

SEQ ID NO: 2172 - protein, 208 aa, Arabidopsis thaliana
  peptide (1)..(208): Ceres Seq. ID no. 12336417
  misc_feature (1)..(208): NCBI GI NO: 30698953 NR Description: expressed protein [Arabidopsis thaliana]
  misc_feature (1)..(207): NCBI GI NO: 18410409 NR Description: expressed protein; protein id: At1g73650
  misc_feature (1)..(207): NCBI GI NO: 21537359 NR Description: unknown [Arabidopsis thaliana]
  misc_feature (1)..(206): NCBI GI NO: 15221003 NR Description: hypothetical protein; protein id: At1g18180.1
  misc_feature (1)..(170): NCBI GI NO: 25402844 NR Description: protein T10O22.15
  misc_feature (171)..(206): NCBI GI NO: 25402844 NR Description: protein T10O22.15
  misc_feature (1)..(150): NCBI GI NO: 25406281 NR Description: unknown protein F25P22.7
  misc_feature (1)..(170): NCBI GI NO: 9719732 NR Description: T10F20.18 [Arabidopsis thaliana]
  misc_feature (171)..(206): NCBI GI NO: 9719732 NR Description: T10F20.18 [Arabidopsis thaliana]
  misc_feature (1)..(205): NCBI GI NO: 13937298 NR Description: unknown protein [Oryza sativa]
MRILQWGEDRRFDEQRGNIVRLIIFWTLQAVWVWTVSLPLTLVNASDGGGSLKPADVIGWTMWVFGFLIEAAADQQKLSFKNSPENRGKWCDVGVWKYSRHPNYFGEMLLWWGIFVAASPVLEGAEYLVIFGPLFLTLLLLFVSGIPLLEASADKKHGNSGAYRSYKKTTSPLILFPRGVYGNLPGWFKTVFLFEFPFYSRNLPQELG

SEQ ID NO: 2173 - protein, 147 aa, Arabidopsis thaliana
  peptide (1)..(147): Ceres Seq. ID no. 12336418
  misc_feature (1)..(147): NCBI GI NO: 30698953 NR Description: expressed protein [Arabidopsis thaliana]
  misc_feature (1)..(146): NCBI GI NO: 18410409 NR Description: expressed protein; protein id: At1g73650
  misc_feature (1)..(146): NCBI GI NO: 21537359 NR Description: unknown [Arabidopsis thaliana]
  misc_feature (1)..(145): NCBI GI NO: 15221003 NR Description: hypothetical protein; protein id: At1g18180.1
  misc_feature (1)..(109): NCBI GI NO: 25402844 NR Description: protein T10O22.15
  misc_feature (110)..(145): NCBI GI NO: 25402844 NR Description: protein T10O22.15
  misc_feature (1)..(89): NCBI GI NO: 25406281 NR Description: unknown protein F25P22.7
  misc_feature (1)..(109): NCBI GI NO: 9719732 NR Description: T10F20.18 [Arabidopsis thaliana]
  misc_feature (110)..(145): NCBI GI NO: 9719732 NR Description: T10F20.18 [Arabidopsis thaliana]
  misc_feature (1)..(144): NCBI GI NO: 13937298 NR Description: unknown protein [Oryza sativa]
MWVFGFLIEAAADQQKLSFKNSPENRGKWCDVGVWKYSRHPNYFGEMLLWWGIFVAASPVLEGAEYLVIFGPLFLTLLLLFVSGIPLLEASADKKHGNSGAYRSYKKTTSPLILFPRGVYGNLPGWFKTVFLFEFPFYSRNLPQELG

SEQ ID NO: 2174 - DNA, 741 bp, Arabidopsis thaliana
  misc_feature (1)..(741): Ceres Seq. ID no. 12603380
aatcaatctatcttttttttaaccattgcgtttctttttttccctttccgagcagatctgagccgaaggttaactacatgaccggcgctgagaacggcgtgagaatgacgtcaccagagacgtcttcaacatcttccctcgccaccacaagtgtccacgtaagcgctctcgacggactcgtgaacgtgaactctctcttcaccatcgccgtcttcgttggtctttccttagcgactccaggacaacacagcctcgaacaacgatccagctgcgacgcaagtgctgacgtcgccaagaagctactggtcttcgaagtcgtctccttcagcttcttcctcttctcctctcttgtagctcagggtcttaagcttgccttaaaccttcttaatagcaaagacgtcaacgagattttcagagctcacatcaatatcaaggttttgagatggggaatgatggcttctgctgtcggatctgtaatgggctgtctcttcttgatgctctctatggttaatgtgattcagatccgtcttggtttgctctcttgcggcagcaaatcggcggctcaagctgttgcaacgctcgtcactctggtttcctctgctctgctgatttacatctctaccgccatttacgctttctggcattgatgctatgtcaaaattggataatgtccatggctttgttttgattagccaatgtgtaatttcatcatcaatgccttccaatctagttttttgttcc

SEQ ID NO: 2175 - protein, 214 aa, Arabidopsis thaliana
  peptide (1)..(214): Ceres Seq. ID no. 12603381
  misc_feature (26)..(214): NCBI GI NO: 18397969 NR Description: expressed protein; protein id: At3g07510
  misc_feature (35)..(214): NCBI GI NO: 6041846 NR Description: unknown protein [Arabidopsis thaliana]
  misc_feature (28)..(214): NCBI GI NO: 37531676 NR Description: hypothetical protein
  misc_feature (30)..(212): NCBI GI NO: 15226312 NR Description: hypothetical protein; protein id: At2g01580.1
  misc_feature (48)..(212): NCBI GI NO: 15239293 NR Description: putative protein; protein id: At5g05950
  misc_feature (49)..(212): NCBI GI NO: 34395171 NR Description: unknown protein
  misc_feature (49)..(212): NCBI GI NO: 34900646 NR Description: hypothetical protein~similar to Arabidopsis thalianachromosome5
  misc_feature (51)..(132): NCBI GI NO: 38345578 NR Description: OSJNBa0027H06.14
  misc_feature (145)..(214): NCBI GI NO: 38345578 NR Description: OSJNBa0027H06.14
  misc_feature (51)..(212): NCBI GI NO: 15232676 NR Description: putative protein; protein id: At3g46890.1
SIYLFFNHCVSFFPFPSRSEPKVNYMTGAENGVRMTSPETSSTSSLATTSVHVSALDGLVNVNSLFTIAVFVGLSLATPGQHSLEQRSSCDASADVAKKLLVFEVVSFSFFLFSSLVAQGLKLALNLLNSKDVNEIFRAHINIKVLRWGMMASAVGSVMGCLFLMLSMVNVIQIRLGLLSCGSKSAAQAVATLVTLVSSALLIYISTAIYAFWH

SEQ ID NO: 2176 - protein, 189 aa, Arabidopsis thaliana
  peptide (1)..(189): Ceres Seq. ID no. 12603382
  misc_feature (1)..(189): NCBI GI NO: 18397969 NR Description: expressed protein; protein id: At3g07510
  misc_feature (10)..(189): NCBI GI NO: 6041846 NR Description: unknown protein [Arabidopsis thaliana]
  misc_feature (3)..(189): NCBI GI NO: 37531676 NR Description: hypothetical protein
  misc_feature (5)..(187): NCBI GI NO: 15226312 NR Description: hypothetical protein; protein id: At2g01580.1
  misc_feature (23)..(187): NCBI GI NO: 15239293 NR Description: putative protein; protein id: At5g05950
  misc_feature (24)..(187): NCBI GI NO: 34395171 NR Description: unknown protein
  misc_feature (24)..(187): NCBI GI NO: 34900646 NR Description: hypothetical protein~similar to Arabidopsis thalianachromosome5
  misc_feature (26)..(107): NCBI GI NO: 38345578 NR Description: OSJNBa0027H06.14
  misc_feature (120)..(189): NCBI GI NO: 38345578 NR Description: OSJNBa0027H06.14
  misc_feature (26)..(187): NCBI GI NO: 15232676 NR Description: putative protein; protein id: At3g46890.1
MTGAENGVRMTSPETSSTSSLATTSVHVSALDGLVNVNSLFTIAVFVGLSLATPGQHSLEQRSSCDASADVAKKLLVFEVVSFSFFLFSSLVAQGLKLALNLLNSKDVNEIFRAHINIKVLRWGMMASAVGSVMGCLFLMLSMVNVIQIRLGLLSCGSKSAAQAVATLVTLVSSALLIYISTAIYAFWH

SEQ ID NO: 2177 - protein, 180 aa, Arabidopsis thaliana
  peptide (1)..(180): Ceres Seq. ID no. 12603383
  misc_feature (1)..(180): NCBI GI NO: 18397969 NR Description: expressed protein; protein id: At3g07510
  misc_feature (1)..(180): NCBI GI NO: 6041846 NR Description: unknown protein [Arabidopsis thaliana]
  misc_feature (1)..(180): NCBI GI NO: 37531676 NR Description: hypothetical protein
  misc_feature (1)..(178): NCBI GI NO: 15226312 NR Description: hypothetical protein; protein id: At2g01580.1
  misc_feature (14)..(178): NCBI GI NO: 15239293 NR Description: putative protein; protein id: At5g05950
  misc_feature (15)..(178): NCBI GI NO: 34395171 NR Description: unknown protein
  misc_feature (15)..(178): NCBI GI NO: 34900646 NR Description: hypothetical protein~similar to Arabidopsis thalianachromosome5
  misc_feature (17)..(98): NCBI GI NO: 38345578 NR Description: OSJNBa0027H06.14
  misc_feature (111)..(180): NCBI GI NO: 38345578 NR Description: OSJNBa0027H06.14
  misc_feature (17)..(178): NCBI GI NO: 15232676 NR Description: putative protein; protein id: At3g46890.1
MTSPETSSTSSLATTSVHVSALDGLVNVNSLFTIAVFVGLSLATPGQHSLEQRSSCDASADVAKKLLVFEVVSFSFFLFSSLVAQGLKLALNLLNSKDVNEIFRAHINIKVLRWGMMASAVGSVMGCLFLMLSMVNVIQIRLGLLSCGSKSAAQAVATLVTLVSSALLIYISTAIYAFWH

SEQ ID NO: 2178 - DNA, 838 bp, Arabidopsis thaliana
  misc_feature (1)..(838): Ceres Seq. ID no. 13613583
acacaactgcaaaaccctaatctcaagttttctgtcgattttgatcttttggttgtaattttgtttgtgaaagtttcggacttttggaatttgaggtagaagagatgaacagaggaagaaggaatctgaaacaagcggcgtcggaccaggatttcacgcttgaggaatgtcagagcattgcccaagtcgtctctctcagaggttccaatcaaattgagataatggatgcaaaaggagagaactcattagctttgtttccagccaagtttcgtgagagcatgtggatcagacgaggaagctttgtagtgattgaccatacaggaaaggaaaaggctcaagagtctggtagcaaagttacatctattgtatgtaaagttctattctttgagcaagtccgtcttcttcaaaagtctccggaatggccagaaatcttcaaagatactagaccgattccagctgagaaaagctcacccattgaacagcatgaagatgacggtgaagttgattcgagtgatgatgatgatggtatgcctccattgcaagcaaacacaaacagattgagaccgtttggggtgaagtgtgatgcagaaactgattcagggtcagattccgattcatagaaacatccggtacatttcttttcgcagcctcaacttaatttctcaatataggggatttatagttgcaagctgtattttataaacagtatgtaaccaacacagatctgctgataaagcagagttttgctttgcactaaatcgataattgatttatataacatgcttctcattctcttcttgcaattcttgataagtcttaataaggagtcagaaaagtt

SEQ ID NO: 2179 - protein, 171 aa, Arabidopsis thaliana
  peptide (1)..(171): Ceres Seq. ID no. 13613584
  misc_feature (1)..(171): NCBI GI NO: 15226743 NR Description: translation initiation factor -related
  misc_feature (1)..(167): NCBI GI NO: 34902168 NR Description: Hypothetical protein
  misc_feature (5)..(170): NCBI GI NO: 32766657 NR Description: Unknown (protein for MGC:63631) [Danio rerio]
  misc_feature (5)..(168): NCBI GI NO: 24581558 NR Description: CG31957-PA [Drosophila melanogaster]
  misc_feature (5)..(171): NCBI GI NO: 12842024 NR Description: unnamed protein product [Mus musculus]
  misc_feature (5)..(171): NCBI GI NO: 20884771 NR Description: RIKEN cDNA 2010003J03 [Mus musculus]
  misc_feature (5)..(151): NCBI GI NO: 31377656 NR Description: hypothetical protein MGC11102 [Homo sapiens]
  misc_feature (23)..(151): NCBI GI NO: 13477313 NR Description: MGC11102 protein [Homo sapiens]
  misc_feature (5)..(150): NCBI GI NO: 34861445 NR Description: similar to 2010003J03Rik protein
  misc_feature (8)..(116): NCBI GI NO: 31236123 NR Description: ENSANGP00000006162 [Anopheles gambiae]
MNRGRRNLKQAASDQDFTLEECQSIAQVVSLRGSNQIEIMDAKGENSLALFPAKFRESMWIRRGSFVVIDHTGKEKAQESGSKVTSIVCKVLFFEQVRLLQKSPEWPEIFKDTRPIPAEKSSPIEQHEDDGEVDSSDDDDGMPPLQANTNRLRPFGVKCDAETDSGSDSDS

SEQ ID NO: 2180 - protein, 132 aa, Arabidopsis thaliana
  peptide (1)..(132): Ceres Seq. ID no. 13613585
  misc_feature (1)..(132): NCBI GI NO: 15226743 NR Description: translation initiation factor -related
  misc_feature (1)..(128): NCBI GI NO: 34902168 NR Description: Hypothetical protein
  misc_feature (1)..(131): NCBI GI NO: 32766657 NR Description: Unknown (protein for MGC:63631) [Danio rerio]
  misc_feature (1)..(129): NCBI GI NO: 24581558 NR Description: CG31957-PA [Drosophila melanogaster]
  misc_feature (1)..(132): NCBI GI NO: 12842024 NR Description: unnamed protein product [Mus musculus]
  misc_feature (1)..(132): NCBI GI NO: 20884771 NR Description: RIKEN cDNA 2010003J03 [Mus musculus]
  misc_feature (1)..(112): NCBI GI NO: 31377656 NR Description: hypothetical protein MGC11102 [Homo sapiens]
  misc_feature (1)..(112): NCBI GI NO: 13477313 NR Description: MGC11102 protein [Homo sapiens]
  misc_feature (1)..(111): NCBI GI NO: 34861445 NR Description: similar to 2010003J03Rik protein
  misc_feature (1)..(77): NCBI GI NO: 31236123 NR Description: ENSANGP00000006162 [Anopheles gambiae]
MDAKGENSLALFPAKFRESMWIRRGSFVVIDHTGKEKAQESGSKVTSIVCKVLFFEQVRLLQKSPEWPEIFKDTRPIPAEKSSPIEQHEDDGEVDSSDDDDGMPPLQANTNRLRPFGVKCDAETDSGSDSDS

SEQ ID NO: 2181 - protein, 113 aa, Arabidopsis thaliana
  peptide (1)..(113): Ceres Seq. ID no. 13613586
  misc_feature (1)..(113): NCBI GI NO: 15226743 NR Description: translation initiation factor -related
  misc_feature (1)..(109): NCBI GI NO: 34902168 NR Description: Hypothetical protein
  misc_feature (1)..(112): NCBI GI NO: 32766657 NR Description: Unknown (protein for MGC:63631) [Danio rerio]
  misc_feature (1)..(110): NCBI GI NO: 24581558 NR Description: CG31957-PA [Drosophila melanogaster]
  misc_feature (1)..(113): NCBI GI NO: 12842024 NR Description: unnamed protein product [Mus musculus]
  misc_feature (1)..(113): NCBI GI NO: 20884771 NR Description: RIKEN cDNA 2010003J03 [Mus musculus]
  misc_feature (1)..(93): NCBI GI NO: 31377656 NR Description: hypothetical protein MGC11102 [Homo sapiens]
  misc_feature (1)..(93): NCBI GI NO: 13477313 NR Description: MGC11102 protein [Homo sapiens]
  misc_feature (1)..(92): NCBI GI NO: 34861445 NR Description: similar to 2010003J03Rik protein
  misc_feature (1)..(58): NCBI GI NO: 31236123 NR Description: ENSANGP00000006162 [Anopheles gambiae]
MWIRRGSFVVIDHTGKEKAQESGSKVTSIVCKVLFFEQVRLLQKSPEWPEIFKDTRPIPAEKSSPIEQHEDDGEVDSSDDDDGMPPLQANTNRLRPFGVKCDAETDSGSDSDS

SEQ ID NO: 2182 - DNA, 1211 bp, Arabidopsis thaliana
  misc_feature (1)..(1211): Ceres Seq. ID no. 13593431
atttcctcattcgcatcaacgaagtcaaaaccatttataaacccaaaatcttcttcgatctctccataattctcgtttgcgtcattcattcatcacatatcaaccaccacagagacagaggaatagtctcaaaactttctcagaaatggcaggcagtaatattctccataagattaagttgaaggctgggttctgtggatctgctcctgacatgggaagaggcaaaagcaagatgtggaagaacatcacccacggttttcactgtgtgaagggcaagtccagccatccgatggaggactatgtagtgtctgaattcaagaaacttgaaggtcatgaattgggtttgtttgctatctttgatggtcacttggggcatgatgtggctaaatacttgcagactaatctctttgacaacattcttaaagagaaggatttttggactgacacagagaatgctataaggaatgcctacagatcaacagatgccgtgatattgcagcagtcccttaagcttggtaaaggcggatcaacagctgtaacgggaattctaattgatggtaaaaagctagttgttgctaatgttggagactccagagcagtgatgtctaagaatggtgttgcgcatcagctatctgtcgatcatgaaccaagcaaggagaaaaaagaaatagagagccgaggtggctttgtgtcaaatattccaggggatgttccacgagtggatggacagttagcggttgcaagagcatttggagataagagcttaaagttacatctgagctcagaaccggacataacacaccagacaattgatgatcacactgaattcatccttttcgcaagcgatggtatttggaaagtattatcaaaccaagaagcggttgatgctatcaagagtatcaaagatcctcatgcagctgcaaagcacttgatagaggaagctatatctaggaagagcaaagatgacatctcatgtatcgttgtaaagttccactaatcttctcttcttcttatcaaaagctattttgtctataagttaccatcaagttgcaagatagagaaatatatgctcaagctgtgtctgtaaaaacccagtaatgaggtttcccagaagatgtaatatattatcgaaatcgcaacagccttaagatacaaaagaaagaactgaaattaaaaaaatgaaataaaacaaatcgcaacagccttaagat

SEQ ID NO: 2183 - protein, 283 aa, Arabidopsis thaliana
  peptide (1)..(283): Ceres Seq. ID no. 13593432
  misc_feature (34)..(275): Pfam Name: Pfam Description:  Protein phosphatase 2C
  misc_feature (1)..(283): NCBI GI NO: 18417190 NR Description: protein phosphatase 2C (PP2C), putative
  misc_feature (30)..(283): NCBI GI NO: 7488280 NR Description: protein phosphatase 2C homolog F20O9
  misc_feature (1)..(282): NCBI GI NO: 18399423 NR Description: protein phosphatase 2C (PP2C), putative
  misc_feature (1)..(282): NCBI GI NO: 25411985 NR Description: probable protein phosphatase 2C
  misc_feature (1)..(281): NCBI GI NO: 4336436 NR Description: protein phosphatase type 2C [Lotus japonicus]
  misc_feature (1)..(282): NCBI GI NO: 15232538 NR Description: protein phosphatase 2C (PP2C), putative
  misc_feature (1)..(282): NCBI GI NO: 21539551 NR Description: putative protein phosphatase type 2C
  misc_feature (1)..(282): NCBI GI NO: 23307574 NR Description: putative protein phosphatase 2C homolog
  misc_feature (19)..(282): NCBI GI NO: 18395099 NR Description: protein phosphatase 2C (PP2C), putative
  misc_feature (19)..(282): NCBI GI NO: 21537096 NR Description: protein phosphatase type 2C, putative
MAGSNILHKIKLKAGFCGSAPDMGRGKSKMWKNITHGFHCVKGKSSHPMEDYVVSEFKKLEGHELGLFAIFDGHLGHDVAKYLQTNLFDNILKEKDFWTDTENAIRNAYRSTDAVILQQSLKLGKGGSTAVTGILIDGKKLVVANVGDSRAVMSKNGVAHQLSVDHEPSKEKKEIESRGGFVSNIPGDVPRVDGQLAVARAFGDKSLKLHLSSEPDITHQTIDDHTEFILFASDGIWKVLSNQEAVDAIKSIKDPHAAAKHLIEEAISRKSKDDISCIVVKFH

SEQ ID NO: 2184 - protein, 261 aa, Arabidopsis thaliana
  peptide (1)..(261): Ceres Seq. ID no. 13593433
  misc_feature (12)..(253): Pfam Name: Pfam Description:  Protein phosphatase 2C
  misc_feature (1)..(261): NCBI GI NO: 18417190 NR Description: protein phosphatase 2C (PP2C), putative
  misc_feature (8)..(261): NCBI GI NO: 7488280 NR Description: protein phosphatase 2C homolog F20O9
  misc_feature (1)..(260): NCBI GI NO: 18399423 NR Description: protein phosphatase 2C (PP2C), putative
  misc_feature (1)..(260): NCBI GI NO: 25411985 NR Description: probable protein phosphatase 2C
  misc_feature (1)..(259): NCBI GI NO: 4336436 NR Description: protein phosphatase type 2C [Lotus japonicus]
  misc_feature (1)..(260): NCBI GI NO: 15232538 NR Description: protein phosphatase 2C (PP2C), putative
  misc_feature (1)..(260): NCBI GI NO: 21539551 NR Description: putative protein phosphatase type 2C
  misc_feature (1)..(260): NCBI GI NO: 23307574 NR Description: putative protein phosphatase 2C homolog
  misc_feature (1)..(260): NCBI GI NO: 18395099 NR Description: protein phosphatase 2C (PP2C), putative
  misc_feature (1)..(260): NCBI GI NO: 21537096 NR Description: protein phosphatase type 2C, putative
MGRGKSKMWKNITHGFHCVKGKSSHPMEDYVVSEFKKLEGHELGLFAIFDGHLGHDVAKYLQTNLFDNILKEKDFWTDTENAIRNAYRSTDAVILQQSLKLGKGGSTAVTGILIDGKKLVVANVGDSRAVMSKNGVAHQLSVDHEPSKEKKEIESRGGFVSNIPGDVPRVDGQLAVARAFGDKSLKLHLSSEPDITHQTIDDHTEFILFASDGIWKVLSNQEAVDAIKSIKDPHAAAKHLIEEAISRKSKDDISCIVVKFH

SEQ ID NO: 2185 - protein, 254 aa, Arabidopsis thaliana
  peptide (1)..(254): Ceres Seq. ID no. 13593434
  misc_feature (5)..(246): Pfam Name: Pfam Description:  Protein phosphatase 2C
  misc_feature (1)..(254): NCBI GI NO: 18417190 NR Description: protein phosphatase 2C (PP2C), putative
  misc_feature (1)..(254): NCBI GI NO: 7488280 NR Description: protein phosphatase 2C homolog F20O9
  misc_feature (1)..(253): NCBI GI NO: 18399423 NR Description: protein phosphatase 2C (PP2C), putative
  misc_feature (1)..(253): NCBI GI NO: 25411985 NR Description: probable protein phosphatase 2C
  misc_feature (1)..(252): NCBI GI NO: 4336436 NR Description: protein phosphatase type 2C [Lotus japonicus]
  misc_feature (1)..(253): NCBI GI NO: 15232538 NR Description: protein phosphatase 2C (PP2C), putative
  misc_feature (1)..(253): NCBI GI NO: 21539551 NR Description: putative protein phosphatase type 2C
  misc_feature (1)..(253): NCBI GI NO: 23307574 NR Description: putative protein phosphatase 2C homolog
  misc_feature (1)..(253): NCBI GI NO: 18395099 NR Description: protein phosphatase 2C (PP2C), putative
  misc_feature (1)..(253): NCBI GI NO: 21537096 NR Description: protein phosphatase type 2C, putative
MWKNITHGFHCVKGKSSHPMEDYVVSEFKKLEGHELGLFAIFDGHLGHDVAKYLQTNLFDNILKEKDFWTDTENAIRNAYRSTDAVILQQSLKLGKGGSTAVTGILIDGKKLVVANVGDSRAVMSKNGVAHQLSVDHEPSKEKKEIESRGGFVSNIPGDVPRVDGQLAVARAFGDKSLKLHLSSEPDITHQTIDDHTEFILFASDGIWKVLSNQEAVDAIKSIKDPHAAAKHLIEEAISRKSKDDISCIVVKFH

SEQ ID NO: 2186 - DNA, 905 bp, Arabidopsis thaliana
  misc_feature (1)..(905): Ceres Seq. ID no. 13593425
atatataaagtcgccattgaagtgaagctgagatcttttcgaagagcggaagctaaggagaggcgaattcgaatcgagaagatggtgtctggctcagggatatgttcaaagcgtgtcgttgttgacgcacgtcaccatatgtgtggtcgtcttgcttcgatcatagctaaagagttgctcaatggacagagtgttgttgttgtccgatgtgaggagatttgtttgtctggtggtttggttcgtcagaagatgaagtacatgaggtttcttaggaaacgcatgaacactaaaccttctcatggtcctattcatttccgtgctccgtctaagatcttctggcgtaccgttcgtgggatgattccacacaagaccaagcgtggtgctgctgctcttgcacgtttgaaggtgtttgagggagtaccacctccttatgacaaggtcaagagaatggtcattcctgatgctctcaaggtgttgaggcttcaggctggtcacaagtactgcttgttgggacgtttgtcttctgaagttggctggaaccattacgataccatcaaggagcttgaggtgaagagaaaggagaggtcacaagctttgtatgagcgtaagaagcaactcaccaagctcagggcaaaggccgagaaggttgcagaggagaaacttggatcccagctcgatgttcttgcatcgatcaagtactgaagaaaatcagcatctatcttttggtttaactcttgttttggtttttatctattcagattttgttttcttccttgtatcactgttgaagtttatcacctcatttcagttttatttatcagttgatacttcaatccttagggatgagctctacaaaaaaaaaaaaaaaaatatcgataccgtcgacctcgagggggggcccggta

SEQ ID NO: 2187 - protein, 233 aa, Arabidopsis thaliana
  peptide (1)..(233): Ceres Seq. ID no. 13593426
  misc_feature (38)..(154): Pfam Name: Pfam Description:  Ribosomal protein L13
  misc_feature (28)..(233): NCBI GI NO: 15230197 NR Description: 60S ribosomal protein L13A (RPL13aB)
  misc_feature (28)..(233): NCBI GI NO: 19423912 NR Description: putative 60S ribosomal protein
  misc_feature (28)..(233): NCBI GI NO: 15231394 NR Description: 60S ribosomal protein L13A (RPL13aA)
  misc_feature (28)..(233): NCBI GI NO: 15235617 NR Description: 60S ribosomal protein L13A (RPL13aC)
  misc_feature (28)..(233): NCBI GI NO: 15239698 NR Description: 60S ribosomal protein L13A (RPL13aD)
  misc_feature (28)..(233): NCBI GI NO: 21326116 NR Description: putative 60S ribosomal protein [Sorghum bicolor]
  misc_feature (28)..(233): NCBI GI NO: 33146452 NR Description: putative 60S ribosomal protein
  misc_feature (28)..(233): NCBI GI NO: 37718812 NR Description: putative ribosomal protein L13a
  misc_feature (28)..(233): NCBI GI NO: 3914535 NR Description: 60S RIBOSOMAL PROTEIN L13A
  misc_feature (28)..(186): NCBI GI NO: 34899414 NR Description: putative 60S ribosomal protein
IYKVAIEVKLRSFRRAEAKERRIRIEKMVSGSGICSKRVVVDARHHMCGRLASIIAKELLNGQSVVVVRCEEICLSGGLVRQKMKYMRFLRKRMNTKPSHGPIHFRAPSKIFWRTVRGMIPHKTKRGAAALARLKVFEGVPPPYDKVKRMVIPDALKVLRLQAGHKYCLLGRLSSEVGWNHYDTIKELEVKRKERSQALYERKKQLTKLRAKAEKVAEEKLGSQLDVLASIKY

SEQ ID NO: 2188 - protein, 206 aa, Arabidopsis thaliana [sequence omitted]

SEQ ID NO: 2189 - protein, 187 aa, Arabidopsis thaliana
  peptide (1)..(187): Ceres Seq. ID no. 13593428
  misc_feature (1)..(108): Pfam Name: Pfam Description:  Ribosomal protein L13
  misc_feature (1)..(187): NCBI GI NO: 15230197 NR Description: 60S ribosomal protein L13A (RPL13aB)
  misc_feature (1)..(187): NCBI GI NO: 19423912 NR Description: putative 60S ribosomal protein
  misc_feature (1)..(187): NCBI GI NO: 15231394 NR Description: 60S ribosomal protein L13A (RPL13aA)
  misc_feature (1)..(187): NCBI GI NO: 15235617 NR Description: 60S ribosomal protein L13A (RPL13aC)
  misc_feature (1)..(187): NCBI GI NO: 15239698 NR Description: 60S ribosomal protein L13A (RPL13aD)
  misc_feature (1)..(187): NCBI GI NO: 21326116 NR Description: putative 60S ribosomal protein [Sorghum bicolor]
  misc_feature (1)..(187): NCBI GI NO: 33146452 NR Description: putative 60S ribosomal protein
  misc_feature (1)..(187): NCBI GI NO: 37718812 NR Description: putative ribosomal protein L13a
  misc_feature (1)..(187): NCBI GI NO: 3914535 NR Description: 60S RIBOSOMAL PROTEIN L13A
  misc_feature (1)..(140): NCBI GI NO: 34899414 NR Description: putative 60S ribosomal protein
MCGRLASIIAKELLNGQSVVVVRCEEICLSGGLVRQKMKYMRFLRKRMNTKPSHGPIHFRAPSKIFWRTVRGMIPHKTKRGAAALARLKVFEGVPPPYDKVKRMVIPDALKVLRLQAGHKYCLLGRLSSEVGWNHYDTIKELEVKRKERSQALYERKKQLTKLRAKAEKVAEEKLGSQLDVLASIKY

SEQ ID NO: 2190 - DNA, 1338 bp, Arabidopsis thaliana
  misc_feature (1)..(1338): Ceres Seq. ID no. 12397162
atggcgacctaaattttctaattccagaaagtaagcaactttaagcttcctcctcctctttttcaattacattaccattttttggtgtagctttttaaatcagtgcatcagaatcgaatctcacaccttttttgttccttcctcttaacccatcttttgatttcacaaaactccagatctgactgatttcatcgaagaaacaaatccgtgggtcattagaaaaatccgattttttgattaaaagatgtggtcggtgatgggtttagtgagacgtacggctatgtcctccaccgtgaataaagcttctccggttaggtctttgcttggtgggtttagatgtctcaacgttgagtctaaggaagaagatgagaaaaaggatatgactgtgttagaagctaagaagttaatgagattagtgaatgttgaagatatgaagaagaagcttattggtatgggtgataaagaaatggttacttacactacacttattgaagcatctcaaggtttaggtatcgctagatctcttgatgaagctcatgcttttgctcgtgttcttgatgatgctggtgttattttgatctttcgtgataaagtctatcttcatcctcataaggtggtggatttgattagaaaggcagtgcctttaggtttgaatccagatgatgagttgattagagaagagtttgataagatgagaagtatgaaggaagagattgatgtgttagctcatcaacaagtgaggaagattctatggggtggtcttggttactcagtggttcaaattggaatctttgttaggctaactttttgggagttttcttgggatgtgatggaaccaataacgtttttcactacagctactgggattattgtgggttatgcttatttcttgatgacttctagagatccaacgtatcaagatttcatgaaaaggttgtttctttccaggcagaggaagttgcttaagagtcataagtttgatgctgagaggtttaaagaactggagaacaagtggaagataacgtcttgctcttcttcttcgtgccacgctaatgcatcgattcggaatcgtgttggtgttgatcttgatttggaggattctttgcagagtcatcacagagattgattggttctaaccatttttcacttttgatgatattacttaaccagattttcttctctctggaggttgatcaagtttgattatttggtgttgattgatccaaagagttggagtagtcatggtgatttttatttgataatcttgagctactcttatttaaatcagctcatgtgttaatcttttctatggttaaggattttgacggattataatag

SEQ ID NO: 2191 - protein, 293 aa, Arabidopsis thaliana
  peptide (1)..(293): Ceres Seq. ID no. 12397163
  misc_feature (84)..(266): Pfam Name: Pfam Description:  Protein of unknown function, DUF607
  misc_feature (1)..(293): NCBI GI NO: 22330290 NR Description: hypothetical protein; protein id: At1g57610
  misc_feature (5)..(293): NCBI GI NO: 25404155 NR Description: hypothetical protein T8L23.8
  misc_feature (1)..(293): NCBI GI NO: 18391039 NR Description: Expressed protein; protein id: At1g09575
  misc_feature (13)..(241): NCBI GI NO: 25402554 NR Description: hypothetical protein
  misc_feature (40)..(258): NCBI GI NO: 34909244 NR Description: B1148D12.10
  misc_feature (1)..(270): NCBI GI NO: 15224063 NR Description: hypothetical protein; protein id: At2g23790.1
  misc_feature (41)..(270): NCBI GI NO: 24496456 NR Description: hypothetical protein [Arabidopsis thaliana]
  misc_feature (37)..(254): NCBI GI NO: 15234535 NR Description: putative protein; protein id: At4g36820.1
  misc_feature (46)..(267): NCBI GI NO: 14596231 NR Description: Unknown protein [Arabidopsis thaliana]
  misc_feature (46)..(267): NCBI GI NO: 15240047 NR Description: putative protein; protein id: At5g66650
MWSVMGLVRRTAMSSTVNKASPVRSLLGGFRCLNVESKEEDEKKDMTVLEAKKLMRLVNVEDMKKKLIGMGDKEMVTYTTLIEASQGLGIARSLDEAHAFARVLDDAGVILIFRDKVYLHPHKVVDLIRKAVPLGLNPDDELIREEFDKMRSMKEEIDVLAHQQVRKILWGGLGYSVVQIGIFVRLTFWEFSWDVMEPITFFTTATGIIVGYAYFLMTSRDPTYQDFMKRLFLSRQRKLLKSHKFDAERFKELENKWKITSCSSSSCHANASIRNRVGVDLDLEDSLQSHHRD

SEQ ID NO: 2192 - protein, 289 aa, Arabidopsis thaliana
  peptide (1)..(289): Ceres Seq. ID no. 12397164
  misc_feature (80)..(262): Pfam Name: Pfam Description:  Protein of unknown function, DUF607
  misc_feature (1)..(289): NCBI GI NO: 22330290 NR Description: hypothetical protein; protein id: At1g57610
  misc_feature (1)..(289): NCBI GI NO: 25404155 NR Description: hypothetical protein T8L23.8
  misc_feature (1)..(289): NCBI GI NO: 18391039 NR Description: Expressed protein; protein id: At1g09575
  misc_feature (9)..(237): NCBI GI NO: 25402554 NR Description: hypothetical protein
  misc_feature (36)..(254): NCBI GI NO: 34909244 NR Description: B1148D12.10
  misc_feature (1)..(266): NCBI GI NO: 15224063 NR Description: hypothetical protein; protein id: At2g23790.1
  misc_feature (37)..(266): NCBI GI NO: 24496456 NR Description: hypothetical protein [Arabidopsis thaliana]
  misc_feature (33)..(250): NCBI GI NO: 15234535 NR Description: putative protein; protein id: At4g36820.1
  misc_feature (42)..(263): NCBI GI NO: 14596231 NR Description: Unknown protein [Arabidopsis thaliana]
  misc_feature (42)..(263): NCBI GI NO: 15240047 NR Description: putative protein; protein id: At5g66650
MGLVRRTAMSSTVNKASPVRSLLGGFRCLNVESKEEDEKKDMTVLEAKKLMRLVNVEDMKKKLIGMGDKEMVTYTTLIEASQGLGIARSLDEAHAFARVLDDAGVILIFRDKVYLHPHKVVDLIRKAVPLGLNPDDELIREEFDKMRSMKEEIDVLAHQQVRKILWGGLGYSVVQIGIFVRLTFWEFSWDVMEPITFFTTATGIIVGYAYFLMTSRDPTYQDFMKRLFLSRQRKLLKSHKFDAERFKELENKWKITSCSSSSCHANASIRNRVGVDLDLEDSLQSHHRD

SEQ ID NO: 2193 - protein, 281 aa, Arabidopsis thaliana
  peptide (1)..(281): Ceres Seq. ID no. 12397165
  misc_feature (72)..(254): Pfam Name: Pfam Description:  Protein of unknown function, DUF607
  misc_feature (1)..(281): NCBI GI NO: 22330290 NR Description: hypothetical protein; protein id: At1g57610
  misc_feature (1)..(281): NCBI GI NO: 25404155 NR Description: hypothetical protein T8L23.8
  misc_feature (1)..(281): NCBI GI NO: 18391039 NR Description: Expressed protein; protein id: At1g09575
  misc_feature (1)..(229): NCBI GI NO: 25402554 NR Description: hypothetical protein
  misc_feature (28)..(246): NCBI GI NO: 34909244 NR Description: B1148D12.10
  misc_feature (1)..(258): NCBI GI NO: 15224063 NR Description: hypothetical protein; protein id: At2g23790.1
  misc_feature (29)..(258): NCBI GI NO: 24496456 NR Description: hypothetical protein [Arabidopsis thaliana]
  misc_feature (25)..(242): NCBI GI NO: 15234535 NR Description: putative protein; protein id: At4g36820.1
  misc_feature (34)..(255): NCBI GI NO: 14596231 NR Description: Unknown protein [Arabidopsis thaliana]
  misc_feature (34)..(255): NCBI GI NO: 15240047 NR Description: putative protein; protein id: At5g66650
MSSTVNKASPVRSLLGGFRCLNVESKEEDEKKDMTVLEAKKLMRLVNVEDMKKKLIGMGDKEMVTYTTLIEASQGLGIARSLDEAHAFARVLDDAGVILIFRDKVYLHPHKVVDLIRKAVPLGLNPDDELIREEFDKMRSMKEEIDVLAHQQVRKILWGGLGYSVVQIGIFVRLTFWEFSWDVMEPITFFTTATGIIVGYAYFLMTSRDPTYQDFMKRLFLSRQRKLLKSHKFDAERFKELENKWKITSCSSSSCHANASIRNRVGVDLDLEDSLQSHHRD

SEQ ID NO: 2194 - DNA, 903 bp, Arabidopsis thaliana
  misc_feature (1)..(903): Ceres Seq. ID no. 13592914
gcacacagttctcagataaatactaaactcactgttaaaactttctcaacaaagcttcctgtttagatacaaatggcatctgctctcgctcttaagagactcctatcatcctccatcgctccacgttcccgtagtgttcttcgtccagctgtttcctctcgcctcttcaacaccaacgccgttaggagctacgacgacgacggcgaaaatggagacggcgttgatttatatcgccgctctgttcctcgccgccgtggtgatttcttctcagatgtgtttgatccgttttcgccgacgaggagcgttagtcaagtgctgaatctgatggaccagttcatggagaatcctctgttatcagctactcgtggcatgggagcttcaggagctcgtcgtggttgggatataaaagagaaagacgatgctctgtacctgagaatcgacatgcctgggctgagcagagaggatgtgaagctggctttggagcaggacactctggtgattagaggagaaggaaaaaacgaggaagatggtggcgaggaaggagagagcggtaatcggagattcacaagcaggattggattaccggataagatttacaagatcgatgagattaaggcggagatgaagaacggagtgttgaaagttgtgatcccgaagatgaaagaacaagagagaaatgatgttcgtcagatcgagatcaactaaaaacgtcgacgtttttttctgttctagttatgttgataggtctttgaataagatgtgtgtgtagtttggcacggtcgatgttgagtcatgtagtctctaaagactaaaaggttatatgtttctttcttgagacggtggttttttgtcttgcttaaaccaaaatttgcattccaaatcaaagcactaattaaataaaac

SEQ ID NO: 2195 - protein, 210 aa, Arabidopsis thaliana
  peptide (1)..(210): Ceres Seq. ID no. 13592915
  misc_feature (1)..(210): NCBI GI NO: 15234969 NR Description: mitochondrion-localized small heat shock protein
  misc_feature (1)..(210): NCBI GI NO: 2326354 NR Description: LMW heat shock protein [Arabidopsis thaliana]
  misc_feature (31)..(210): NCBI GI NO: 2326361 NR Description: hypothetical protein [Arabidopsis thaliana]
  misc_feature (2)..(210): NCBI GI NO: 21554988 NR Description: mitochondrial heat shock 22 kd protein-like
  misc_feature (2)..(210): NCBI GI NO: 15242086 NR Description: heat shock protein, putative
  misc_feature (1)..(210): NCBI GI NO: 1170368 NR Description: Heat shock 22 kDa protein, mitochondrial precursor
  misc_feature (1)..(209): NCBI GI NO: 7159338 NR Description: LMW heat shock protein [Euphorbia esula]
  misc_feature (3)..(209): NCBI GI NO: 7441310 NR Description: heat shock protein MTSHP precursor
  misc_feature (1)..(210): NCBI GI NO: 123564 NR Description: Small heat shock protein, chloroplast precursor
  misc_feature (1)..(209): NCBI GI NO: 3122228 NR Description: Heat shock 22 kDa protein, mitochondrial precursor
MASALALKRLLSSSIAPRSRSVLRPAVSSRLFNTNAVRSYDDDGENGDGVDLYRRSVPRRRGDFFSDVFDPFSPTRSVSQVLNLMDQFMENPLLSATRGMGASGARRGWDIKEKDDALYLRIDMPGLSREDVKLALEQDTLVIRGEGKNEEDGGEEGESGNRRFTSRIGLPDKIYKIDEIKAEMKNGVLKVVIPKMKEQERNDVRQIEIN

SEQ ID NO: 2196 - protein, 126 aa, Arabidopsis thaliana
  peptide (1)..(126): Ceres Seq. ID no. 13592916
  misc_feature (1)..(126): NCBI GI NO: 15234969 NR Description: mitochondrion-localized small heat shock protein
  misc_feature (1)..(126): NCBI GI NO: 2326354 NR Description: LMW heat shock protein [Arabidopsis thaliana]
  misc_feature (1)..(126): NCBI GI NO: 2326361 NR Description: hypothetical protein [Arabidopsis thaliana]
  misc_feature (1)..(126): NCBI GI NO: 21554988 NR Description: mitochondrial heat shock 22 kd protein-like
  misc_feature (1)..(126): NCBI GI NO: 15242086 NR Description: heat shock protein, putative
  misc_feature (1)..(126): NCBI GI NO: 1170368 NR Description: Heat shock 22 kDa protein, mitochondrial precursor
  misc_feature (1)..(125): NCBI GI NO: 7159338 NR Description: LMW heat shock protein [Euphorbia esula]
  misc_feature (1)..(125): NCBI GI NO: 7441310 NR Description: heat shock protein MTSHP precursor
  misc_feature (1)..(126): NCBI GI NO: 123564 NR Description: Small heat shock protein, chloroplast precursor
  misc_feature (1)..(125): NCBI GI NO: 3122228 NR Description: Heat shock 22 kDa protein, mitochondrial precursor
MDQFMENPLLSATRGMGASGARRGWDIKEKDDALYLRIDMPGLSREDVKLALEQDTLVIRGEGKNEEDGGEEGESGNRRFTSRIGLPDKIYKIDEIKAEMKNGVLKVVIPKMKEQERNDVRQIEIN

SEQ ID NO: 2197 - protein, 122 aa, Arabidopsis thaliana
  peptide (1)..(122): Ceres Seq. ID no. 13592917
  misc_feature (1)..(122): NCBI GI NO: 15234969 NR Description: mitochondrion-localized small heat shock protein
  misc_feature (1)..(122): NCBI GI NO: 2326354 NR Description: LMW heat shock protein [Arabidopsis thaliana]
  misc_feature (1)..(122): NCBI GI NO: 2326361 NR Description: hypothetical protein [Arabidopsis thaliana]
  misc_feature (1)..(122): NCBI GI NO: 21554988 NR Description: mitochondrial heat shock 22 kd protein-like
  misc_feature (1)..(122): NCBI GI NO: 15242086 NR Description: heat shock protein, putative
  misc_feature (1)..(122): NCBI GI NO: 1170368 NR Description: Heat shock 22 kDa protein, mitochondrial precursor
  misc_feature (1)..(121): NCBI GI NO: 7159338 NR Description: LMW heat shock protein [Euphorbia esula]
  misc_feature (1)..(121): NCBI GI NO: 7441310 NR Description: heat shock protein MTSHP precursor
  misc_feature (1)..(122): NCBI GI NO: 123564 NR Description: Small heat shock protein, chloroplast precursor
  misc_feature (1)..(121): NCBI GI NO: 3122228 NR Description: Heat shock 22 kDa protein, mitochondrial precursor
MENPLLSATRGMGASGARRGWDIKEKDDALYLRIDMPGLSREDVKLALEQDTLVIRGEGKNEEDGGEEGESGNRRFTSRIGLPDKIYKIDEIKAEMKNGVLKVVIPKMKEQERNDVRQIEIN

SEQ ID NO: 2198 - DNA, 1188 bp, Arabidopsis thaliana
  misc_feature (1)..(1188): Ceres Seq. ID no. 12336419
ctttcgtgtatggttccgggaaggaaaaggggaagtggattgttttcatcggcgataagtctcttctcctctgggattgaggttggtggtgtgaggtaaagcttcggtagttagagatgaatgcgtccggcttaactgttactccgcccagatttcactttcgatggcgttctgatcgttttggtacatctcagagaagctctcaagcttttactgttcttagcaaattgaataatcgaaattccgcttggcctgttcttaaaagttctcgtttggcgcttcctacacaaagaagaaatgctatgatcactcgtgccatgagtgcttcctttggtgatatggcagacgattcagctgctatcttccctcggatcaatgtcaaagacccatataaacggcttgggataagccggatggcctcagaggatgagattcaaggagcgaggaactttctcattcagcaatacgcagggcacaaacccagtgttgatgcaatcgaatcagctcatgacaagattatcatgcagaagtttcatgagaggaaaaaccccaagattgacatatcgaaaaaggttcgccaagtgaggcagtccaaagttgtcaactttgttttcgagagattccaaactcctcccaatgcagtccttgtcaaaacagcagtcacgtttgcagttcttggcgttctaaccgttctgttcccgacagaagaaggaccgaccttgcaggttttgttatcactaatagctaccttttacttcatccaccaaaggctccagaagaagctctggactttcctttacggagcgggagctttcatcttctcgtggctggttgggactttcttgatggtatctgtgatcccaccgttcatcaaaggaccaagaggttttgaagtcatgtcttcgctcctaagctatgttttgctttgggtcgcttcgagttacctccggtagcgtgctagcttttttcttttccccgtcttttgggccagaaattcaagtgttatctcggatatatgaaaacacacgaacagagaaaaaatgcatcattttcatgtgacagagagagagagagagagagatatgatttgtggtcttggagttgttatttcacggagacctcattaactttcaaagctcagtttccaagttgtggctacaaacaaagaatagtaagagttgattacgc

SEQ ID NO: 2199 - protein, 278 aa, Arabidopsis thaliana
  peptide (1)..(278): Ceres Seq. ID no. 12336420
  misc_feature (1)..(278): NCBI GI NO: 18409276 NR Description: putative protein; protein id: At3g51140
  misc_feature (47)..(278): NCBI GI NO: 11357625 NR Description: hypothetical protein F24M12
  misc_feature (47)..(278): NCBI GI NO: 15237199 NR Description: putative protein; protein id: At5g23040.1
  misc_feature (89)..(278): NCBI GI NO: 17230751 NR Description: hypothetical protein [Nostoc sp. PCC 7120]
  misc_feature (89)..(278): NCBI GI NO: 23129945 NR Description: hypothetical protein [Nostoc punctiforme]
  misc_feature (83)..(278): NCBI GI NO: 16329734 NR Description: unknown protein [Synechocystis sp. PCC 6803]
  misc_feature (169)..(278): NCBI GI NO: 37573058 NR Description: unknown protein
  misc_feature (92)..(278): NCBI GI NO: 23039527 NR Description: hypothetical protein
MNASGLTVTPPRFHFRWRSDRFGTSQRSSQAFTVLSKLNNRNSAWPVLKSSRLALPTQRRNAMITRAMSASFGDMADDSAAIFPRINVKDPYKRLGISRMASEDEIQGARNFLIQQYAGHKPSVDAIESAHDKIIMQKFHERKNPKIDISKKVRQVRQSKVVNFVFERFQTPPNAVLVKTAVTFAVLGVLTVLFPTEEGPTLQVLLSLIATFYFIHQRLQKKLWTFLYGAGAFIFSWLVGTFLMVSVIPPFIKGPRGFEVMSSLLSYVLLWVASSYLR

SEQ ID NO: 2200 - protein, 216 aa, Arabidopsis thaliana
  peptide (1)..(216): Ceres Seq. ID no. 12336421
  misc_feature (1)..(216): NCBI GI NO: 18409276 NR Description: putative protein; protein id: At3g51140
  misc_feature (1)..(216): NCBI GI NO: 11357625 NR Description: hypothetical protein F24M12
  misc_feature (1)..(216): NCBI GI NO: 15237199 NR Description: putative protein; protein id: At5g23040.1
  misc_feature (27)..(216): NCBI GI NO: 17230751 NR Description: hypothetical protein [Nostoc sp. PCC 7120]
  misc_feature (27)..(216): NCBI GI NO: 23129945 NR Description: hypothetical protein [Nostoc punctiforme]
  misc_feature (21)..(216): NCBI GI NO: 16329734 NR Description: unknown protein [Synechocystis sp. PCC 6803]
  misc_feature (107)..(216): NCBI GI NO: 37573058 NR Description: unknown protein
  misc_feature (30)..(216): NCBI GI NO: 23039527 NR Description: hypothetical protein
MITRAMSASFGDMADDSAAIFPRINVKDPYKRLGISRMASEDEIQGARNFLIQQYAGHKPSVDAIESAHDKIIMQKFHERKNPKIDISKKVRQVRQSKVVNFVFERFQTPPNAVLVKTAVTFAVLGVLTVLFPTEEGPTLQVLLSLIATFYFIHQRLQKKLWTFLYGAGAFIFSWLVGTFLMVSVIPPFIKGPRGFEVMSSLLSYVLLWVASSYLR

SEQ ID NO: 2201 - protein, 211 aa, Arabidopsis thaliana
  peptide (1)..(211): Ceres Seq. ID no. 12336422
  misc_feature (1)..(211): NCBI GI NO: 18409276 NR Description: putative protein; protein id: At3g51140
  misc_feature (1)..(211): NCBI GI NO: 11357625 NR Description: hypothetical protein F24M12
  misc_feature (1)..(211): NCBI GI NO: 15237199 NR Description: putative protein; protein id: At5g23040.1
  misc_feature (22)..(211): NCBI GI NO: 17230751 NR Description: hypothetical protein [Nostoc sp. PCC 7120]
  misc_feature (22)..(211): NCBI GI NO: 23129945 NR Description: hypothetical protein [Nostoc punctiforme]
  misc_feature (16)..(211): NCBI GI NO: 16329734 NR Description: unknown protein [Synechocystis sp. PCC 6803]
  misc_feature (102)..(211): NCBI GI NO: 37573058 NR Description: unknown protein
  misc_feature (25)..(211): NCBI GI NO: 23039527 NR Description: hypothetical protein
MSASFGDMADDSAAIFPRINVKDPYKRLGISRMASEDEIQGARNFLIQQYAGHKPSVDAIESAHDKIIMQKFHERKNPKIDISKKVRQVRQSKVVNFVFERFQTPPNAVLVKTAVTFAVLGVLTVLFPTEEGPTLQVLLSLIATFYFIHQRLQKKLWTFLYGAGAFIFSWLVGTFLMVSVIPPFIKGPRGFEVMSSLLSYVLLWVASSYLR

SEQ ID NO: 2202 - DNA, 1429 bp, Arabidopsis thaliana
  misc_feature (1)..(1429): Ceres Seq. ID no. 13491563
atggcttccatttccagaatcttaccaacagatggcagattaagtcaatgcagaatcaacacctcgtgggttccttctacaaccagaactcaaactcacttagattttcccaagttagtttctgttagtaactctgggataagtttgaggattcagaatagtaaacctattagccctgtctttgctcttgaagcaacttcctccaggagggttgtttgcaaagctgctgctggtgtgtcaggtgacttacctgagagtactcctaaggaacttagtcagtatgagaagattattgagcttttgacaaccctttttccactttgggttattttgggaacacttgttggcatcttcaagccatccttggttacatggttggaaacagatctctttactctaggtcttggatttcttatgctttccatgggtttgactcttacgtttgaagatttcagaagatgtttacgtaatccatggacggtgggtgttggttttcttgctcaatatatgatcaagccaattctaggttttctcattgcaatgactcttaagctttcggcacctcttgcgactggccttatcctagtctcatgctgccctggaggacaggcgtcaaacgttgctacttacatttccaaggggaatgtagcgctctctgtactcatgacaacgtgttcaaccattggggctattataatgactcctcttcttactaagcttcttgctggtcagcttgttcccgttgacgctgctggacttgctcttagtacgttccaagtagtgttggttcctaccataattggagttctggcaaatgagttctttcctaaatttacgtctaagatcataacagtgacgcctctaatcggagtcattctgactactctgctctgtgccagccctattggacaagttgcagatgttttgaaaacccaaggagctcaacttatactcccggtggcactccttcatgctgcagcctttgctattggctattggatttcaaagttttctttcggcgagtccacttcgcgtaccatttctatagaatgtggaatgcaaagttcagcgctcgggttcttgcttgcacaaaagcatttcacaaaccctctagttgctgttccttctgcagtcagtgttgtctgtatggcgcttggcgggagcggcctggccgtgttctggagaaacctaccgattccggcagatgacaaggatgacttcaaagagtaaatgaagtaggaaaggctgtttgcatcttctccaaacgatgtgattgttttgttgtaatgttagtaaacattacaaaatttgtgttgaaaaacatgaaacaaaatgtgtttaagagacatagaaacaagggcgtgcatgatgacaactttgtggtcaaccttttttttatttctcaattaatggacaaatcttttttggc

SEQ ID NO: 2203 - protein, 409 aa, Arabidopsis thaliana
  peptide (1)..(409): Ceres Seq. ID no. 13491564
  misc_feature (132)..(309): Pfam Name: Pfam Description:  Sodium Bile acid symporter family
  misc_feature (1)..(409): NCBI GI NO: 30683305 NR Description: bile acid:sodium symporter family
  misc_feature (1)..(409): NCBI GI NO: 20269901 NR Description: putative sodium-dependent bile acid symporter
  misc_feature (67)..(385): NCBI GI NO: 7485401 NR Description: hypothetical protein At2g26900
  misc_feature (1)..(38): NCBI GI NO: 7485401 NR Description: hypothetical protein At2g26900
  misc_feature (62)..(409): NCBI GI NO: 34911708 NR Description: P0707D10.18
  misc_feature (139)..(409): NCBI GI NO: 28393076 NR Description: putative Na+ dependent ileal bile acid transporter
  misc_feature (41)..(403): NCBI GI NO: 18412023 NR Description: bile acid:sodium symporter family
  misc_feature (92)..(397): NCBI GI NO: 24217327 NR Description: conserved hypothetical protein
  misc_feature (47)..(402): NCBI GI NO: 38346633 NR Description: OSJNBa0072D21.3
  misc_feature (98)..(395): NCBI GI NO: 33865169 NR Description: Sodium/bile acid cotransporter family
MASISRILPTDGRLSQCRINTSWVPSTTRTQTHLDFPKLVSVSNSGISLRIQNSKPISPVFALEATSSRRVVCKAAAGVSGDLPESTPKELSQYEKIIELLTTLFPLWVILGTLVGIFKPSLVTWLETDLFTLGLGFLMLSMGLTLTFEDFRRCLRNPWTVGVGFLAQYMIKPILGFLIAMTLKLSAPLATGLILVSCCPGGQASNVATYISKGNVALSVLMTTCSTIGAIIMTPLLTKLLAGQLVPVDAAGLALSTFQVVLVPTIIGVLANEFFPKFTSKIITVTPLIGVILTTLLCASPIGQVADVLKTQGAQLILPVALLHAAAFAIGYWISKFSFGESTSRTISIECGMQSSALGFLLAQKHFTNPLVAVPSAVSVVCMALGGSGLAVFWRNLPIPADDKDDFKE

SEQ ID NO: 2204 - protein, 271 aa, Arabidopsis thaliana
  peptide (1)..(271): Ceres Seq. ID no. 13491565
  misc_feature (1)..(171): Pfam Name: Pfam Description:  Sodium Bile acid symporter family
  misc_feature (1)..(271): NCBI GI NO: 30683305 NR Description: bile acid:sodium symporter family
  misc_feature (1)..(271): NCBI GI NO: 20269901 NR Description: putative sodium-dependent bile acid symporter
  misc_feature (1)..(247): NCBI GI NO: 7485401 NR Description: hypothetical protein At2g26900
  misc_feature (1)..(271): NCBI GI NO: 34911708 NR Description: P0707D10.18
  misc_feature (1)..(271): NCBI GI NO: 28393076 NR Description: putative Na+ dependent ileal bile acid transporter
  misc_feature (1)..(265): NCBI GI NO: 18412023 NR Description: bile acid:sodium symporter family
  misc_feature (1)..(259): NCBI GI NO: 24217327 NR Description: conserved hypothetical protein
  misc_feature (1)..(264): NCBI GI NO: 38346633 NR Description: OSJNBa0072D21.3
  misc_feature (1)..(257): NCBI GI NO: 33865169 NR Description: Sodium/bile acid cotransporter family
  misc_feature (1)..(257): NCBI GI NO: 22298669 NR Description: ORF_ID:tll1126~probable sodium-dependent transporter
MLSMGLTLTFEDFRRCLRNPWTVGVGFLAQYMIKPILGFLIAMTLKLSAPLATGLILVSCCPGGQASNVATYISKGNVALSVLMTTCSTIGAIIMTPLLTKLLAGQLVPVDAAGLALSTFQVVLVPTIIGVLANEFFPKFTSKIITVTPLIGVILTTLLCASPIGQVADVLKTQGAQLILPVALLHAAAFAIGYWISKFSFGESTSRTISIECGMQSSALGFLLAQKHFTNPLVAVPSAVSVVCMALGGSGLAVFWRNLPIPADDKDDFKE

SEQ ID NO: 2205 - protein, 268 aa, Arabidopsis thaliana
  peptide (1)..(268): Ceres Seq. ID no. 13491566
  misc_feature (1)..(168): Pfam Name: Pfam Description:  Sodium Bile acid symporter family
  misc_feature (1)..(268): NCBI GI NO: 30683305 NR Description: bile acid:sodium symporter family
  misc_feature (1)..(268): NCBI GI NO: 20269901 NR Description: putative sodium-dependent bile acid symporter
  misc_feature (1)..(244): NCBI GI NO: 7485401 NR Description: hypothetical protein At2g26900
  misc_feature (1)..(268): NCBI GI NO: 34911708 NR Description: P0707D10.18
  misc_feature (1)..(268): NCBI GI NO: 28393076 NR Description: putative Na+ dependent ileal bile acid transporter
  misc_feature (1)..(262): NCBI GI NO: 18412023 NR Description: bile acid:sodium symporter family
  misc_feature (1)..(256): NCBI GI NO: 24217327 NR Description: conserved hypothetical protein
  misc_feature (1)..(261): NCBI GI NO: 38346633 NR Description: OSJNBa0072D21.3
  misc_feature (1)..(254): NCBI GI NO: 33865169 NR Description: Sodium/bile acid cotransporter family
  misc_feature (1)..(254): NCBI GI NO: 22298669 NR Description: ORF_ID:tll1126~probable sodium-dependent transporter
MGLTLTFEDFRRCLRNPWTVGVGFLAQYMIKPILGFLIAMTLKLSAPLATGLILVSCCPGGQASNVATYISKGNVALSVLMTTCSTIGAIIMTPLLTKLLAGQLVPVDAAGLALSTFQVVLVPTIIGVLANEFFPKFTSKIITVTPLIGVILTTLLCASPIGQVADVLKTQGAQLILPVALLHAAAFAIGYWISKFSFGESTSRTISIECGMQSSALGFLLAQKHFTNPLVAVPSAVSVVCMALGGSGLAVFWRNLPIPADDKDDFKE

SEQ ID NO: 2206 - DNA, 1325 bp, Arabidopsis thaliana
  misc_feature (1)..(1325): Ceres Seq. ID no. 12395299
aaaaaccctagaaaacctctggagctatggagatgatgcaggattcgttccaagtccataggattccacaatcgaagtatgtcgatggagttagatggcttccacaagcttctgctttgaatcgtttcttcgcaacagcgtcctatgacgcggattgtgattcttcatcaatcgagatccaatcgctcgacccaaaccctagagggaatcacaacacgaacccgttaatcgagtcgttatcttcatggacttcaccttctcgcgtttcgtctctagaagtcgcgggaaacggcggtggtggcggttcattcaaaccaatggtttcagcagctacgtcttctggttctcttcacgttctgatgattgatttggtggaaggagctgcgattgaagaggtttacgcggcggaaggggagaggtttcatgtgggacgcgtggaaggtgtggattggagagagggaggagaatgtgttactgttggtgaagatgggagagtgaatgtagtgaagattgtgaatggtgaaggtttaaggtatagaaaggtctttgatgggaatggattggtggcttatagagctgtgaaatgggcttctccgactgagtttgttactggaggatatggttttggtttgcaattgtgggatcagaggaagtctggtgaagctgtttcacaactcaaagggaactggtttcaaggcaaaacttctgcaattgtccactccattgacattcatccatctcggaagcacacttgcattgcgggaggttcttcaggtactgtatttgcttgggatcttcggtggccacagcaacccattgttctttctggggttggagcaagtgagaatataaacaatcctctgtctgaaagtgaggtatgggaagttcagtatgactcatacacaaaatccaacgtctcatcctcaaggattctccctgttatgacctgctctgaagatggaatccttggtatcatagaacaaggggaaagaaccaatcgagcttctggctgaaccttgtgccattaacagttttgacatcgacaggcaaaatccacaggatgtgatatgtagcttggagtgggaatcaatagcagttttctcaaggccttagtataatatggaactgtgcacggtatgctatgttttcttctgcgagctacaacgaagaaattgaggaaggtagtgatagatgatgagagacaagtttaaggaagagggtgtggaatgtgtttataagtttcattataacaagatcttaaaatacattctgcacaaacagagttttgtattcatcttaaagttagtgtgatcttgaagatttgc

SEQ ID NO: 2207 - protein, 328 aa, Arabidopsis thaliana
  peptide (1)..(328): Ceres Seq. ID no. 12395300
  misc_feature (1)..(321): NCBI GI NO: 18417678 NR Description: expressed protein; protein id: At4g30840
  misc_feature (4)..(321): NCBI GI NO: 21554881 NR Description: unknown [Arabidopsis thaliana]
  misc_feature (1)..(244): NCBI GI NO: 25372649 NR Description: hypothetical protein AT4g30840
  misc_feature (246)..(321): NCBI GI NO: 25372649 NR Description: hypothetical protein AT4g30840
  misc_feature (147)..(289): NCBI GI NO: 30851621 NR Description: 2610529I12Rik protein [Mus musculus]
  misc_feature (147)..(289): NCBI GI NO: 27923818 NR Description: Nucleoporin Nup43
MEMMQDSFQVHRIPQSKYVDGVRWLPQASALNRFFATASYDADCDSSSIEIQSLDPNPRGNHNTNPLIESLSSWTSPSRVSSLEVAGNGGGGGSFKPMVSAATSSGSLHVLMIDLVEGAAIEEVYAAEGERFHVGRVEGVDWREGGECVTVGEDGRVNVVKIVNGEGLRYRKVFDGNGLVAYRAVKWASPTEFVTGGYGFGLQLWDQRKSGEAVSQLKGNWFQGKTSAIVHSIDIHPSRKHTCIAGGSSGTVFAWDLRWPQQPIVLSGVGASENINNPLSESEVWEVQYDSYTKSNVSSSRILPVMTCSEDGILGIIEQGERTNRASG

SEQ ID NO: 2208 - protein, 326 aa, Arabidopsis thaliana
  peptide (1)..(326): Ceres Seq. ID no. 12395301
  misc_feature (1)..(319): NCBI GI NO: 18417678 NR Description: expressed protein; protein id: At4g30840
  misc_feature (2)..(319): NCBI GI NO: 21554881 NR Description: unknown [Arabidopsis thaliana]
  misc_feature (1)..(242): NCBI GI NO: 25372649 NR Description: hypothetical protein AT4g30840
  misc_feature (244)..(319): NCBI GI NO: 25372649 NR Description: hypothetical protein AT4g30840
  misc_feature (145)..(287): NCBI GI NO: 30851621 NR Description: 2610529I12Rik protein [Mus musculus]
  misc_feature (145)..(287): NCBI GI NO: 27923818 NR Description: Nucleoporin Nup43
MMQDSFQVHRIPQSKYVDGVRWLPQASALNRFFATASYDADCDSSSIEIQSLDPNPRGNHNTNPLIESLSSWTSPSRVSSLEVAGNGGGGGSFKPMVSAATSSGSLHVLMIDLVEGAAIEEVYAAEGERFHVGRVEGVDWREGGECVTVGEDGRVNVVKIVNGEGLRYRKVFDGNGLVAYRAVKWASPTEFVTGGYGFGLQLWDQRKSGEAVSQLKGNWFQGKTSAIVHSIDIHPSRKHTCIAGGSSGTVFAWDLRWPQQPIVLSGVGASENINNPLSESEVWEVQYDSYTKSNVSSSRILPVMTCSEDGILGIIEQGERTNRASG

SEQ ID NO: 2209 - protein, 325 aa, Arabidopsis thaliana
  peptide (1)..(325): Ceres Seq. ID no. 12395302
  misc_feature (1)..(318): NCBI GI NO: 18417678 NR Description: expressed protein; protein id: At4g30840
  misc_feature (1)..(318): NCBI GI NO: 21554881 NR Description: unknown [Arabidopsis thaliana]
  misc_feature (1)..(241): NCBI GI NO: 25372649 NR Description: hypothetical protein AT4g30840
  misc_feature (243)..(318): NCBI GI NO: 25372649 NR Description: hypothetical protein AT4g30840
  misc_feature (144)..(286): NCBI GI NO: 30851621 NR Description: 2610529I12Rik protein [Mus musculus]
  misc_feature (144)..(286): NCBI GI NO: 27923818 NR Description: Nucleoporin Nup43
MQDSFQVHRIPQSKYVDGVRWLPQASALNRFFATASYDADCDSSSIEIQSLDPNPRGNHNTNPLIESLSSWTSPSRVSSLEVAGNGGGGGSFKPMVSAATSSGSLHVLMIDLVEGAAIEEVYAAEGERFHVGRVEGVDWREGGECVTVGEDGRVNVVKIVNGEGLRYRKVFDGNGLVAYRAVKWASPTEFVTGGYGFGLQLWDQRKSGEAVSQLKGNWFQGKTSAIVHSIDIHPSRKHTCIAGGSSGTVFAWDLRWPQQPIVLSGVGASENINNPLSESEVWEVQYDSYTKSNVSSSRILPVMTCSEDGILGIIEQGERTNRASG

SEQ ID NO: 2210 - DNA, 542 bp, Arabidopsis thaliana
  misc_feature (1)..(542): Ceres Seq. ID no. 12395297
acataagtctctctcttacattttgaaaccctaatttctcaaaataaatgtctgaagttgagtaccggtgctttgtcggcggccttgcctgggccaccaatgatgaagatcttcaaaggacgttctcacagttcggcgacgttatcgattctaagatcattaacgaccgcgagagtggaagatcaaggggattcggattcgtcaccttcaaggacgagaaagccatgagggatgcgattgaagagatgaacggtaaagagctcgatggacgtgtcatcaccgtgaacgaggctcagtcgagaggtagcggcggtgatggtgaaagttacggaggcggtggtggcggctggtaatcaaagatagagttgtttgcgtgctgctgctctgtttttggtttagatttggatttgtgtcaccacttctggtttggttatcgttcgtttggtttacttttttgatgaaacagtttcgtttaagtcttctttgtctggatcgaaatgttaattcgcgtgttgtttactaaatttataacgtttcctttt

SEQ ID NO: 2211 - protein, 101 aa, Arabidopsis thaliana
  peptide (1)..(101): Ceres Seq. ID no. 12395298
  misc_feature (8)..(79): Pfam Name: a.k.a. RRM, RBD, or RNP domain Pfam Description: RNA recognition motif.
  misc_feature (1)..(101): NCBI GI NO: 15235002 NR Description: glycine-rich RNA-binding protein 8
  misc_feature (1)..(101): NCBI GI NO: 30692254 NR Description: glycine-rich RNA-binding protein 8 (GRP8) (CCR1)
  misc_feature (1)..(91): NCBI GI NO: 30692256 NR Description: glycine-rich RNA-binding protein 8 (GRP8) (CCR1)
  misc_feature (1)..(100): NCBI GI NO: 544416 NR Description: Glycine-rich RNA-binding protein 10
  misc_feature (1)..(101): NCBI GI NO: 544426 NR Description: Glycine-rich RNA-binding protein
  misc_feature (3)..(101): NCBI GI NO: 15226605 NR Description: glycine-rich RNA binding protein AtGRP7
  misc_feature (3)..(101): NCBI GI NO: 21553354 NR Description: glycine-rich RNA binding protein 7
  misc_feature (1)..(101): NCBI GI NO: 2226370 NR Description: RNA-binding protein [Nicotiana glutinosa]
  misc_feature (1)..(101): NCBI GI NO: 30692258 NR Description: glycine-rich RNA-binding protein 8 (GRP8) (CCR1)
  misc_feature (1)..(101): NCBI GI NO: 2119042 NR Description: glycine-rich RNA-binding protein RGP-1a
MSEVEYRCFVGGLAWATNDEDLQRTFSQFGDVIDSKIINDRESGRSRGFGFVTFKDEKAMRDAIEEMNGKELDGRVITVNEAQSRGSGGDGESYGGGGGGW

SEQ ID NO: 2212 - DNA, 885 bp, Arabidopsis thaliana
  misc_feature (1)..(885): Ceres Seq. ID no. 12420460
aaaacgaactagagacagtttgattcgaaaatcttgtcggaaaatggaggatatcgtcgaccaagaattaagcaattactgggaacctagctccttgctccaaaacgaatacttcgaatacgacagctggcctttggaagaagccatttctgggtcgtatgattcgagttcgccggatggagctgcttcgtcgccggcttctaagaatattgtgtcggagagaaacagaagacagaaacttaaccagagactcttcgctcttcgatcagttgttcccaatatcactaagatggataaagcctcaataatcaaagatgctattagttacatagaaggattacaatatgaagaaaagaagctcgaagctgagatcagagaacttgaatctacaccaaagagtagccttagtttcagcaaagattttgatcgtgatttacttgttcctgtcacatccaagaagatgaagcagcttgattctggttcttccacttctctcatcgaagttctcgaattgaaggtaacattcatgggagagaggacaatggtggtgagtgtaacatgtaataagaggacagatacaatggtgaaactgtgtgaagtctttgagtcattgaatctcaaaatcctcacttccaatctcacctctttctctggcatgatcttccacactgtctttattgaggcggatgaagaagaacaagaggtgttgcggttaaaaatagaaacaggaataggagcttataatgaaactcaaagccctactttgagcatcgactctctttactaataatactttttttcttccttttttggttcattttggcttctctctttacaataatgtatgtctctcttttcatttttatgatctcctacgtttgtttg

SEQ ID NO: 2213 - protein, 261 aa, Arabidopsis thaliana
  peptide (1)..(261): Ceres Seq. ID no. 12420461
  misc_feature (67)..(114): Pfam Name: Pfam Description:  Helix-loop-helix DNA-binding domain
  misc_feature (15)..(261): NCBI GI NO: 21554896 NR Description: unknown [Arabidopsis thaliana]
  misc_feature (15)..(261): NCBI GI NO: 18423944 NR Description: bHLH protein; protein id: At5g57150
  misc_feature (15)..(227): NCBI GI NO: 8843817 NR Description: contains similarity to unknownprotein~gene_id:MUL3
  misc_feature (15)..(227): NCBI GI NO: 16604348 NR Description: AT5g57150/MUL3_10 [Arabidopsis thaliana]
  misc_feature (15)..(249): NCBI GI NO: 30688496 NR Description: bHLH protein family [Arabidopsis thaliana]
  misc_feature (15)..(171): NCBI GI NO: 7486225 NR Description: hypothetical protein F27B13
  misc_feature (151)..(227): NCBI GI NO: 7486225 NR Description: hypothetical protein F27B13
  misc_feature (131)..(257): NCBI GI NO: 29466635 NR Description: Transcription Factor [Oryza sativa]
  misc_feature (60)..(134): NCBI GI NO: 29466635 NR Description: Transcription Factor [Oryza sativa]
  misc_feature (67)..(240): NCBI GI NO: 23600383 NR Description: bHLH transcriptional regulator
KRTRDSLIRKSCRKMEDIVDQELSNYWEPSSLLQNEYFEYDSWPLEEAISGSYDSSSPDGAASSPASKNIVSERNRRQKLNQRLFALRSVVPNITKMDKASIIKDAISYIEGLQYEEKKLEAEIRELESTPKSSLSFSKDFDRDLLVPVTSKKMKQLDSGSSTSLIEVLELKVTFMGERTMVVSVTCNKRTDTMVKLCEVFESLNLKILTSNLTSFSGMIFHTVFIEADEEEQEVLRLKIETGIGAYNETQSPTLSIDSLY

SEQ ID NO: 2214 - protein, 247 aa, Arabidopsis thaliana
  peptide (1)..(247): Ceres Seq. ID no. 12420462
  misc_feature (53)..(100): Pfam Name: Pfam Description:  Helix-loop-helix DNA-binding domain
  misc_feature (1)..(247): NCBI GI NO: 21554896 NR Description: unknown [Arabidopsis thaliana]
  misc_feature (1)..(247): NCBI GI NO: 18423944 NR Description: bHLH protein; protein id: At5g57150
  misc_feature (1)..(213): NCBI GI NO: 8843817 NR Description: contains similarity to unknownprotein~gene_id:MUL3
  misc_feature (1)..(213): NCBI GI NO: 16604348 NR Description: AT5g57150/MUL3_10 [Arabidopsis thaliana]
  misc_feature (1)..(235): NCBI GI NO: 30688496 NR Description: bHLH protein family [Arabidopsis thaliana]
  misc_feature (1)..(157): NCBI GI NO: 7486225 NR Description: hypothetical protein F27B13
  misc_feature (137)..(213): NCBI GI NO: 7486225 NR Description: hypothetical protein F27B13
  misc_feature (117)..(243): NCBI GI NO: 29466635 NR Description: Transcription Factor [Oryza sativa]
  misc_feature (46)..(120): NCBI GI NO: 29466635 NR Description: Transcription Factor [Oryza sativa]
  misc_feature (53)..(226): NCBI GI NO: 23600383 NR Description: bHLH transcriptional regulator
MEDIVDQELSNYWEPSSLLQNEYFEYDSWPLEEAISGSYDSSSPDGAASSPASKNIVSERNRRQKLNQRLFALRSVVPNITKMDKASIIKDAISYIEGLQYEEKKLEAEIRELESTPKSSLSFSKDFDRDLLVPVTSKKMKQLDSGSSTSLIEVLELKVTFMGERTMVVSVTCNKRTDTMVKLCEVFESLNLKILTSNLTSFSGMIFHTVFIEADEEEQEVLRLKIETGIGAYNETQSPTLSIDSLY

SEQ ID NO: 2215 - protein, 165 aa, Arabidopsis thaliana
  peptide (1)..(165): Ceres Seq. ID no. 12420463
  misc_feature (1)..(165): NCBI GI NO: 21554896 NR Description: unknown [Arabidopsis thaliana]
  misc_feature (1)..(165): NCBI GI NO: 18423944 NR Description: bHLH protein; protein id: At5g57150
  misc_feature (1)..(131): NCBI GI NO: 8843817 NR Description: contains similarity to unknownprotein~gene_id:MUL3
  misc_feature (1)..(131): NCBI GI NO: 16604348 NR Description: AT5g57150/MUL3_10 [Arabidopsis thaliana]
  misc_feature (1)..(153): NCBI GI NO: 30688496 NR Description: bHLH protein family [Arabidopsis thaliana]
  misc_feature (1)..(75): NCBI GI NO: 7486225 NR Description: hypothetical protein F27B13
  misc_feature (55)..(131): NCBI GI NO: 7486225 NR Description: hypothetical protein F27B13
  misc_feature (35)..(161): NCBI GI NO: 29466635 NR Description: Transcription Factor [Oryza sativa]
  misc_feature (1)..(38): NCBI GI NO: 29466635 NR Description: Transcription Factor [Oryza sativa]
  misc_feature (1)..(144): NCBI GI NO: 23600383 NR Description: bHLH transcriptional regulator
MDKASIIKDAISYIEGLQYEEKKLEAEIRELESTPKSSLSFSKDFDRDLLVPVTSKKMKQLDSGSSTSLIEVLELKVTFMGERTMVVSVTCNKRTDTMVKLCEVFESLNLKILTSNLTSFSGMIFHTVFIEADEEEQEVLRLKIETGIGAYNETQSPTLSIDSLY

SEQ ID NO: 2216 - DNA, 2709 bp, Arabidopsis thaliana
  misc_feature (1)..(2709): Ceres Seq. ID no. 13591434
atggcttatgctcatgttttcgcttcgttgactatctcgacgatttctctccgacgattcctcccccgacttcatcgaaaccacagcgtaaaacccaattcccgaatcatatgcaatctgaaactaaactactctgctggaaaatttcgcgagatgggactatcacgttccgtggagctagaccaattcatcacaagcgaggaggaagaaggagaagcagaggagataggagaaggatttttcgaagcgattgaggaactagagaggatgactagagaaccatcagatatactcgaagagatgaatcatcgattatcttctagagaattgcaattgatgcttgtttacttcgcacaagaaggtagagattcatggtgtactttagaagtgtttgaatggttgaaaaaggagaatagagttgatgaagagataatggagttaatggtttcgattatgtgtggttgggttaagaaattgattgaagatgaatgtaatgcacaccaagtgttcgacttattgattgagatggattgtgttggtttaaaacctggttttagtatgatggacaaagttattgctttgtattgtgagatggggaagaaagaaagtgcggttttgtttgtcaaggaggttttaagaaggagagatggttttggttatagtgttgttggtggtggtggttctgaaggtagaaaaggtggacctgttgggtatcttgcttggaaatttatggttgatggagattataggaaggcagttgatatggttatggagttaagactttcagggctgaaaccagaagcgtacagctatcttattgcgatgacagctatagtgaaagagctgaatagtcttggaaagacattacgcgagttgaaacgctttgcacgggctggttttgttgctgagattgatgatcacgatagggtactcattgagaagtatcaatcagaaacattatctcgtggactgcagttagcaacttgggcggttgaggaaggccaagaaaatgattccattattggggtggtccatgagaggctactcgctatgtatatatgtgcgggacgtggaccagaagcagagaaacagctctggaagatgaaacttgcagggagagaacctgaagctgacctccacgacattgttatggcgatctgcgcttcacagaaagaggttaatgcagtttctcggctactgacacgagttgagttcatgggatctcagagaaagaagaagactctgtcatggttgctcagagggtatgtgaaaggagggcacttcgaagaggctgcagagacattggtatcgatgatcgactctgggttgcatccggagtatattgatcgagtggctgtgatgcaaggaatgacaaggaagatccaacggccgagagatgttgaagcatatatgagtctgtgcaagaggctctttgacgctggtttgcccaaaacaaaccttaatgacttgaggacatctgtttcctcgtacgtatttctgaaattaagtgaatctgaaggtgaaagcaaagccggaggaagaaataagaatcacagaggtaaaattgtgatggagctcgaagatccaacaatggcagattccacgattaagctaacagtcaaattcggaggcaaatcaataccactttcggtatcaccagattgtacagtcaaagatcttaagtctcagttacaaccaatcaccaacgttcttcctcgtggccagaagctcatcttcaaaggtaaggttttggttgaaacgtcgactttgaaacaatctgatgtgggaagtggagctaaactcatgttaatggcttctcaaggtctgcatcaaggggaaggtccaatacttaaggaagctagtataaggccaatctctagaactgttgtatctgataaagtagatcagagaaagcctagtgtacttgtagacaagaaccgcactgatcgatggaaagccacaggagttattgctttagctcaagccaatttgaaggaaatacctgaagaagtgtgggactgtggatctggagtcagagtacttgacattagtgaaaacttcattaaagaagtacctgccaaaatcagctcctttggttctatgcagaaattgttccttcaaggaaatggtctgtccgatgaatccattcaatgggaagggatagcatctctgaagcgcctgatgcttctgtccattagccataacaatctaactgttctgccatcagcaatgggttcactgacgtctcttagacagcttgatgtcaccaacaacaagttgacaagtctaccgaatgagttaggacttctgacgcagcttgagattttgaaagccaacaacaacagaataactagtcttcctgagagtatcggaaactgttcattcctcatggaggttgatctttcagctaatattatatcagaacttcccgagacattcaccaaactgcgtaatctaaagtgtttcggtattcagacgctggagctgaataacacgggattgaagacgctgccatcggctttatttaagatgtgtttgcagctctcaactttaggtctccacaacacagagataaccgttgaatttctccgccagttcgagggatatgatgattttgatgaaagaagacgtaccaagcatcaaaagcagcttgattttcgtgttgtgggatctggccaattcgacgaaggcgctgataaatcttggtga

SEQ ID NO: 2217 - protein, 902 aa, Arabidopsis thaliana
  peptide (1)..(902): Ceres Seq. ID no. 13591435
  misc_feature (536)..(608): Pfam Name: Pfam Description:  Ubiquitin family
  misc_feature (524)..(902): NCBI GI NO: 37534990 NR Description: putative leucine-rich repeat protein
  misc_feature (646)..(900): NCBI GI NO: 22326653 NR Description: leucine rich repeat protein family
  misc_feature (646)..(898): NCBI GI NO: 11357392 NR Description: hypothetical protein F13G24
  misc_feature (663)..(874): NCBI GI NO: 19074817 NR Description: LEUCINE-RICH RAS SUPPRESSOR PROTEIN
  misc_feature (657)..(853): NCBI GI NO: 6677945 NR Description: soc-2 suppressor of clear homolog
  misc_feature (657)..(853): NCBI GI NO: 14423936 NR Description: Leucine-rich repeat protein SHOC-2
  misc_feature (657)..(853): NCBI GI NO: 40788390 NR Description: KIAA0862 protein [Homo sapiens]
  misc_feature (678)..(859): NCBI GI NO: 24215148 NR Description: putative outermembrane protein
  misc_feature (677)..(868): NCBI GI NO: 23124578 NR Description: hypothetical protein [Nostoc punctiforme]
  misc_feature (657)..(853): NCBI GI NO: 20071327 NR Description: Shoc2 protein [Mus musculus]
MAYAHVFASLTISTISLRRFLPRLHRNHSVKPNSRIICNLKLNYSAGKFREMGLSRSVELDQFITSEEEEGEAEEIGEGFFEAIEELERMTREPSDILEEMNHRLSSRELQLMLVYFAQEGRDSWCTLEVFEWLKKENRVDEEIMELMVSIMCGWVKKLIEDECNAHQVFDLLIEMDCVGLKPGFSMMDKVIALYCEMGKKESAVLFVKEVLRRRDGFGYSVVGGGGSEGRKGGPVGYLAWKFMVDGDYRKAVDMVMELRLSGLKPEAYSYLIAMTAIVKELNSLGKTLRELKRFARAGFVAEIDDHDRVLIEKYQSETLSRGLQLATWAVEEGQENDSIIGVVHERLLAMYICAGRGPEAEKQLWKMKLAGREPEADLHDIVMAICASQKEVNAVSRLLTRVEFMGSQRKKKTLSWLLRGYVKGGHFEEAAETLVSMIDSGLHPEYIDRVAVMQGMTRKIQRPRDVEAYMSLCKRLFDAGLPKTNLNDLRTSVSSYVFLKLSESEGESKAGGRNKNHRGKIVMELEDPTMADSTIKLTVKFGGKSIPLSVSPDCTVKDLKSQLQPITNVLPRGQKLIFKGKVLVETSTLKQSDVGSGAKLMLMASQGLHQGEGPILKEASIRPISRTVVSDKVDQRKPSVLVDKNRTDRWKATGVIALAQANLKEIPEEVWDCGSGVRVLDISENFIKEVPAKISSFGSMQKLFLQGNGLSDESIQWEGIASLKRLMLLSISHNNLTVLPSAMGSLTSLRQLDVTNNKLTSLPNELGLLTQLEILKANNNRITSLPESIGNCSFLMEVDLSANIISELPETFTKLRNLKCFGIQTLELNNTGLKTLPSALFKMCLQLSTLGLHNTEITVEFLRQFEGYDDFDERRRTKHQKQLDFRVVGSGQFDEGADKSW

SEQ ID NO: 2218 - protein, 851 aa, Arabidopsis thaliana
  peptide (1)..(851): Ceres Seq. ID no. 13591436
  misc_feature (485)..(557): Pfam Name: Pfam Description:  Ubiquitin family
  misc_feature (473)..(851): NCBI GI NO: 37534990 NR Description: putative leucine-rich repeat protein
  misc_feature (595)..(849): NCBI GI NO: 22326653 NR Description: leucine rich repeat protein family
  misc_feature (595)..(847): NCBI GI NO: 11357392 NR Description: hypothetical protein F13G24
  misc_feature (612)..(823): NCBI GI NO: 19074817 NR Description: LEUCINE-RICH RAS SUPPRESSOR PROTEIN
  misc_feature (606)..(802): NCBI GI NO: 6677945 NR Description: soc-2 suppressor of clear homolog
  misc_feature (606)..(802): NCBI GI NO: 14423936 NR Description: Leucine-rich repeat protein SHOC-2
  misc_feature (606)..(802): NCBI GI NO: 40788390 NR Description: KIAA0862 protein [Homo sapiens]
  misc_feature (627)..(808): NCBI GI NO: 24215148 NR Description: putative outermembrane protein
  misc_feature (626)..(817): NCBI GI NO: 23124578 NR Description: hypothetical protein [Nostoc punctiforme]
  misc_feature (606)..(802): NCBI GI NO: 20071327 NR Description: Shoc2 protein [Mus musculus]
MGLSRSVELDQFITSEEEEGEAEEIGEGFFEAIEELERMTREPSDILEEMNHRLSSRELQLMLVYFAQEGRDSWCTLEVFEWLKKENRVDEEIMELMVSIMCGWVKKLIEDECNAHQVFDLLIEMDCVGLKPGFSMMDKVIALYCEMGKKESAVLFVKEVLRRRDGFGYSVVGGGGSEGRKGGPVGYLAWKFMVDGDYRKAVDMVMELRLSGLKPEAYSYLIAMTAIVKELNSLGKTLRELKRFARAGFVAEIDDHDRVLIEKYQSETLSRGLQLATWAVEEGQENDSIIGVVHERLLAMYICAGRGPEAEKQLWKMKLAGREPEADLHDIVMAICASQKEVNAVSRLLTRVEFMGSQRKKKTLSWLLRGYVKGGHFEEAAETLVSMIDSGLHPEYIDRVAVMQGMTRKIQRPRDVEAYMSLCKRLFDAGLPKTNLNDLRTSVSSYVFLKLSESEGESKAGGRNKNHRGKIVMELEDPTMADSTIKLTVKFGGKSIPLSVSPDCTVKDLKSQLQPITNVLPRGQKLIFKGKVLVETSTLKQSDVGSGAKLMLMASQGLHQGEGPILKEASIRPISRTVVSDKVDQRKPSVLVDKNRTDRWKATGVIALAQANLKEIPEEVWDCGSGVRVLDISENFIKEVPAKISSFGSMQKLFLQGNGLSDESIQWEGIASLKRLMLLSISHNNLTVLPSAMGSLTSLRQLDVTNNKLTSLPNELGLLTQLEILKANNNRITSLPESIGNCSFLMEVDLSANIISELPETFTKLRNLKCFGIQTLELNNTGLKTLPSALFKMCLQLSTLGLHNTEITVEFLRQFEGYDDFDERRRTKHQKQLDFRVVGSGQFDEGADKSW

SEQ ID NO: 2219 - protein, 813 aa, Arabidopsis thaliana
  peptide (1)..(813): Ceres Seq. ID no. 13591437
  misc_feature (447)..(519): Pfam Name: Pfam Description:  Ubiquitin family
  misc_feature (435)..(813): NCBI GI NO: 37534990 NR Description: putative leucine-rich repeat protein
  misc_feature (557)..(811): NCBI GI NO: 22326653 NR Description: leucine rich repeat protein family
  misc_feature (557)..(809): NCBI GI NO: 11357392 NR Description: hypothetical protein F13G24
  misc_feature (574)..(785): NCBI GI NO: 19074817 NR Description: LEUCINE-RICH RAS SUPPRESSOR PROTEIN
  misc_feature (568)..(764): NCBI GI NO: 6677945 NR Description: soc-2 suppressor of clear homolog
  misc_feature (568)..(764): NCBI GI NO: 14423936 NR Description: Leucine-rich repeat protein SHOC-2
  misc_feature (568)..(764): NCBI GI NO: 40788390 NR Description: KIAA0862 protein [Homo sapiens]
  misc_feature (589)..(770): NCBI GI NO: 24215148 NR Description: putative outermembrane protein
  misc_feature (588)..(779): NCBI GI NO: 23124578 NR Description: hypothetical protein [Nostoc punctiforme]
  misc_feature (568)..(764): NCBI GI NO: 20071327 NR Description: Shoc2 protein [Mus musculus]
MTREPSDILEEMNHRLSSRELQLMLVYFAQEGRDSWCTLEVFEWLKKENRVDEEIMELMVSIMCGWVKKLIEDECNAHQVFDLLIEMDCVGLKPGFSMMDKVIALYCEMGKKESAVLFVKEVLRRRDGFGYSVVGGGGSEGRKGGPVGYLAWKFMVDGDYRKAVDMVMELRLSGLKPEAYSYLIAMTAIVKELNSLGKTLRELKRFARAGFVAEIDDHDRVLIEKYQSETLSRGLQLATWAVEEGQENDSIIGVVHERLLAMYICAGRGPEAEKQLWKMKLAGREPEADLHDIVMAICASQKEVNAVSRLLTRVEFMGSQRKKKTLSWLLRGYVKGGHFEEAAETLVSMIDSGLHPEYIDRVAVMQGMTRKIQRPRDVEAYMSLCKRLFDAGLPKTNLNDLRTSVSSYVFLKLSESEGESKAGGRNKNHRGKIVMELEDPTMADSTIKLTVKFGGKSIPLSVSPDCTVKDLKSQLQPITNVLPRGQKLIFKGKVLVETSTLKQSDVGSGAKLMLMASQGLHQGEGPILKEASIRPISRTVVSDKVDQRKPSVLVDKNRTDRWKATGVIALAQANLKEIPEEVWDCGSGVRVLDISENFIKEVPAKISSFGSMQKLFLQGNGLSDESIQWEGIASLKRLMLLSISHNNLTVLPSAMGSLTSLRQLDVTNNKLTSLPNELGLLTQLEILKANNNRITSLPESIGNCSFLMEVDLSANIISELPETFTKLRNLKCFGIQTLELNNTGLKTLPSALFKMCLQLSTLGLHNTEITVEFLRQFEGYDDFDERRRTKHQKQLDFRVVGSGQFDEGADKSW

SEQ ID NO: 2220 - DNA, 1057 bp, Arabidopsis thaliana
  misc_feature (1)..(1057): Ceres Seq. ID no. 12336423
aagctttcttcttgttcctacatacccatcttccctcacctacatcaaacctagggtttcttaactatatcaacaacatatataaatttatatataggttgtgatttattgaagatcataaagatcaaaaggagagaggtattaaaaaatgatgtgtagtcgaggccattggagacctgcagaagacgagaagctaagagaactcgtcgaacaatttggtcctcataattggaacgccatagctcagaagctctctggtcgatctggtaagagttgtagattgagatggtttaatcaattggatcctaggattaaccgaaaccctttcacggaggaagaagaagaaaggcttttagcgtctcatcggatccatgggaacagatggtccgtgatcgctagattttttcccggtcgaactgataacgctgttaaaaaccattggcacgtcatcatggctcgtcgtggccgagaacggtccaagctccgtccacgaggccttggccatgatggcacggtggctgcgactgggatgattggtaattataaagactgcgataaggagagaagattggcaaccacaaccgctatcaattttccttatcaattctctcatattaatcattttcaagtcctcaaagagttcttgaccgtaaagatcgggttcagaaatagtactactccaatacaagaaggagcaatagaccaaactaaacgaccgatggagttctacaattttcttcaagtaaacacggattcgaagatacacgaattgatagataattcaagaaaagacgaagaagaagatgtcgatcaaaacaaccgaattcctaacgagaattgtgttccatttttcgactttttgtctgttggaaactctgcctctcagggtttatgttaatttgtccgtaccacatgtactataaggtggaccatatgttaattaaagataatgtagaaagtactaatcaattagagctcttgtttgagccaaatgtgaaaattagttaagccatcccaaacatgttcttgtataacaaatataaggttgtacttttcc

SEQ ID NO: 2221 - protein, 249 aa, Arabidopsis thaliana
  peptide (1)..(249): Ceres Seq. ID no. 12336424
  misc_feature (5)..(51): Pfam Name: Pfam Description:  Myb-like DNA-binding domain
  misc_feature (1)..(249): NCBI GI NO: 21554916 NR Description: myb-like protein, putative [Arabidopsis thaliana]
  misc_feature (1)..(249): NCBI GI NO: 15220910 NR Description: myb family trnscription factor
  misc_feature (2)..(249): NCBI GI NO: 25513679 NR Description: F2H15.17 protein - Arabidopsis thaliana
  misc_feature (1)..(249): NCBI GI NO: 11358541 NR Description: myb-related transcription factor MYB52
  misc_feature (1)..(245): NCBI GI NO: 15219462 NR Description: myb family transcription factor
  misc_feature (1)..(245): NCBI GI NO: 11358543 NR Description: myb-related transcription factor MYB54
  misc_feature (2)..(115): NCBI GI NO: 31980093 NR Description: MYB transcription factor R2R3 type
  misc_feature (2)..(127): NCBI GI NO: 21321780 NR Description: putative Myb/Myb-related protein
  misc_feature (3)..(115): NCBI GI NO: 6979341 NR Description: myb-like protein [Oryza sativa]
  misc_feature (2)..(110): NCBI GI NO: 34903242 NR Description: unnamed protein product
MMCSRGHWRPAEDEKLRELVEQFGPHNWNAIAQKLSGRSGKSCRLRWFNQLDPRINRNPFTEEEEERLLASHRIHGNRWSVIARFFPGRTDNAVKNHWHVIMARRGRERSKLRPRGLGHDGTVAATGMIGNYKDCDKERRLATTTAINFPYQFSHINHFQVLKEFLTVKIGFRNSTTPIQEGAIDQTKRPMEFYNFLQVNTDSKIHELIDNSRKDEEEDVDQNNRIPNENCVPFFDFLSVGNSASQGLC

SEQ ID NO: 2222 - protein, 248 aa, Arabidopsis thaliana
  peptide (1)..(248): Ceres Seq. ID no. 12336425
  misc_feature (4)..(50): Pfam Name: Pfam Description:  Myb-like DNA-binding domain
  misc_feature (1)..(248): NCBI GI NO: 21554916 NR Description: myb-like protein, putative [Arabidopsis thaliana]
  misc_feature (1)..(248): NCBI GI NO: 15220910 NR Description: myb family trnscription factor
  misc_feature (1)..(248): NCBI GI NO: 25513679 NR Description: F2H15.17 protein - Arabidopsis thaliana
  misc_feature (1)..(248): NCBI GI NO: 11358541 NR Description: myb-related transcription factor MYB52
  misc_feature (1)..(244): NCBI GI NO: 15219462 NR Description: myb family transcription factor
  misc_feature (1)..(244): NCBI GI NO: 11358543 NR Description: myb-related transcription factor MYB54
  misc_feature (1)..(114): NCBI GI NO: 31980093 NR Description: MYB transcription factor R2R3 type
  misc_feature (1)..(126): NCBI GI NO: 21321780 NR Description: putative Myb/Myb-related protein
  misc_feature (2)..(114): NCBI GI NO: 6979341 NR Description: myb-like protein [Oryza sativa]
  misc_feature (1)..(109): NCBI GI NO: 34903242 NR Description: unnamed protein product
MCSRGHWRPAEDEKLRELVEQFGPHNWNAIAQKLSGRSGKSCRLRWFNQLDPRINRNPFTEEEEERLLASHRIHGNRWSVIARFFPGRTDNAVKNHWHVIMARRGRERSKLRPRGLGHDGTVAATGMIGNYKDCDKERRLATTTAINFPYQFSHINHFQVLKEFLTVKIGFRNSTTPIQEGAIDQTKRPMEFYNFLQVNTDSKIHELIDNSRKDEEEDVDQNNRIPNENCVPFFDFLSVGNSASQGLC

SEQ ID NO: 2223 - protein, 148 aa, Arabidopsis thaliana
  peptide (1)..(148): Ceres Seq. ID no. 12336426
  misc_feature (1)..(148): NCBI GI NO: 21554916 NR Description: myb-like protein, putative [Arabidopsis thaliana]
  misc_feature (1)..(148): NCBI GI NO: 15220910 NR Description: myb family trnscription factor
  misc_feature (1)..(148): NCBI GI NO: 25513679 NR Description: F2H15.17 protein - Arabidopsis thaliana
  misc_feature (1)..(148): NCBI GI NO: 11358541 NR Description: myb-related transcription factor MYB52
  misc_feature (1)..(144): NCBI GI NO: 15219462 NR Description: myb family transcription factor
  misc_feature (1)..(144): NCBI GI NO: 11358543 NR Description: myb-related transcription factor MYB54
  misc_feature (1)..(14): NCBI GI NO: 31980093 NR Description: MYB transcription factor R2R3 type
  misc_feature (1)..(26): NCBI GI NO: 21321780 NR Description: putative Myb/Myb-related protein
  misc_feature (1)..(14): NCBI GI NO: 6979341 NR Description: myb-like protein [Oryza sativa]
  misc_feature (1)..(140): NCBI GI NO: 15222362 NR Description: MYB-family transcription factor, putative
MARRGRERSKLRPRGLGHDGTVAATGMIGNYKDCDKERRLATTTAINFPYQFSHINHFQVLKEFLTVKIGFRNSTTPIQEGAIDQTKRPMEFYNFLQVNTDSKIHELIDNSRKDEEEDVDQNNRIPNENCVPFFDFLSVGNSASQGLC

SEQ ID NO: 2224 - DNA, 1034 bp, Arabidopsis thaliana
  misc_feature (1)..(1034): Ceres Seq. ID no. 13489401
gattctctatattgcagatcgatctccgagtttgctaaatcgccgggaaatttactgaatttggagctagtcatgtcttcagatcctgacaaaatgatgtccaaagccgacaaaatgacaaagctcacgcttactagatggagtgctgattggagaggtgctactgagttgtatgagcaagcagcaaatgggtttagagcctcaaaaaattatgagaaagctaaagtggctctcgagaaagcttcaaaaggacaagagatgcaagcttctccttgggatgctgcaaagcatatggagtctgctgctgccttagcacagaagctaagtatttggaatgaagttgctgatttttatagaaaggcgtccgagctgtatgttgagtgtggaagggcacaacccgcatcagatgctcttggaaaggctgcccgtgctttggaagatgtcaaaccagatgactccatccaactatacactgatgcttgtgaaattcttgaagaggatgggagggaccaaatggcctttgatctgtaccgtgcttgtgctaatgtctacattaagcttgagaagttcacagatgctgcaacctttttcttaagattgggtgtagctgctgataagtgtgatgcgacaaatagccagtgtaaggcgtatctcagtgcaatcatcttatatctgtatgctcacgacctgcagcaggcagaaaaatgctacaatgactgttctcagattgacgcttttctgaagagtgatcagagccgaagtgctagtagacttctcacagcctataatgaaggtgacattgaagaaatcaagaaggtggcgagtgcaagcactgtctcgaatttggatcatatgattatcaagttggctaggaagctacccactggagatgttactgcaattcagatgaacactaatgacgatctagacgaggatgatctcacttaaagtttctccactttgtacagattcatatttacacttggcttcttttcagtccaaagattaaaaaaaaacttattatcgtttttccc

SEQ ID NO: 2225 - protein, 315 aa, Arabidopsis thaliana
  peptide (1)..(315): Ceres Seq. ID no. 13489402
  misc_feature (25)..(315): NCBI GI NO: 21554919 NR Description: unknown [Arabidopsis thaliana]
  misc_feature (25)..(315): NCBI GI NO: 18415496 NR Description: gamma-soluble NSF attachment protein (gamma-SNAP)
  misc_feature (25)..(289): NCBI GI NO: 7486759 NR Description: hypothetical protein F9F13
  misc_feature (285)..(315): NCBI GI NO: 7486759 NR Description: hypothetical protein F9F13
  misc_feature (26)..(315): NCBI GI NO: 38344323 NR Description: OSJNBa0058K23.5
  misc_feature (91)..(315): NCBI GI NO: 5852090 NR Description: zwh13.1 [Oryza sativa (indica cultivar-group)]
  misc_feature (30)..(293): NCBI GI NO: 5639862 NR Description: soluble NSF attachment protein gamma isoform
  misc_feature (33)..(298): NCBI GI NO: 12804881 NR Description: N-ethylmaleimide-sensitive factor attachment
  misc_feature (33)..(298): NCBI GI NO: 34932055 NR Description: similar to Gamma-soluble NSF attachment protein
  misc_feature (33)..(298): NCBI GI NO: 26355647 NR Description: unnamed protein product [Mus musculus]
DSLYCRSISEFAKSPGNLLNLELVMSSDPDKMMSKADKMTKLTLTRWSADWRGATELYEQAANGFRASKNYEKAKVALEKASKGQEMQASPWDAAKHMESAAALAQKLSIWNEVADFYRKASELYVECGRAQPASDALGKAARALEDVKPDDSIQLYTDACEILEEDGRDQMAFDLYRACANVYIKLEKFTDAATFFLRLGVAADKCDATNSQCKAYLSAIILYLYAHDLQQAEKCYNDCSQIDAFLKSDQSRSASRLLTAYNEGDIEEIKKVASASTVSNLDHMIIKLARKLPTGDVTAIQMNTNDDLDEDDLT

SEQ ID NO: 2226 - protein, 291 aa, Arabidopsis thaliana
  peptide (1)..(291): Ceres Seq. ID no. 13489403
  misc_feature (1)..(291): NCBI GI NO: 21554919 NR Description: unknown [Arabidopsis thaliana]
  misc_feature (1)..(291): NCBI GI NO: 18415496 NR Description: gamma-soluble NSF attachment protein (gamma-SNAP)
  misc_feature (1)..(265): NCBI GI NO: 7486759 NR Description: hypothetical protein F9F13
  misc_feature (261)..(291): NCBI GI NO: 7486759 NR Description: hypothetical protein F9F13
  misc_feature (2)..(291): NCBI GI NO: 38344323 NR Description: OSJNBa0058K23.5
  misc_feature (67)..(291): NCBI GI NO: 5852090 NR Description: zwh13.1 [Oryza sativa (indica cultivar-group)]
  misc_feature (6)..(269): NCBI GI NO: 5639862 NR Description: soluble NSF attachment protein gamma isoform
  misc_feature (9)..(274): NCBI GI NO: 12804881 NR Description: N-ethylmaleimide-sensitive factor attachment
  misc_feature (9)..(274): NCBI GI NO: 34932055 NR Description: similar to Gamma-soluble NSF attachment protein
  misc_feature (9)..(274): NCBI GI NO: 26355647 NR Description: unnamed protein product [Mus musculus]
MSSDPDKMMSKADKMTKLTLTRWSADWRGATELYEQAANGFRASKNYEKAKVALEKASKGQEMQASPWDAAKHMESAAALAQKLSIWNEVADFYRKASELYVECGRAQPASDALGKAARALEDVKPDDSIQLYTDACEILEEDGRDQMAFDLYRACANVYIKLEKFTDAATFFLRLGVAADKCDATNSQCKAYLSAIILYLYAHDLQQAEKCYNDCSQIDAFLKSDQSRSASRLLTAYNEGDIEEIKKVASASTVSNLDHMIIKLARKLPTGDVTAIQMNTNDDLDEDDLT

SEQ ID NO: 2227 - protein, 284 aa, Arabidopsis thaliana
  peptide (1)..(284): Ceres Seq. ID no. 13489404
  misc_feature (1)..(284): NCBI GI NO: 21554919 NR Description: unknown [Arabidopsis thaliana]
  misc_feature (1)..(284): NCBI GI NO: 18415496 NR Description: gamma-soluble NSF attachment protein (gamma-SNAP)
  misc_feature (1)..(258): NCBI GI NO: 7486759 NR Description: hypothetical protein F9F13
  misc_feature (254)..(284): NCBI GI NO: 7486759 NR Description: hypothetical protein F9F13
  misc_feature (1)..(284): NCBI GI NO: 38344323 NR Description: OSJNBa0058K23.5
  misc_feature (60)..(284): NCBI GI NO: 5852090 NR Description: zwh13.1 [Oryza sativa (indica cultivar-group)]
  misc_feature (1)..(262): NCBI GI NO: 5639862 NR Description: soluble NSF attachment protein gamma isoform
  misc_feature (2)..(267): NCBI GI NO: 12804881 NR Description: N-ethylmaleimide-sensitive factor attachment
  misc_feature (2)..(267): NCBI GI NO: 34932055 NR Description: similar to Gamma-soluble NSF attachment protein
  misc_feature (2)..(267): NCBI GI NO: 26355647 NR Description: unnamed protein product [Mus musculus]
MMSKADKMTKLTLTRWSADWRGATELYEQAANGFRASKNYEKAKVALEKASKGQEMQASPWDAAKHMESAAALAQKLSIWNEVADFYRKASELYVECGRAQPASDALGKAARALEDVKPDDSIQLYTDACEILEEDGRDQMAFDLYRACANVYIKLEKFTDAATFFLRLGVAADKCDATNSQCKAYLSAIILYLYAHDLQQAEKCYNDCSQIDAFLKSDQSRSASRLLTAYNEGDIEEIKKVASASTVSNLDHMIIKLARKLPTGDVTAIQMNTNDDLDEDDLT

SEQ ID NO: 2228 - DNA, 915 bp, Arabidopsis thaliana
  misc_feature (1)..(915): Ceres Seq. ID no. 13647113
atcattaacctgttttcactcaaatcatccatctaccttctctctgtaacaatcctctcttccctctaagagtttctgaaaaatcggtgaaacaacagaggaagcaatatggcacttacttggactcataaagacaggggagaaattagggttcatgagaatttggaggaactaagcatagacttggttgattatatagctgagatatcagaagcatcaattaaagaacatggtgctttctgcattgtgttatcaggaggctctctcattagcttcatgggaaaattgatcgagccgccttacgacaagattgtagattgggcgaaatggtatgttttctgggcggatgagcgtgtggtagctaagaatcatgacgatagcaactacaagctagccaaagataatttactctccaaggtaaatgtgtttccgagacatatatgttccattaacgacacagtttcagcggaggaagctgcaacagagtatgaattcgccatcagacagatggtgagatcacgaaccgtggctgcgtcagacaacagtgacagtcccaggtttgatctgatcttgcttgggatgggctcagatggacatgtagcctcactcttcccgaaccacccagcacttgaggtgaaggacgattgggtcacattcctaaccgactctcataaaccgccaccagagagaatcacattcactttgcccgtcatcaactcagctgctaacgttgtcgtagtagcaaccggcgaatccaaagccaatgctatccacttagcaatcgatgatttgcccttaccagacagctctctgtctctgcctgcaaggctagtccacccgagcaatgggaatctgatttggtttatggataaacaagcggggtctaagcttgacaggtttaaattttccgagtag

SEQ ID NO: 2229 - protein, 268 aa, Arabidopsis thaliana
  peptide (1)..(268): Ceres Seq. ID no. 13647114
  misc_feature (29)..(265): Pfam Name: Pfam Description:  Glucosamine-6-phosphate isomerases/ 6-phosphogluconolactonase
  misc_feature (1)..(268): NCBI GI NO: 15222922 NR Description: hypothetical protein [Arabidopsis thaliana]
  misc_feature (8)..(262): NCBI GI NO: 34394567 NR Description: putative 6-phosphogluconolactonase
  misc_feature (6)..(261): NCBI GI NO: 28140256 NR Description: putative 6-phosphogluconolactonase
  misc_feature (1)..(261): NCBI GI NO: 21554291 NR Description: 6-phosphogluconolactonase-like protein
  misc_feature (1)..(261): NCBI GI NO: 18420789 NR Description: 6-phosphogluconolactonase-related protein
  misc_feature (1)..(261): NCBI GI NO: 10177901 NR Description: 6-phosphogluconolactonase-like protein
  misc_feature (15)..(261): NCBI GI NO: 14009294 NR Description: putative 6-phosphogluconolactonase
  misc_feature (21)..(261): NCBI GI NO: 21537412 NR Description: 6-phosphogluconolactonase-like protein
  misc_feature (21)..(261): NCBI GI NO: 15238526 NR Description: 6-phosphogluconolactonase-related protein
  misc_feature (14)..(261): NCBI GI NO: 15229127 NR Description: 6-phosphogluconolactonase - like protein
MALTWTHKDRGEIRVHENLEELSIDLVDYIAEISEASIKEHGAFCIVLSGGSLISFMGKLIEPPYDKIVDWAKWYVFWADERVVAKNHDDSNYKLAKDNLLSKVNVFPRHICSINDTVSAEEAATEYEFAIRQMVRSRTVAASDNSDSPRFDLILLGMGSDGHVASLFPNHPALEVKDDWVTFLTDSHKPPPERITFTLPVINSAANVVVVATGESKANAIHLAIDDLPLPDSSLSLPARLVHPSNGNLIWFMDKQAGSKLDRFKFSE

SEQ ID NO: 2230 - protein, 212 aa, Arabidopsis thaliana
  peptide (1)..(212): Ceres Seq. ID no. 13647115
  misc_feature (1)..(209): Pfam Name: Pfam Description:  Glucosamine-6-phosphate isomerases/ 6-phosphogluconolactonase
  misc_feature (1)..(212): NCBI GI NO: 15222922 NR Description: hypothetical protein [Arabidopsis thaliana]
  misc_feature (1)..(206): NCBI GI NO: 34394567 NR Description: putative 6-phosphogluconolactonase
  misc_feature (1)..(205): NCBI GI NO: 28140256 NR Description: putative 6-phosphogluconolactonase
  misc_feature (1)..(205): NCBI GI NO: 21554291 NR Description: 6-phosphogluconolactonase-like protein
  misc_feature (1)..(205): NCBI GI NO: 18420789 NR Description: 6-phosphogluconolactonase-related protein
  misc_feature (1)..(205): NCBI GI NO: 10177901 NR Description: 6-phosphogluconolactonase-like protein
  misc_feature (1)..(205): NCBI GI NO: 14009294 NR Description: putative 6-phosphogluconolactonase
  misc_feature (1)..(205): NCBI GI NO: 21537412 NR Description: 6-phosphogluconolactonase-like protein
  misc_feature (1)..(205): NCBI GI NO: 15238526 NR Description: 6-phosphogluconolactonase-related protein
  misc_feature (1)..(205): NCBI GI NO: 15229127 NR Description: 6-phosphogluconolactonase - like protein
MGKLIEPPYDKIVDWAKWYVFWADERVVAKNHDDSNYKLAKDNLLSKVNVFPRHICSINDTVSAEEAATEYEFAIRQMVRSRTVAASDNSDSPRFDLILLGMGSDGHVASLFPNHPALEVKDDWVTFLTDSHKPPPERITFTLPVINSAANVVVVATGESKANAIHLAIDDLPLPDSSLSLPARLVHPSNGNLIWFMDKQAGSKLDRFKFSE

SEQ ID NO: 2231 - protein, 135 aa, Arabidopsis thaliana
  peptide (1)..(135): Ceres Seq. ID no. 13647116
  misc_feature (1)..(132): Pfam Name: Pfam Description:  Glucosamine-6-phosphate isomerases/ 6-phosphogluconolactonase
  misc_feature (1)..(135): NCBI GI NO: 15222922 NR Description: hypothetical protein [Arabidopsis thaliana]
  misc_feature (1)..(129): NCBI GI NO: 34394567 NR Description: putative 6-phosphogluconolactonase
  misc_feature (1)..(128): NCBI GI NO: 28140256 NR Description: putative 6-phosphogluconolactonase
  misc_feature (1)..(128): NCBI GI NO: 21554291 NR Description: 6-phosphogluconolactonase-like protein
  misc_feature (1)..(128): NCBI GI NO: 18420789 NR Description: 6-phosphogluconolactonase-related protein
  misc_feature (1)..(128): NCBI GI NO: 10177901 NR Description: 6-phosphogluconolactonase-like protein
  misc_feature (1)..(128): NCBI GI NO: 14009294 NR Description: putative 6-phosphogluconolactonase
  misc_feature (1)..(128): NCBI GI NO: 21537412 NR Description: 6-phosphogluconolactonase-like protein
  misc_feature (1)..(128): NCBI GI NO: 15238526 NR Description: 6-phosphogluconolactonase-related protein
  misc_feature (1)..(128): NCBI GI NO: 15229127 NR Description: 6-phosphogluconolactonase - like protein
MVRSRTVAASDNSDSPRFDLILLGMGSDGHVASLFPNHPALEVKDDWVTFLTDSHKPPPERITFTLPVINSAANVVVVATGESKANAIHLAIDDLPLPDSSLSLPARLVHPSNGNLIWFMDKQAGSKLDRFKFSE

SEQ ID NO: 2232 - DNA, 656 bp, Arabidopsis thaliana
  misc_feature (1)..(656): Ceres Seq. ID no. 12580161
atattaaggagagacctattcgtgtggccaaacaccagaatatcgccaaaatcgttgaaacttgaacgaagaaacagacttgtcacagctcagccgccggaagactttaaggaggtatggatttggtgtggttattaagtgttttacttgttggagctgcacttggatattacatcagcactttacgacaaacccgccgaatctttctctcctccaaatctgtcgccatagatgcaggatccagcgggaataagaaaaccaagtccaaggaacccctcgagatagagaaactcgctgattttcgcaaaaatttcaaaatggttttggttgtgaggaatgatcttaaaatgggtaaagggaagattgcagctcaatgcagtcatgcaactttaggtttatacaagaaactccttcaacgggcgccaaaagccttgaacagatgggaatattgtgctcagccaaaagttgttgtcaaaattgaaagtgaggaagagatgctagttttgcaagaaagagcaaagaccctgaaactgccaacccatatcaccattgatgcgggaaaaacacagatcgctccaaattcaaggacagtaatggctattcttggacctgttgataatgttgatgaagtaacaggtggactaaagcttatgtaa

SEQ ID NO: 2233 - protein, 179 aa, Arabidopsis thaliana
  peptide (1)..(179): Ceres Seq. ID no. 12580162
  misc_feature (75)..(165): Pfam Name: Pfam Description:  Domain of unknown function UPF0099
  misc_feature (1)..(179): NCBI GI NO: 15228442 NR Description: unknown protein; protein id: At3g03010.1
  misc_feature (1)..(179): NCBI GI NO: 18418110 NR Description: putative protein; protein id: At5g16870
  misc_feature (1)..(179): NCBI GI NO: 21592675 NR Description: unknown [Arabidopsis thaliana]
  misc_feature (1)..(179): NCBI GI NO: 11357729 NR Description: hypothetical protein F2K13_20 - Arabidopsis thaliana
  misc_feature (1)..(108): NCBI GI NO: 26453197 NR Description: unknown protein [Arabidopsis thaliana]
  misc_feature (46)..(179): NCBI GI NO: 38345901 NR Description: OSJNBa0060D06.11
  misc_feature (43)..(178): NCBI GI NO: 7706351 NR Description: CGI-147 protein [Homo sapiens]
  misc_feature (43)..(178): NCBI GI NO: 11359891 NR Description: hypothetical protein DKFZp434A1535
  misc_feature (66)..(178): NCBI GI NO: 40889414 NR Description: Chain A, Crystal Structure Of Bit1
  misc_feature (66)..(178): NCBI GI NO: 29428218 NR Description: Protein CGI-147
MDLVWLLSVLLVGAALGYYISTLRQTRRIFLSSKSVAIDAGSSGNKKTKSKEPLEIEKLADFRKNFKMVLVVRNDLKMGKGKIAAQCSHATLGLYKKLLQRAPKALNRWEYCAQPKVVVKIESEEEMLVLQERAKTLKLPTHITIDAGKTQIAPNSRTVMAILGPVDNVDEVTGGLKLM

SEQ ID NO: 2234 - protein, 112 aa, Arabidopsis thaliana
  peptide (1)..(112): Ceres Seq. ID no. 12580163
  misc_feature (8)..(98): Pfam Name: Pfam Description:  Domain of unknown function UPF0099
  misc_feature (1)..(112): NCBI GI NO: 15228442 NR Description: unknown protein; protein id: At3g03010.1
  misc_feature (1)..(112): NCBI GI NO: 18418110 NR Description: putative protein; protein id: At5g16870
  misc_feature (1)..(112): NCBI GI NO: 21592675 NR Description: unknown [Arabidopsis thaliana]
  misc_feature (1)..(112): NCBI GI NO: 11357729 NR Description: hypothetical protein F2K13_20 - Arabidopsis thaliana
  misc_feature (1)..(41): NCBI GI NO: 26453197 NR Description: unknown protein [Arabidopsis thaliana]
  misc_feature (1)..(112): NCBI GI NO: 38345901 NR Description: OSJNBa0060D06.11
  misc_feature (1)..(111): NCBI GI NO: 7706351 NR Description: CGI-147 protein [Homo sapiens]
  misc_feature (1)..(111): NCBI GI NO: 11359891 NR Description: hypothetical protein DKFZp434A1535
  misc_feature (1)..(111): NCBI GI NO: 40889414 NR Description: Chain A, Crystal Structure Of Bit1
  misc_feature (1)..(111): NCBI GI NO: 29428218 NR Description: Protein CGI-147
MVLVVRNDLKMGKGKIAAQCSHATLGLYKKLLQRAPKALNRWEYCAQPKVVVKIESEEEMLVLQERAKTLKLPTHITIDAGKTQIAPNSRTVMAILGPVDNVDEVTGGLKLM

SEQ ID NO: 2235 - protein, 102 aa, Arabidopsis thaliana
  peptide (1)..(102): Ceres Seq. ID no. 12580164
  misc_feature (1)..(88): Pfam Name: Pfam Description:  Domain of unknown function UPF0099
  misc_feature (1)..(102): NCBI GI NO: 15228442 NR Description: unknown protein; protein id: At3g03010.1
  misc_feature (1)..(102): NCBI GI NO: 18418110 NR Description: putative protein; protein id: At5g16870
  misc_feature (1)..(102): NCBI GI NO: 21592675 NR Description: unknown [Arabidopsis thaliana]
  misc_feature (1)..(102): NCBI GI NO: 11357729 NR Description: hypothetical protein F2K13_20 - Arabidopsis thaliana
  misc_feature (1)..(31): NCBI GI NO: 26453197 NR Description: unknown protein [Arabidopsis thaliana]
  misc_feature (1)..(102): NCBI GI NO: 38345901 NR Description: OSJNBa0060D06.11
  misc_feature (1)..(101): NCBI GI NO: 7706351 NR Description: CGI-147 protein [Homo sapiens]
  misc_feature (1)..(101): NCBI GI NO: 11359891 NR Description: hypothetical protein DKFZp434A1535
  misc_feature (1)..(101): NCBI GI NO: 40889414 NR Description: Chain A, Crystal Structure Of Bit1
  misc_feature (1)..(101): NCBI GI NO: 29428218 NR Description: Protein CGI-147
MGKGKIAAQCSHATLGLYKKLLQRAPKALNRWEYCAQPKVVVKIESEEEMLVLQERAKTLKLPTHITIDAGKTQIAPNSRTVMAILGPVDNVDEVTGGLKLM

SEQ ID NO: 2236 - DNA, 854 bp, Arabidopsis thaliana
  misc_feature (1)..(854): Ceres Seq. ID no. 13509066
aaagaaaaaaggattcctaaaaaatcagtcactcctcttaatcttctcctatctctcattttcgtgggttttgtttttgttatcttcttcgtttggatattattacatttgggactcaagaagaaatcgaatctatcgtgtgtgtagattgcttctctctatctcttctctcgctacacaacaatggctgcttacacgtgtacttcccgtccgccgatttctatccggtcagagatgagaatcgcttcctcgccgacgggttccttctctactcgacagatgttctctgtgttgccggaatcgagcggattgaggactcgcgtttctctatcttcactctcgaagaattctagggtttcccgattacgacgaggcgttatctgtgaagctcaggacactgctacaggaattccagtggtcaacgattcaacatgggactctctagttctcaaggctgatgagcctgtgtttgtcgacttttgggcaccatggtgtggaccctgcaaaatgattgatcccattgtcaacgaactcgcgcaaaagtacgccggccagttcaagttctacaaacttaacactgatgagtctcctgcaacccctggccagtatggtgttagaagcatcccaactatcatgatctttgtcaatggtgagaagaaggatacaatcatcggtgctgtctctaaagacactttagcaaccagcatcaacaaattcttgtaatgaactactagtcactgttctcttttctctgtatctctcgactctctaccttttacctatctactcatcactgttcatctagacttgtatgataatatgatgtctcaggttttcagaatttgaagtctacg

SEQ ID NO: 2237 - protein, 179 aa, Arabidopsis thaliana
  peptide (1)..(179): Ceres Seq. ID no. 13509067
  misc_feature (1)..(179): NCBI GI NO: 30678634 NR Description: thioredoxin M-type 1, chloroplast precursor
  misc_feature (1)..(179): NCBI GI NO: 11135407 NR Description: Thioredoxin M-type, chloroplast precursor (TRX-M)
  misc_feature (1)..(179): NCBI GI NO: 15236327 NR Description: thioredoxin M-type 2, chloroplast precursor
  misc_feature (1)..(179): NCBI GI NO: 6539610 NR Description: thioredoxin m2 [Arabidopsis thaliana]
  misc_feature (1)..(179): NCBI GI NO: 21618235 NR Description: putative M-type thioredoxin [Arabidopsis thaliana]
  misc_feature (21)..(179): NCBI GI NO: 6539614 NR Description: thioredoxin m4 [Arabidopsis thaliana]
  misc_feature (27)..(179): NCBI GI NO: 15594012 NR Description: putative thioredoxin m2 [Pisum sativum]
  misc_feature (21)..(179): NCBI GI NO: 15232567 NR Description: thioredoxin M-type 4, chloroplast precursor
  misc_feature (20)..(179): NCBI GI NO: 38346628 NR Description: OSJNBa0074L08.22
  misc_feature (13)..(179): NCBI GI NO: 1388088 NR Description: thioredoxin m
MAAYTCTSRPPISIRSEMRIASSPTGSFSTRQMFSVLPESSGLRTRVSLSSLSKNSRVSRLRRGVICEAQDTATGIPVVNDSTWDSLVLKADEPVFVDFWAPWCGPCKMIDPIVNELAQKYAGQFKFYKLNTDESPATPGQYGVRSIPTIMIFVNGEKKDTIIGAVSKDTLATSINKFL

SEQ ID NO: 2238 - protein, 162 aa, Arabidopsis thaliana
  peptide (1)..(162): Ceres Seq. ID no. 13509068
  misc_feature (1)..(162): NCBI GI NO: 30678634 NR Description: thioredoxin M-type 1, chloroplast precursor
  misc_feature (1)..(162): NCBI GI NO: 11135407 NR Description: Thioredoxin M-type, chloroplast precursor (TRX-M)
  misc_feature (1)..(162): NCBI GI NO: 15236327 NR Description: thioredoxin M-type 2, chloroplast precursor
  misc_feature (1)..(162): NCBI GI NO: 6539610 NR Description: thioredoxin m2 [Arabidopsis thaliana]
  misc_feature (1)..(162): NCBI GI NO: 21618235 NR Description: putative M-type thioredoxin [Arabidopsis thaliana]
  misc_feature (4)..(162): NCBI GI NO: 6539614 NR Description: thioredoxin m4 [Arabidopsis thaliana]
  misc_feature (10)..(162): NCBI GI NO: 15594012 NR Description: putative thioredoxin m2 [Pisum sativum]
  misc_feature (4)..(162): NCBI GI NO: 15232567 NR Description: thioredoxin M-type 4, chloroplast precursor
  misc_feature (3)..(162): NCBI GI NO: 38346628 NR Description: OSJNBa0074L08.22
  misc_feature (1)..(162): NCBI GI NO: 1388088 NR Description: thioredoxin m
MRIASSPTGSFSTRQMFSVLPESSGLRTRVSLSSLSKNSRVSRLRRGVICEAQDTATGIPVVNDSTWDSLVLKADEPVFVDFWAPWCGPCKMIDPIVNELAQKYAGQFKFYKLNTDESPATPGQYGVRSIPTIMIFVNGEKKDTIIGAVSKDTLATSINKFL

SEQ ID NO: 2239 - protein, 147 aa, Arabidopsis thaliana
  peptide (1)..(147): Ceres Seq. ID no. 13509069
  misc_feature (1)..(147): NCBI GI NO: 30678634 NR Description: thioredoxin M-type 1, chloroplast precursor
  misc_feature (1)..(147): NCBI GI NO: 11135407 NR Description: Thioredoxin M-type, chloroplast precursor (TRX-M)
  misc_feature (1)..(147): NCBI GI NO: 15236327 NR Description: thioredoxin M-type 2, chloroplast precursor
  misc_feature (1)..(147): NCBI GI NO: 6539610 NR Description: thioredoxin m2 [Arabidopsis thaliana]
  misc_feature (1)..(147): NCBI GI NO: 21618235 NR Description: putative M-type thioredoxin [Arabidopsis thaliana]
  misc_feature (1)..(147): NCBI GI NO: 6539614 NR Description: thioredoxin m4 [Arabidopsis thaliana]
  misc_feature (1)..(147): NCBI GI NO: 15594012 NR Description: putative thioredoxin m2 [Pisum sativum]
  misc_feature (1)..(147): NCBI GI NO: 15232567 NR Description: thioredoxin M-type 4, chloroplast precursor
  misc_feature (1)..(147): NCBI GI NO: 38346628 NR Description: OSJNBa0074L08.22
  misc_feature (1)..(147): NCBI GI NO: 1388088 NR Description: thioredoxin m
MFSVLPESSGLRTRVSLSSLSKNSRVSRLRRGVICEAQDTATGIPVVNDSTWDSLVLKADEPVFVDFWAPWCGPCKMIDPIVNELAQKYAGQFKFYKLNTDESPATPGQYGVRSIPTIMIFVNGEKKDTIIGAVSKDTLATSINKFL

SEQ ID NO: 2240 - DNA, 1243 bp, Arabidopsis thaliana; identical to SEQ ID NO: 436
  misc_feature (1)..(1243): Ceres Seq. ID no. 12562371

SEQ ID NO: 2241 - protein, 244 aa, Arabidopsis thaliana; identical to SEQ ID NO: 437
  peptide (1)..(244): Ceres Seq. ID no. 12562372
  misc_feature (90)..(160): Pfam Name: a.k.a. RRM, RBD, or RNP domain Pfam Description: RNA recognition motif.
  misc_feature (1)..(244): NCBI GI NO: 30697310 NR Description: RNA and export factor binding protein, putative
  misc_feature (1)..(244): NCBI GI NO: 30697313 NR Description: RNA and export factor binding protein, putative
  misc_feature (1)..(244): NCBI GI NO: 21555029 NR Description: transcriptional coactivator-like protein
  misc_feature (1)..(244): NCBI GI NO: 9757916 NR Description: RNA and export factor binding protein 2-I-like protein
  misc_feature (14)..(244): NCBI GI NO: 6755763 NR Description: RNA and export factor binding protein 1
  misc_feature (1)..(36): NCBI GI NO: 6755763 NR Description: RNA and export factor binding protein 1
  misc_feature (18)..(244): NCBI GI NO: 30411083 NR Description: Similar to THO complex 4 [Homo sapiens]
  misc_feature (1)..(36): NCBI GI NO: 30411083 NR Description: Similar to THO complex 4 [Homo sapiens]
  misc_feature (18)..(219): NCBI GI NO: 11358209 NR Description: hypothetical protein T22P11
  misc_feature (18)..(219): NCBI GI NO: 30679669 NR Description: RNA and export factor binding protein, putative

SEQ ID NO: 2242 - protein, 238 aa, Arabidopsis thaliana; identical to SEQ ID NO: 438
  peptide (1)..(238): Ceres Seq. ID no. 12562373
  misc_feature (84)..(154): Pfam Name: a.k.a. RRM, RBD, or RNP domain Pfam Description: RNA recognition motif.
  misc_feature (1)..(238): NCBI GI NO: 30697310 NR Description: RNA and export factor binding protein, putative
  misc_feature (1)..(238): NCBI GI NO: 30697313 NR Description: RNA and export factor binding protein, putative
  misc_feature (1)..(238): NCBI GI NO: 21555029 NR Description: transcriptional coactivator-like protein
  misc_feature (1)..(238): NCBI GI NO: 9757916 NR Description: RNA and export factor binding protein 2-I-like protein
  misc_feature (8)..(238): NCBI GI NO: 6755763 NR Description: RNA and export factor binding protein 1
  misc_feature (1)..(30): NCBI GI NO: 6755763 NR Description: RNA and export factor binding protein 1
  misc_feature (12)..(238): NCBI GI NO: 30411083 NR Description: Similar to THO complex 4 [Homo sapiens]
  misc_feature (1)..(30): NCBI GI NO: 30411083 NR Description: Similar to THO complex 4 [Homo sapiens]
  misc_feature (12)..(213): NCBI GI NO: 11358209 NR Description: hypothetical protein T22P11
  misc_feature (12)..(213): NCBI GI NO: 30679669 NR Description: RNA and export factor binding protein, putative

SEQ ID NO: 2243 - protein, 233 aa, Arabidopsis thaliana; identical to SEQ ID NO: 439
  peptide (1)..(233): Ceres Seq. ID no. 12562374
  misc_feature (79)..(149): Pfam Name: a.k.a. RRM, RBD, or RNP domain Pfam Description: RNA recognition motif.
  misc_feature (1)..(233): NCBI GI NO: 30697310 NR Description: RNA and export factor binding protein, putative
  misc_feature (1)..(233): NCBI GI NO: 30697313 NR Description: RNA and export factor binding protein, putative
  misc_feature (1)..(233): NCBI GI NO: 21555029 NR Description: transcriptional coactivator-like protein
  misc_feature (1)..(233): NCBI GI NO: 9757916 NR Description: RNA and export factor binding protein 2-I-like protein
  misc_feature (3)..(233): NCBI GI NO: 6755763 NR Description: RNA and export factor binding protein 1
  misc_feature (1)..(25): NCBI GI NO: 6755763 NR Description: RNA and export factor binding protein 1
  misc_feature (7)..(233): NCBI GI NO: 30411083 NR Description: Similar to THO complex 4 [Homo sapiens]
  misc_feature (1)..(25): NCBI GI NO: 30411083 NR Description: Similar to THO complex 4 [Homo sapiens]
  misc_feature (7)..(208): NCBI GI NO: 11358209 NR Description: hypothetical protein T22P11
  misc_feature (7)..(208): NCBI GI NO: 30679669 NR Description: RNA and export factor binding protein, putative

SEQ ID NO: 2244 - DNA, 1006 bp, Arabidopsis thaliana
  misc_feature (1)..(1006): Ceres Seq. ID no. 13491607
tcgtatttcaagaaatgacgaccgatgggactccaccgagacgaagcgacggccatggaaacccttttcagagtctcacttcgtctacttccggtttccgccgccgtgacatgtcgctcgatccgattccccgtttcaagacccggttcctcacacttactgaaccgtaagctgtataatttgcctacttcttcttcctcctctttgtcgacaaaagccggttggttattgggtcttggtgagaagaaaaagaaagtggatttaccggagatagtggcatctggtgacccggttctgcacgagaaggcccgagaagttgacccgggagaaatcgggtcggagcgtattcagaagataattgatgatatgattaaagttatgagattggctcctggagttggcctcgctgctcctcaaattggtgttcccttaaggattattgtattggaagatacaaaagagtatataagttacgcaccaaaggaagagattcttgctcaagaaagacgtcattttgatctcatggtgatggtgaatccggttctcaaggagagaagcaacaagaaagctcttttctttgaaggatgcttgagtgttgatggattcagagctgcggtggagagataccttgaggtggtagtgacgggctacgatcgtcaaggaaagaggattgaagtgaatgcttcaggttggcaagctaggattttgcaacatgagtgtgatcatttggatggtaatctttacgttgataagatggtaccacgcacttttaggacagtcgacaacttggacttgcctttagctgagggctgccctaagctcggacctcaatgacagattcttcaacaaaagttgtaatcttctgttttgattctttactaaaactcttctagattgagcttgactcaaataatttcaaagatgaaactttgtcggaaagagggttcttttttcgggtttggtaatggattgaaagattttcatttaataaaatattataacttaa

SEQ ID NO: 2245 - protein, 269 aa, Arabidopsis thaliana
  peptide (1)..(269): Ceres Seq. ID no. 13491608
  misc_feature (1)..(269): NCBI GI NO: 18394237 NR Description: peptide deformylase-related protein
  misc_feature (11)..(269): NCBI GI NO: 17433051 NR Description: Peptide deformylase, mitochondrial precursor
  misc_feature (59)..(267): NCBI GI NO: 17433049 NR Description: Peptide deformylase, mitochondrial precursor
  misc_feature (21)..(238): NCBI GI NO: 34913982 NR Description: peptide deformylase-like protein
  misc_feature (82)..(256): NCBI GI NO: 39930960 NR Description: Peptide deformylase 1
  misc_feature (82)..(256): NCBI GI NO: 37521298 NR Description: polypeptide deformylase [Gloeobacter violaceus]
  misc_feature (87)..(262): NCBI GI NO: 24645728 NR Description: CG31373-PA [Drosophila melanogaster]
  misc_feature (56)..(249): NCBI GI NO: 34851655 NR Description: similar to peptide deformylase-like protein
  misc_feature (56)..(265): NCBI GI NO: 29833891 NR Description: putative polypeptide deformylase
  misc_feature (80)..(243): NCBI GI NO: 21219403 NR Description: polypeptide deformylase.
MGLHRDEATAMETLFRVSLRLLPVSAAVTCRSIRFPVSRPGSSHLLNRKLYNLPTSSSSSLSTKAGWLLGLGEKKKKVDLPEIVASGDPVLHEKAREVDPGEIGSERIQKIIDDMIKVMRLAPGVGLAAPQIGVPLRIIVLEDTKEYISYAPKEEILAQERRHFDLMVMVNPVLKERSNKKALFFEGCLSVDGFRAAVERYLEVVVTGYDRQGKRIEVNASGWQARILQHECDHLDGNLYVDKMVPRTFRTVDNLDLPLAEGCPKLGPQ

SEQ ID NO: 2246 - protein, 259 aa, Arabidopsis thaliana
  peptide (1)..(259): Ceres Seq. ID no. 13491609
  misc_feature (1)..(259): NCBI GI NO: 18394237 NR Description: peptide deformylase-related protein
  misc_feature (1)..(259): NCBI GI NO: 17433051 NR Description: Peptide deformylase, mitochondrial precursor
  misc_feature (49)..(257): NCBI GI NO: 17433049 NR Description: Peptide deformylase, mitochondrial precursor
  misc_feature (11)..(228): NCBI GI NO: 34913982 NR Description: peptide deformylase-like protein
  misc_feature (72)..(246): NCBI GI NO: 39930960 NR Description: Peptide deformylase 1
  misc_feature (72)..(246): NCBI GI NO: 37521298 NR Description: polypeptide deformylase [Gloeobacter violaceus]
  misc_feature (77)..(252): NCBI GI NO: 24645728 NR Description: CG31373-PA [Drosophila melanogaster]
  misc_feature (46)..(239): NCBI GI NO: 34851655 NR Description: similar to peptide deformylase-like protein
  misc_feature (46)..(255): NCBI GI NO: 29833891 NR Description: putative polypeptide deformylase
  misc_feature (70)..(233): NCBI GI NO: 21219403 NR Description: polypeptide deformylase.
METLFRVSLRLLPVSAAVTCRSIRFPVSRPGSSHLLNRKLYNLPTSSSSSLSTKAGWLLGLGEKKKKVDLPEIVASGDPVLHEKAREVDPGEIGSERIQKIIDDMIKVMRLAPGVGLAAPQIGVPLRIIVLEDTKEYISYAPKEEILAQERRHFDLMVMVNPVLKERSNKKALFFEGCLSVDGFRAAVERYLEVVVTGYDRQGKRIEVNASGWQARILQHECDHLDGNLYVDKMVPRTFRTVDNLDLPLAEGCPKLGPQ

SEQ ID NO: 2247 - protein, 155 aa, Arabidopsis thaliana
  peptide (1)..(155): Ceres Seq. ID no. 13491610
  misc_feature (1)..(155): NCBI GI NO: 18394237 NR Description: peptide deformylase-related protein
  misc_feature (1)..(155): NCBI GI NO: 17433051 NR Description: Peptide deformylase, mitochondrial precursor
  misc_feature (1)..(153): NCBI GI NO: 17433049 NR Description: Peptide deformylase, mitochondrial precursor
  misc_feature (1)..(124): NCBI GI NO: 34913982 NR Description: peptide deformylase-like protein
  misc_feature (1)..(142): NCBI GI NO: 39930960 NR Description: Peptide deformylase 1
  misc_feature (1)..(142): NCBI GI NO: 37521298 NR Description: polypeptide deformylase [Gloeobacter violaceus]
  misc_feature (1)..(148): NCBI GI NO: 24645728 NR Description: CG31373-PA [Drosophila melanogaster]
  misc_feature (1)..(135): NCBI GI NO: 34851655 NR Description: similar to peptide deformylase-like protein
  misc_feature (1)..(151): NCBI GI NO: 29833891 NR Description: putative polypeptide deformylase
  misc_feature (1)..(129): NCBI GI NO: 21219403 NR Description: polypeptide deformylase.
MIKVMRLAPGVGLAAPQIGVPLRIIVLEDTKEYISYAPKEEILAQERRHFDLMVMVNPVLKERSNKKALFFEGCLSVDGFRAAVERYLEVVVTGYDRQGKRIEVNASGWQARILQHECDHLDGNLYVDKMVPRTFRTVDNLDLPLAEGCPKLGPQ

SEQ ID NO: 2248 - DNA, 992 bp, Arabidopsis thaliana
  misc_feature (1)..(992): Ceres Seq. ID no. 12393868
atcaagatcgatccctctctaaaaatggctcaacaacactcttttctcctcttatgcttcttcctctcaatctcttatttactatcttccgcccaaaccgaagccacctcaatcgagagattagtgccaagagacctctacaacaaaattttcatccacaaggacaataccgcttgtcccgcaaatggtttctatacttacgaatcatttgtccaagcgacgaggcggtttccgagattcgggagcgtaggaagccccgtgacacaacgactcgaagtggctgcatttttggctcagatttcacacgagacgaccggaggatgggcaacggcaccagacggaccgtacgcttggggattatgctttaaagaagaagtgagtccacaaagcacttattgtgattcttctaatacacagtggccttgtttccctaacaagacttatcaaggaagaggtccaattcaactatcgtggaactacaactacggaccggccggtcgagccttaggattcgacggtctaaggaatccagaaacggtgtcaaataattcagtgatagcttttcaaacagcactttggttttggatgacgccacagagtcccaaaccttcgtgccatgacgtcatgatcggaaaataccgacctacggcggcggatttggcagctaaccggaccggcgggtttggtttaaccacaaatataataaatggcggtttagagtgtgggattcctggagacggacgggtcaatgaccgaatcgggttttttcagagatatactgggctgtttaaagtagcaactgggccgaatttggactgtgaaaatcaaaggccttatgcttaaacaattaatttggttgacccgaaatatgtatgtttataaacaaaaagtcaacatgtatgtttatggcattgcccacacatgggagccataaaaggggtttatattcaataatgtaattcaatttaatgtgatttgatggttttaattcc

SEQ ID NO: 2249 - protein, 280 aa, Arabidopsis thaliana
  peptide (1)..(280): Ceres Seq. ID no. 12393869
  misc_feature (9)..(280): NCBI GI NO: 15217733 NR Description: glycosyl hydrolase family 19
  misc_feature (9)..(280): NCBI GI NO: 15234281 NR Description: glycosyl hydrolase family 19
  misc_feature (9)..(279): NCBI GI NO: 5880845 NR Description: chitinase precursor [Petroselinum crispum]
  misc_feature (14)..(279): NCBI GI NO: 5880847 NR Description: chitinase precursor [Petroselinum crispum]
  misc_feature (14)..(279): NCBI GI NO: 2129820 NR Description: chitinase (EC 3.2.1.14) class II - peanut
  misc_feature (21)..(279): NCBI GI NO: 6002766 NR Description: class II chitinase [Fragaria x ananassa]
  misc_feature (34)..(272): NCBI GI NO: 4008074 NR Description: chitinase [Cynodon dactylon]
  misc_feature (38)..(279): NCBI GI NO: 34894264 NR Description: unnamed protein product
  misc_feature (73)..(279): NCBI GI NO: 4008072 NR Description: chitinase [Cynodon dactylon]
  misc_feature (41)..(280): NCBI GI NO: 21426919 NR Description: chitinase [Leucaena leucocephala]
IKIDPSLKMAQQHSFLLLCFFLSISYLLSSAQTEATSIERLVPRDLYNKIFIHKDNTACPANGFYTYESFVQATRRFPRFGSVGSPVTQRLEVAAFLAQISHETTGGWATAPDGPYAWGLCFKEEVSPQSTYCDSSNTQWPCFPNKTYQGRGPIQLSWNYNYGPAGRALGFDGLRNPETVSNNSVIAFQTALWFWMTPQSPKPSCHDVMIGKYRPTAADLAANRTGGFGLTTNIINGGLECGIPGDGRVNDRIGFFQRYTGLFKVATGPNLDCENQRPYA

SEQ ID NO: 2250 - protein, 272 aa, Arabidopsis thaliana
  peptide (1)..(272): Ceres Seq. ID no. 12393870
  misc_feature (1)..(272): NCBI GI NO: 15217733 NR Description: glycosyl hydrolase family 19
  misc_feature (1)..(272): NCBI GI NO: 15234281 NR Description: glycosyl hydrolase family 19
  misc_feature (1)..(271): NCBI GI NO: 5880845 NR Description: chitinase precursor [Petroselinum crispum]
  misc_feature (6)..(271): NCBI GI NO: 5880847 NR Description: chitinase precursor [Petroselinum crispum]
  misc_feature (6)..(271): NCBI GI NO: 2129820 NR Description: chitinase (EC 3.2.1.14) class II - peanut
  misc_feature (13)..(271): NCBI GI NO: 6002766 NR Description: class II chitinase [Fragaria x ananassa]
  misc_feature (26)..(264): NCBI GI NO: 4008074 NR Description: chitinase [Cynodon dactylon]
  misc_feature (30)..(271): NCBI GI NO: 34894264 NR Description: unnamed protein product
  misc_feature (65)..(271): NCBI GI NO: 4008072 NR Description: chitinase [Cynodon dactylon]
  misc_feature (33)..(272): NCBI GI NO: 21426919 NR Description: chitinase [Leucaena leucocephala]
MAQQHSFLLLCFFLSISYLLSSAQTEATSIERLVPRDLYNKIFIHKDNTACPANGFYTYESFVQATRRFPRFGSVGSPVTQRLEVAAFLAQISHETTGGWATAPDGPYAWGLCFKEEVSPQSTYCDSSNTQWPCFPNKTYQGRGPIQLSWNYNYGPAGRALGFDGLRNPETVSNNSVIAFQTALWFWMTPQSPKPSCHDVMIGKYRPTAADLAANRTGGFGLTTNIINGGLECGIPGDGRVNDRIGFFQRYTGLFKVATGPNLDCENQRPYA

SEQ ID NO: 2251 - DNA, 693 bp, Arabidopsis thaliana
  misc_feature (1)..(693): Ceres Seq. ID no. 12603444
agttttctactaactctttccttattcttgtaccatcctaaatcagtaagtccttaacgtacgcaccatgtgtacgttagagaagcgcggcgatctctttctcctaaccctaaccggcgaagacgagcacagattccaccccgacacgatcgcctctgttctctcgcttcttgaacaagcaaagtctcaatccacaaaaggatccgtcctcatcactaccggtcacggaaagttcttctccaatggctttgacctcgcgtgggctcaatccgctggacacggtgctataaaacggatgcaccaaatggtcaaatcctttaaaccggtgttagccgccctcctcgatcttccaatgccgacgatcgccgccttgaacggccacgcggcagcctcggggctgatgtttgcgctgatagtgcggaaggtgtggtggaggctacagtgagccttggagaaagtttggccgctaagaaatggaatggtgaggtgtatgcaaccattaggaagagtttgtatccggagctttgtcggatggttgatttaacggcaaataacttggccactcacaacctctagaaactctcattgtcttgttgggagaaaaatggttgaaatatgaatattgccgacaaaagtcaacgtccatttcactaagcacgtatttgtttctcaccaataaaacataattaatct

SEQ ID NO: 2252 - protein, 125 aa, Arabidopsis thaliana
  peptide (1)..(125): Ceres Seq. ID no. 12603445
  misc_feature (11)..(115): Pfam Name: Pfam Description:  Enoyl-CoA hydratase/isomerase family
  misc_feature (1)..(115): NCBI GI NO: 15236499 NR Description: carnitine racemase like protein
  misc_feature (1)..(115): NCBI GI NO: 21555734 NR Description: carnitine racemase like protein
  misc_feature (1)..(115): NCBI GI NO: 15236498 NR Description: carnitine racemase like protein
  misc_feature (1)..(115): NCBI GI NO: 15218713 NR Description: hypothetical protein; protein id: At1g65520.1
  misc_feature (1)..(115): NCBI GI NO: 34903766 NR Description: unnamed protein product
  misc_feature (1)..(125): NCBI GI NO: 23017142 NR Description: hypothetical protein [Thermobifida fusca]
  misc_feature (17)..(115): NCBI GI NO: 15828352 NR Description: possible enoyl-CoA hydratase
  misc_feature (10)..(115): NCBI GI NO: 32404374 NR Description: hypothetical protein ( hypothetical protein B2A19
MCTLEKRGDLFLLTLTGEDEHRFHPDTIASVLSLLEQAKSQSTKGSVLITTGHGKFFSNGFDLAWAQSAGHGAIKRMHQMVKSFKPVLAALLDLPMPTIAALNGHAAASGLMFALIVRKVWWRLQ

SEQ ID NO: 2253 - DNA, 985 bp, Arabidopsis thaliana
  misc_feature (1)..(985): Ceres Seq. ID no. 12665934
gtaagagagacgaatctcacgccggaatctcttttacttcaccgtcgtttgttctccgtcgcgtcacctttcgattaattccttcacagggtagcaaaattttgttgatttcgggatgtcttcagctcaagatccattctacattgttaaagaagagattcaggattctattgataagttgcaatctacattccacaaatgggagcgtatctctcccgacatgggtgatcaagcacatgtggcgaaggagcttgttgctacttgtggaagcattgagtggcaggtagatgagctggaaaaagcgattactgttgcagcaaaagatccttcatggtatggcattgatgaagctgagcttgaaaaacggaggagatggactagtaatgctaggacacaggtgcggaatgtgaagtctggtgttttagctggaaaggttagttctggagcaggtcatgcaagtgaagtgcgtagagaactaatgagaatgccaaactcgggtgaagcaagtagatatgatcagtatggagggagagacgatgatggttttgtacagtcagaatcagataggcaaatgctgttgataaagcaacaagacgaagaattggatgagcttagtaaaagtgtacagagaattggaggagtggggctcactatacacgacgaactcgttgcacaggagagaataatagatgaattggatacggagatggacagcacaaagaaccgtcttgaatttgttcagaaaaaagtgggaatggtaatgaagaaagctggagcaaaaggtcaaatgatgatgatatgtttcttgctcgtcttgttcatcatcctattcgttcttgtcttcttgacctaaagaacagagccgcgggatcttatagatgggagtttaatgtcttacattatcatgtttgtggtgaaacaaatggaatatttacataaggttgtctgttttttcttctcctatccaatcccacatataattttg

SEQ ID NO: 2254 - protein, 245 aa, Arabidopsis thaliana
  peptide (1)..(245): Ceres Seq. ID no. 12665935
  misc_feature (158)..(220): Pfam Name: Pfam Description:  SNARE domain
  misc_feature (1)..(245): NCBI GI NO: 18396813 NR Description: syntaxin SYP6 family; protein id: At1g28490
  misc_feature (1)..(245): NCBI GI NO: 18175840 NR Description: unknown protein [Arabidopsis thaliana]
  misc_feature (14)..(209): NCBI GI NO: 6560768 NR Description: F3M18.7 [Arabidopsis thaliana]
  misc_feature (55)..(245): NCBI GI NO: 34905840 NR Description: putative syntaxin
  misc_feature (1)..(66): NCBI GI NO: 34905840 NR Description: putative syntaxin
  misc_feature (1)..(190): NCBI GI NO: 498040 NR Description: ORF
  misc_feature (3)..(244): NCBI GI NO: 10946800 NR Description: syntaxin 6 [Mus musculus]
  misc_feature (3)..(244): NCBI GI NO: 13928922 NR Description: syntaxin 6 [Rattus norvegicus]
  misc_feature (90)..(242): NCBI GI NO: 24652619 NR Description: Syntaxin 6 CG7736-PC
  misc_feature (3)..(99): NCBI GI NO: 24652619 NR Description: Syntaxin 6 CG7736-PC
MSSAQDPFYIVKEEIQDSIDKLQSTFHKWERISPDMGDQAHVAKELVATCGSIEWQVDELEKAITVAAKDPSWYGIDEAELEKRRRWTSNARTQVRNVKSGVLAGKVSSGAGHASEVRRELMRMPNSGEASRYDQYGGRDDDGFVQSESDRQMLLIKQQDEELDELSKSVQRIGGVGLTIHDELVAQERIIDELDTEMDSTKNRLEFVQKKVGMVMKKAGAKGQMMMICFLLVLFIILFVLVFLT

SEQ ID NO: 2255 - protein, 210 aa, Arabidopsis thaliana
  peptide (1)..(210): Ceres Seq. ID no. 12665936
  misc_feature (123)..(185): Pfam Name: Pfam Description:  SNARE domain
  misc_feature (1)..(210): NCBI GI NO: 18396813 NR Description: syntaxin SYP6 family; protein id: At1g28490
  misc_feature (1)..(210): NCBI GI NO: 18175840 NR Description: unknown protein [Arabidopsis thaliana]
  misc_feature (1)..(174): NCBI GI NO: 6560768 NR Description: F3M18.7 [Arabidopsis thaliana]
  misc_feature (20)..(210): NCBI GI NO: 34905840 NR Description: putative syntaxin
  misc_feature (1)..(31): NCBI GI NO: 34905840 NR Description: putative syntaxin
  misc_feature (1)..(155): NCBI GI NO: 498040 NR Description: ORF
  misc_feature (1)..(209): NCBI GI NO: 10946800 NR Description: syntaxin 6 [Mus musculus]
  misc_feature (1)..(209): NCBI GI NO: 13928922 NR Description: syntaxin 6 [Rattus norvegicus]
  misc_feature (55)..(207): NCBI GI NO: 24652619 NR Description: Syntaxin 6 CG7736-PC
  misc_feature (1)..(64): NCBI GI NO: 24652619 NR Description: Syntaxin 6 CG7736-PC
MGDQAHVAKELVATCGSIEWQVDELEKAITVAAKDPSWYGIDEAELEKRRRWTSNARTQVRNVKSGVLAGKVSSGAGHASEVRRELMRMPNSGEASRYDQYGGRDDDGFVQSESDRQMLLIKQQDEELDELSKSVQRIGGVGLTIHDELVAQERIIDELDTEMDSTKNRLEFVQKKVGMVMKKAGAKGQMMMICFLLVLFIILFVLVFLT

SEQ ID NO: 2256 - protein, 124 aa, Arabidopsis thaliana
  peptide (1)..(124): Ceres Seq. ID no. 12665937
  misc_feature (37)..(99): Pfam Name: Pfam Description:  SNARE domain
  misc_feature (1)..(124): NCBI GI NO: 18396813 NR Description: syntaxin SYP6 family; protein id: At1g28490
  misc_feature (1)..(124): NCBI GI NO: 18175840 NR Description: unknown protein [Arabidopsis thaliana]
  misc_feature (1)..(88): NCBI GI NO: 6560768 NR Description: F3M18.7 [Arabidopsis thaliana]
  misc_feature (1)..(124): NCBI GI NO: 34905840 NR Description: putative syntaxin
  misc_feature (1)..(69): NCBI GI NO: 498040 NR Description: ORF
  misc_feature (1)..(123): NCBI GI NO: 10946800 NR Description: syntaxin 6 [Mus musculus]
  misc_feature (1)..(123): NCBI GI NO: 13928922 NR Description: syntaxin 6 [Rattus norvegicus]
  misc_feature (1)..(121): NCBI GI NO: 24652619 NR Description: Syntaxin 6 CG7736-PC
  misc_feature (1)..(123): NCBI GI NO: 12857762 NR Description: unnamed protein product [Mus musculus]
  misc_feature (1)..(123): NCBI GI NO: 5032131 NR Description: syntaxin 6 [Homo sapiens]
MRMPNSGEASRYDQYGGRDDDGFVQSESDRQMLLIKQQDEELDELSKSVQRIGGVGLTIHDELVAQERIIDELDTEMDSTKNRLEFVQKKVGMVMKKAGAKGQMMMICFLLVLFIILFVLVFLT

SEQ ID NO: 2257 - DNA, 1846 bp, Arabidopsis thaliana
  misc_feature (1)..(1846): Ceres Seq. ID no. 13646141
  misc_feature (88)..(88): n is a, c, t, g, unknown, or other
aattttaagtctttgtccgtttactctcctttgtgtttaagaaacctccttttatagagatatttctcaccattttttatctatatgnagggtatgatataacatctagaggatacaagaggtggtcaggtgcaaaagattgagttttttttataggagagtgtttacgactgaagctatgacggaaacgggtttgattctcatgtggttccctttgataatattgggattgtttgttttgaaatgggtgctgaagagagtgaatgtttggatttatgtgtccaaacttggtgagaaaaaacactatctgccaccaggtgatttgggatggccagtcataggcaacatgtggtcctttcttagagctttcaaaacatctgatcctgaatccttcatccaatcctacatcaccaggtatgggcgtaccgggatttataaagcacacatgtttgggtacccatgtgtactagtaacaacaccagagacttgtaggcgagttctaacagatgatgatgccttccacataggttggccaaaatctaccatgaaactcattggcaggaagtcctttgttggtatctcctttgaagaacacaagaggctcaggcgtttgacttctgctcctgtcaatggccctgaagctctctctgtatacatacagttcattgaagaaactgttaatactgatctagaaaaatggtccaaaatgggagaaatcgagttcttatctcatttgcgtaagcttacgtttaaggtcattatgtacatatttctcagcagtgagagtgagcatgtcatggattcattggaacgggagtataccaaccttaactatggagttcgagcaatgggtattaatcttcctgggtttgcttatcatagagctttgaaggcaaggaaaaaacttgtagctgcctttcagtccatagtgactaaccgaagaaatcaaaggaagcagaatatttcatccaatagaaaagatatgctggataatctaatagatgttaaagatgaaaacggaagagtcttagatgatgaggaaattattgaccttttgttgatgtatcttaatgcgggtcatgaatcttctggacacctcactatgtgggctaccattttgatgcaagaacaccctatgattctgcaaaaggctaaggaagaacaagagaggatcgtaaaaaagagagcaccgggacagaagttgacgcttaaagagacacgtgaaatggtgtatctttctcaggttattgatgagacccttcgagtaattacattctctctgacggccttcagggaagcaaagagtgatgtccaaatggatggctatataattccaaaaggctggaaggttctgacttggtttaggaacgtccatttggaccctgaaatctacccggatccaaagaaatttgatccttcaagatgggagggatacacaccaaaagcaggcacattccttccttttggtttgggaagccacctatgcccgggaaacgatcttgccaagctcgagatttccatttttcttcatcatttcctcctcaaataccgggtggaaaggagcaatcccggatgtccggtgatgttcttgcctcacaatcgacccaaagataattgcctagcaagaatcaccagaacgatgccataatcatcatcttcaaactagtagaccccttagcaaatatataagcttcgtctcaggtttccattgtcttcatcttctcttagaacttgatccaaaccggttcggtttgtgaatttggtttactaggatgtatcaatagtttgaaggatttgtcaaagtaatgttgaaatttttctctggtttagcttcaaatttggttat

SEQ ID NO: 2258 - protein, 489 aa, Arabidopsis thaliana
  peptide (1)..(489): Ceres Seq. ID no. 13646142
  misc_feature (1)..(489): NCBI GI NO: 15225685 NR Description: ent-kaurenoic acid oxidase / cytochrome P450 CYP88A
  misc_feature (1)..(489): NCBI GI NO: 13021856 NR Description: ent-kaurenoic acid hydroxylase
  misc_feature (1)..(485): NCBI GI NO: 15220438 NR Description: ent-kaurenoic acid hydroxylase
  misc_feature (1)..(485): NCBI GI NO: 13021853 NR Description: ent-kaurenoic acid hydroxylase
  misc_feature (20)..(486): NCBI GI NO: 11934677 NR Description: ent-kaurenoic acid oxidase [Cucurbita maxima]
  misc_feature (9)..(486): NCBI GI NO: 27764531 NR Description: ent-kaurenoic acid oxidase [Pisum sativum]
  misc_feature (9)..(486): NCBI GI NO: 27764533 NR Description: ent-kaurenoic acid oxidase [Pisum sativum]
  misc_feature (16)..(486): NCBI GI NO: 13022042 NR Description: ent-kaurenoic acid oxidase [Hordeum vulgare]
  misc_feature (16)..(486): NCBI GI NO: 5915847 NR Description: Cytochrome P450 88A1 (Dwarf3 protein)
  misc_feature (39)..(457): NCBI GI NO: 13878393 NR Description: Cytochrome P450 90C1 (ROTUNDIFOLIA3)
MTETGLILMWFPLIILGLFVLKWVLKRVNVWIYVSKLGEKKHYLPPGDLGWPVIGNMWSFLRAFKTSDPESFIQSYITRYGRTGIYKAHMFGYPCVLVTTPETCRRVLTDDDAFHIGWPKSTMKLIGRKSFVGISFEEHKRLRRLTSAPVNGPEALSVYIQFIEETVNTDLEKWSKMGEIEFLSHLRKLTFKVIMYIFLSSESEHVMDSLEREYTNLNYGVRAMGINLPGFAYHRALKARKKLVAAFQSIVTNRRNQRKQNISSNRKDMLDNLIDVKDENGRVLDDEEIIDLLLMYLNAGHESSGHLTMWATILMQEHPMILQKAKEEQERIVKKRAPGQKLTLKETREMVYLSQVIDETLRVITFSLTAFREAKSDVQMDGYIIPKGWKVLTWFRNVHLDPEIYPDPKKFDPSRWEGYTPKAGTFLPFGLGSHLCPGNDLAKLEISIFLHHFLLKYRVERSNPGCPVMFLPHNRPKDNCLARITRTMP

SEQ ID NO: 2259 - protein, 481 aa, Arabidopsis thaliana
  peptide (1)..(481): Ceres Seq. ID no. 13646143
  misc_feature (1)..(481): NCBI GI NO: 15225685 NR Description: ent-kaurenoic acid oxidase / cytochrome P450 CYP88A
  misc_feature (1)..(481): NCBI GI NO: 13021856 NR Description: ent-kaurenoic acid hydroxylase
  misc_feature (1)..(477): NCBI GI NO: 15220438 NR Description: ent-kaurenoic acid hydroxylase
  misc_feature (1)..(477): NCBI GI NO: 13021853 NR Description: ent-kaurenoic acid hydroxylase
  misc_feature (12)..(478): NCBI GI NO: 11934677 NR Description: ent-kaurenoic acid oxidase [Cucurbita maxima]
  misc_feature (1)..(478): NCBI GI NO: 27764531 NR Description: ent-kaurenoic acid oxidase [Pisum sativum]
  misc_feature (1)..(478): NCBI GI NO: 27764533 NR Description: ent-kaurenoic acid oxidase [Pisum sativum]
  misc_feature (8)..(478): NCBI GI NO: 13022042 NR Description: ent-kaurenoic acid oxidase [Hordeum vulgare]
  misc_feature (8)..(478): NCBI GI NO: 5915847 NR Description: Cytochrome P450 88A1 (Dwarf3 protein)
  misc_feature (31)..(449): NCBI GI NO: 13878393 NR Description: Cytochrome P450 90C1 (ROTUNDIFOLIA3)
MWFPLIILGLFVLKWVLKRVNVWIYVSKLGEKKHYLPPGDLGWPVIGNMWSFLRAFKTSDPESFIQSYITRYGRTGIYKAHMFGYPCVLVTTPETCRRVLTDDDAFHIGWPKSTMKLIGRKSFVGISFEEHKRLRRLTSAPVNGPEALSVYIQFIEETVNTDLEKWSKMGEIEFLSHLRKLTFKVIMYIFLSSESEHVMDSLEREYTNLNYGVRAMGINLPGFAYHRALKARKKLVAAFQSIVTNRRNQRKQNISSNRKDMLDNLIDVKDENGRVLDDEEIIDLLLMYLNAGHESSGHLTMWATILMQEHPMILQKAKEEQERIVKKRAPGQKLTLKETREMVYLSQVIDETLRVITFSLTAFREAKSDVQMDGYIIPKGWKVLTWFRNVHLDPEIYPDPKKFDPSRWEGYTPKAGTFLPFGLGSHLCPGNDLAKLEISIFLHHFLLKYRVERSNPGCPVMFLPHNRPKDNCLARITRTMP

SEQ ID NO: 2260 - protein, 433 aa, Arabidopsis thaliana
  peptide (1)..(433): Ceres Seq. ID no. 13646144
  misc_feature (1)..(433): NCBI GI NO: 15225685 NR Description: ent-kaurenoic acid oxidase / cytochrome P450 CYP88A
  misc_feature (1)..(433): NCBI GI NO: 13021856 NR Description: ent-kaurenoic acid hydroxylase
  misc_feature (1)..(429): NCBI GI NO: 15220438 NR Description: ent-kaurenoic acid hydroxylase
  misc_feature (1)..(429): NCBI GI NO: 13021853 NR Description: ent-kaurenoic acid hydroxylase
  misc_feature (1)..(430): NCBI GI NO: 11934677 NR Description: ent-kaurenoic acid oxidase [Cucurbita maxima]
  misc_feature (1)..(430): NCBI GI NO: 27764531 NR Description: ent-kaurenoic acid oxidase [Pisum sativum]
  misc_feature (1)..(430): NCBI GI NO: 27764533 NR Description: ent-kaurenoic acid oxidase [Pisum sativum]
  misc_feature (1)..(430): NCBI GI NO: 13022042 NR Description: ent-kaurenoic acid oxidase [Hordeum vulgare]
  misc_feature (1)..(430): NCBI GI NO: 5915847 NR Description: Cytochrome P450 88A1 (Dwarf3 protein)
  misc_feature (1)..(401): NCBI GI NO: 13878393 NR Description: Cytochrome P450 90C1 (ROTUNDIFOLIA3)
MWSFLRAFKTSDPESFIQSYITRYGRTGIYKAHMFGYPCVLVTTPETCRRVLTDDDAFHIGWPKSTMKLIGRKSFVGISFEEHKRLRRLTSAPVNGPEALSVYIQFIEETVNTDLEKWSKMGEIEFLSHLRKLTFKVIMYIFLSSESEHVMDSLEREYTNLNYGVRAMGINLPGFAYHRALKARKKLVAAFQSIVTNRRNQRKQNISSNRKDMLDNLIDVKDENGRVLDDEEIIDLLLMYLNAGHESSGHLTMWATILMQEHPMILQKAKEEQERIVKKRAPGQKLTLKETREMVYLSQVIDETLRVITFSLTAFREAKSDVQMDGYIIPKGWKVLTWFRNVHLDPEIYPDPKKFDPSRWEGYTPKAGTFLPFGLGSHLCPGNDLAKLEISIFLHHFLLKYRVERSNPGCPVMFLPHNRPKDNCLARITRTMP

SEQ ID NO: 2261 - DNA, 1148 bp, Arabidopsis thaliana
  misc_feature (1)..(1148): Ceres Seq. ID no. 13622100
atagaccaatacagagatacaaagcaatagaacaacaagaacaagaaaacagagaaaaaaacaatggcttccttgtcggataagttagcggatgcttaccagaacgcaaggccgagatatccgatcgattggttcacgaaacttgctgctcgaaccggtcagcacaaatcagcttgggatgttggtactggcaacggtcaagcagctattggtcttgcagagtatttcgagaaagttacagcaaccgacataaacgaagcacagttaaaactagcggtaaaacacgaaagaatcagttaccatcacactcccacaacaatgtccgaagaccaaatggttgctctagtcggcggagataactccgttgatctaatcgtggcagcacaagccgttcactacttcgatctcgcaccattctacaacgtagcaaaacgtgttcttcgcaaagaaggaggattaatcgcagtttttgtctacaacgacataatcatctctcctgaagttgattccatcatgaaacgtcttgtggactccacgttcccgtttagaactcctgtaatgaatcttgctttcgacggttacaaaacgttgccgtttccgtttgaaagtatagggatgggatcagaagggaagcctataatgcttgacattcctcataagctatcgcttaaagggtttatcggtttcttgagatcgtggcagcccgcaatgaaagctaaagaacgtggagttgagcttgtgactgaagatttgatctccaaatttgaagatgcttggggtgatgatgatgatgttaaagatattttctacaaagctcatatgattgttggaaaactttcggcttcagatatagagcggcatcgaaagagatttgatacgaactgcgtagttacaacactaaaggatcataacaactcggctgttattgcttcagtgactgctgctgcatttgctggagtggcggcttactgtgcttactctgcaaggaagaacagttagatcctttgaaggacaaagaaacggttttctgaatctagtgaatgaaatcttttttattttacatgttgacatgttgtcatgtatttatttatgtcattgatatgagatggttaagtaatatctaaagatttaagagtcacccaacactc

SEQ ID NO: 2262 - protein, 311 aa, Arabidopsis thaliana
  peptide (1)..(311): Ceres Seq. ID no. 15219298
  misc_feature (1)..(311): NCBI GI NO: 18405387 NR Description: expressed protein [Arabidopsis thaliana]
  misc_feature (1)..(264): NCBI GI NO: 15232436 NR Description: embryonic abundant protein -related
  misc_feature (1)..(264): NCBI GI NO: 21594033 NR Description: embryonic abundant protein-like
  misc_feature (1)..(258): NCBI GI NO: 15233061 NR Description: expressed protein [Arabidopsis thaliana]
  misc_feature (1)..(258): NCBI GI NO: 15238280 NR Description: embryonic abundant protein -related
  misc_feature (1)..(256): NCBI GI NO: 15235684 NR Description: expressed protein [Arabidopsis thaliana]
  misc_feature (25)..(256): NCBI GI NO: 20258825 NR Description: unknown protein [Arabidopsis thaliana]
  misc_feature (1)..(161): NCBI GI NO: 34912212 NR Description: P0415C01.8
  misc_feature (171)..(262): NCBI GI NO: 34912212 NR Description: P0415C01.8
  misc_feature (1)..(257): NCBI GI NO: 34910604 NR Description: putative embryonic abundant protein-like
MASLSDKLADAYQNARPRYPIDWFTKLAARTGQHKSAWDVGTGNGQAAIGLAEYFEKVTATDINEAQLKLAVKHERISYHHTPTTMSEDQMVALVGGDNSVDLIVAAQAVHYFDLAPFYNVAKRVLRKEGGLIAVFVYNDIIISPEVDSIMKRLVDSTFPFRTPVMNLAFDGYKTLPFPFESIGMGSEGKPIMLDIPHKLSLKGFIGFLRSWQPAMKAKERGVELVTEDLISKFEDAWGDDDDVKDIFYKAHMIVGKLSASDIERHRKRFDTNCVVTTLKDHNNSAVIASVTAAAFAGVAAYCAYSARKNS

SEQ ID NO: 2263 - protein, 226 aa, Arabidopsis thaliana
  peptide (1)..(226): Ceres Seq. ID no. 15219299
  misc_feature (1)..(226): NCBI GI NO: 18405387 NR Description: expressed protein [Arabidopsis thaliana]
  misc_feature (1)..(179): NCBI GI NO: 15232436 NR Description: embryonic abundant protein -related
  misc_feature (1)..(179): NCBI GI NO: 21594033 NR Description: embryonic abundant protein-like
  misc_feature (1)..(173): NCBI GI NO: 15233061 NR Description: expressed protein [Arabidopsis thaliana]
  misc_feature (1)..(173): NCBI GI NO: 15238280 NR Description: embryonic abundant protein -related
  misc_feature (1)..(171): NCBI GI NO: 15235684 NR Description: expressed protein [Arabidopsis thaliana]
  misc_feature (1)..(171): NCBI GI NO: 20258825 NR Description: unknown protein [Arabidopsis thaliana]
  misc_feature (1)..(76): NCBI GI NO: 34912212 NR Description: P0415C01.8
  misc_feature (86)..(177): NCBI GI NO: 34912212 NR Description: P0415C01.8
  misc_feature (1)..(172): NCBI GI NO: 34910604 NR Description: putative embryonic abundant protein-like
MSEDQMVALVGGDNSVDLIVAAQAVHYFDLAPFYNVAKRVLRKEGGLIAVFVYNDIIISPEVDSIMKRLVDSTFPFRTPVMNLAFDGYKTLPFPFESIGMGSEGKPIMLDIPHKLSLKGFIGFLRSWQPAMKAKERGVELVTEDLISKFEDAWGDDDDVKDIFYKAHMIVGKLSASDIERHRKRFDTNCVVTTLKDHNNSAVIASVTAAAFAGVAAYCAYSARKNS

SEQ ID NO: 2264 - protein, 221 aa, Arabidopsis thaliana
  peptide (1)..(221): Ceres Seq. ID no. 15219300
  misc_feature (1)..(221): NCBI GI NO: 18405387 NR Description: expressed protein [Arabidopsis thaliana]
  misc_feature (1)..(174): NCBI GI NO: 15232436 NR Description: embryonic abundant protein -related
  misc_feature (1)..(174): NCBI GI NO: 21594033 NR Description: embryonic abundant protein-like
  misc_feature (1)..(168): NCBI GI NO: 15233061 NR Description: expressed protein [Arabidopsis thaliana]
  misc_feature (1)..(168): NCBI GI NO: 15238280 NR Description: embryonic abundant protein -related
  misc_feature (1)..(166): NCBI GI NO: 15235684 NR Description: expressed protein [Arabidopsis thaliana]
  misc_feature (1)..(166): NCBI GI NO: 20258825 NR Description: unknown protein [Arabidopsis thaliana]
  misc_feature (1)..(71): NCBI GI NO: 34912212 NR Description: P0415C01.8
  misc_feature (81)..(172): NCBI GI NO: 34912212 NR Description: P0415C01.8
  misc_feature (1)..(167): NCBI GI NO: 34910604 NR Description: putative embryonic abundant protein-like
MVALVGGDNSVDLIVAAQAVHYFDLAPFYNVAKRVLRKEGGLIAVFVYNDIIISPEVDSIMKRLVDSTFPFRTPVMNLAFDGYKTLPFPFESIGMGSEGKPIMLDIPHKLSLKGFIGFLRSWQPAMKAKERGVELVTEDLISKFEDAWGDDDDVKDIFYKAHMIVGKLSASDIERHRKRFDTNCVVTTLKDHNNSAVIASVTAAAFAGVAAYCAYSARKNS

SEQ ID NO: 2265 - DNA, 1104 bp, Arabidopsis thaliana
  misc_feature (1)..(1104): Ceres Seq. ID no. 12393770
ccctctctttaagctctctctctttctgtggctattctctttctctctttctctctgaatccgccgccacgccttcaccatggcctggcttagccgcgtgagaggagtttcgccggtgacaaggctcgcagcgattcgtcgatcttttggatcagcggccgcgttggagtttgactacgactccgatgacgagtacttgtacggagatgatcgccgcctcgcggaaccgaggcttgggttggatggatcggggccggatagaggagtgcagtgggtgcttatgggagcccctggagcatggaggcacgtcttcgccgagaggctctccaaactgcttgaagttcctcacatttccatggggtcccttgtccgtcaagaactcaaccctagatcttctctctacaaggagattgcaagtgctgtaaatgaacgaaagctggttccaaagagtgttgtgtttgcgttgctatcaaagaggctcgaagaaggctatgcaagaggggaaactggtttcattcttcatggcattcctcgcactcgttttcaagccgaaactcttgatcaaatcgctcaaattgaccttgtcgtcaatctcaaaggctctgaagaccatctggtaaaccggaatgctctcaatgaaacagctctgcctcagcaggagttcctcggctctatgttacactcacctgttgcaatcaatgctcggagggagagtgtcggtgtctacgcacaggaggtggaagaatactataggatcagaggaaactgctagactttcatgttggcggtgccacatcagcagacacatggcagggcttgttggcagctttacatctgaagcaggtgaatttgacgacttcacagaagctaactctgtgatgatgaactacaaaacagagctttgctttataaattttgatctttctctctcattttatgggtcttcttaacccctaatatgcaactttttttttgttttctttttctgtaattcaaagttttgcgagagatcaaacgtgatgaggatgataccactaaagcttgtaatgagtctattatatatacaacaaagattttccatctatgaaaaatagttcctatatc

SEQ ID NO: 2266 - protein, 230 aa, Arabidopsis thaliana
  peptide (1)..(230): Ceres Seq. ID no. 12393771
  misc_feature (1)..(225): NCBI GI NO: 30678433 NR Description: adenylate kinase -related [Arabidopsis thaliana]
  misc_feature (1)..(220): NCBI GI NO: 6091724 NR Description: putative adenylate kinase [Arabidopsis thaliana]
  misc_feature (4)..(182): NCBI GI NO: 15228109 NR Description: putative adenylate kinase; protein id: At2g37250
  misc_feature (1)..(182): NCBI GI NO: 29427816 NR Description: Adenylate kinase, chloroplast precursor
  misc_feature (61)..(180): NCBI GI NO: 30687836 NR Description: adenylate kinase -related [Arabidopsis thaliana]
  misc_feature (111)..(182): NCBI GI NO: 6063552 NR Description: ESTs AU065232
  misc_feature (60)..(116): NCBI GI NO: 6063552 NR Description: ESTs AU065232
  misc_feature (66)..(184): NCBI GI NO: 1076067 NR Description: adenylate kinase (EC 2
  misc_feature (66)..(184): NCBI GI NO: 2924292 NR Description: AdK adenylate kinase [Streptomyces coelicolor]
  misc_feature (66)..(182): NCBI GI NO: 27468720 NR Description: adenylate kinase
MAWLSRVRGVSPVTRLAAIRRSFGSAAALEFDYDSDDEYLYGDDRRLAEPRLGLDGSGPDRGVQWVLMGAPGAWRHVFAERLSKLLEVPHISMGSLVRQELNPRSSLYKEIASAVNERKLVPKSVVFALLSKRLEEGYARGETGFILHGIPRTRFQAETLDQIAQIDLVVNLKGSEDHLVNRNALNETALPQQEFLGSMLHSPVAINARRESVGVYAQEVEEYYRIRGNC

SEQ ID NO: 2267 - protein, 163 aa, Arabidopsis thaliana
  peptide (1)..(163): Ceres Seq. ID no. 12393772
  misc_feature (1)..(158): NCBI GI NO: 30678433 NR Description: adenylate kinase -related [Arabidopsis thaliana]
  misc_feature (1)..(153): NCBI GI NO: 6091724 NR Description: putative adenylate kinase [Arabidopsis thaliana]
  misc_feature (1)..(115): NCBI GI NO: 15228109 NR Description: putative adenylate kinase; protein id: At2g37250
  misc_feature (1)..(115): NCBI GI NO: 29427816 NR Description: Adenylate kinase, chloroplast precursor
  misc_feature (1)..(113): NCBI GI NO: 30687836 NR Description: adenylate kinase -related [Arabidopsis thaliana]
  misc_feature (44)..(115): NCBI GI NO: 6063552 NR Description: ESTs AU065232
  misc_feature (1)..(49): NCBI GI NO: 6063552 NR Description: ESTs AU065232
  misc_feature (1)..(117): NCBI GI NO: 1076067 NR Description: adenylate kinase (EC 2
  misc_feature (1)..(117): NCBI GI NO: 2924292 NR Description: AdK adenylate kinase [Streptomyces coelicolor]
  misc_feature (1)..(115): NCBI GI NO: 27468720 NR Description: adenylate kinase
MGAPGAWRHVFAERLSKLLEVPHISMGSLVRQELNPRSSLYKEIASAVNERKLVPKSVVFALLSKRLEEGYARGETGFILHGIPRTRFQAETLDQIAQIDLVVNLKGSEDHLVNRNALNETALPQQEFLGSMLHSPVAINARRESVGVYAQEVEEYYRIRGNC

SEQ ID NO: 2268 - protein, 138 aa, Arabidopsis thaliana
  peptide (1)..(138): Ceres Seq. ID no. 12393773
  misc_feature (1)..(133): NCBI GI NO: 30678433 NR Description: adenylate kinase -related [Arabidopsis thaliana]
  misc_feature (1)..(128): NCBI GI NO: 6091724 NR Description: putative adenylate kinase [Arabidopsis thaliana]
  misc_feature (1)..(90): NCBI GI NO: 15228109 NR Description: putative adenylate kinase; protein id: At2g37250
  misc_feature (1)..(90): NCBI GI NO: 29427816 NR Description: Adenylate kinase, chloroplast precursor
  misc_feature (1)..(88): NCBI GI NO: 30687836 NR Description: adenylate kinase -related [Arabidopsis thaliana]
  misc_feature (19)..(90): NCBI GI NO: 6063552 NR Description: ESTs AU065232
  misc_feature (1)..(24): NCBI GI NO: 6063552 NR Description: ESTs AU065232
  misc_feature (1)..(92): NCBI GI NO: 1076067 NR Description: adenylate kinase (EC 2
  misc_feature (1)..(92): NCBI GI NO: 2924292 NR Description: AdK adenylate kinase [Streptomyces coelicolor]
  misc_feature (1)..(90): NCBI GI NO: 27468720 NR Description: adenylate kinase
MGSLVRQELNPRSSLYKEIASAVNERKLVPKSVVFALLSKRLEEGYARGETGFILHGIPRTRFQAETLDQIAQIDLVVNLKGSEDHLVNRNALNETALPQQEFLGSMLHSPVAINARRESVGVYAQEVEEYYRIRGNC

SEQ ID NO: 2269 - DNA, 566 bp, Arabidopsis thaliana
  misc_feature (1)..(566): Ceres Seq. ID no. 12330413
atcctctcctttctctctctagatttttatcccctttccctctctctctctcctagggttttcgtctctctcgttcactgttaatagtcttaacggagaggtttgattagcctccgggaagattctactgcgaactttggacacatctctctctgccatggcggctgagaagttaagggacttgagccagccgattgacgtcggtgtgctcgatgccactgttgcggccttctttgttaccggatctaaagaagaggtgcttcaatttctctgggttttgacttgttcaaggggctcgaccaatgattagtctatttcgcgggtctgttttattgtttgagcgtcttcttctcgattaggtgtgaggagtaggaattaggagcgtttcgttgttagggttttagcactctgatacatttttgtcttaagacgcttgtttcgggcagctcgagttttcaatttggatttttagggtcctagagttttagtaatgtattgaattacaatggtttagttgctcactgagactcgagattggtgaattaagtcccttgttcttttgtcgc

SEQ ID NO: 2270 - protein, 50 aa, Arabidopsis thaliana
  peptide (1)..(50): Ceres Seq. ID no. 12330414
  misc_feature (1)..(50): NCBI GI NO: 21618204 NR Description: unknown [Arabidopsis thaliana]
  misc_feature (1)..(33): NCBI GI NO: 15237894 NR Description: Exportin1 (XPO1) protein; protein id: At5g17020
MAAEKLRDLSQPIDVGVLDATVAAFFVTGSKEEVLQFLWVLTCSRGSTND

SEQ ID NO: 2271 - DNA, 2709 bp, Arabidopsis thaliana; identical to SEQ ID NO: 2216
  misc_feature (1)..(2709): Ceres Seq. ID no. 13591434

SEQ ID NO: 2272 - protein, 902 aa, Arabidopsis thaliana; identical to SEQ ID NO: 2217
  peptide (1)..(902): Ceres Seq. ID no. 13591435
  misc_feature (536)..(608): Pfam Name: Pfam Description:  Ubiquitin family
  misc_feature (524)..(902): NCBI GI NO: 37534990 NR Description: putative leucine-rich repeat protein
  misc_feature (646)..(900): NCBI GI NO: 22326653 NR Description: leucine rich repeat protein family
  misc_feature (646)..(898): NCBI GI NO: 11357392 NR Description: hypothetical protein F13G24
  misc_feature (663)..(874): NCBI GI NO: 19074817 NR Description: LEUCINE-RICH RAS SUPPRESSOR PROTEIN
  misc_feature (657)..(853): NCBI GI NO: 6677945 NR Description: soc-2 suppressor of clear homolog
  misc_feature (657)..(853): NCBI GI NO: 14423936 NR Description: Leucine-rich repeat protein SHOC-2
  misc_feature (657)..(853): NCBI GI NO: 40788390 NR Description: KIAA0862 protein [Homo sapiens]
  misc_feature (678)..(859): NCBI GI NO: 24215148 NR Description: putative outermembrane protein
  misc_feature (677)..(868): NCBI GI NO: 23124578 NR Description: hypothetical protein [Nostoc punctiforme]
  misc_feature (657)..(853): NCBI GI NO: 20071327 NR Description: Shoc2 protein [Mus musculus]

SEQ ID NO: 2273 - protein, 851 aa, Arabidopsis thaliana; identical to SEQ ID NO: 2218
  peptide (1)..(851): Ceres Seq. ID no. 13591436
  misc_feature (485)..(557): Pfam Name: Pfam Description:  Ubiquitin family
  misc_feature (473)..(851): NCBI GI NO: 37534990 NR Description: putative leucine-rich repeat protein
  misc_feature (595)..(849): NCBI GI NO: 22326653 NR Description: leucine rich repeat protein family
  misc_feature (595)..(847): NCBI GI NO: 11357392 NR Description: hypothetical protein F13G24
  misc_feature (612)..(823): NCBI GI NO: 19074817 NR Description: LEUCINE-RICH RAS SUPPRESSOR PROTEIN
  misc_feature (606)..(802): NCBI GI NO: 6677945 NR Description: soc-2 suppressor of clear homolog
  misc_feature (606)..(802): NCBI GI NO: 14423936 NR Description: Leucine-rich repeat protein SHOC-2
  misc_feature (606)..(802): NCBI GI NO: 40788390 NR Description: KIAA0862 protein [Homo sapiens]
  misc_feature (627)..(808): NCBI GI NO: 24215148 NR Description: putative outermembrane protein
  misc_feature (626)..(817): NCBI GI NO: 23124578 NR Description: hypothetical protein [Nostoc punctiforme]
  misc_feature (606)..(802): NCBI GI NO: 20071327 NR Description: Shoc2 protein [Mus musculus]

SEQ ID NO: 2274 - protein, 813 aa, Arabidopsis thaliana; identical to SEQ ID NO: 2219
  peptide (1)..(813): Ceres Seq. ID no. 13591437
  misc_feature (447)..(519): Pfam Name: Pfam Description:  Ubiquitin family
  misc_feature (435)..(813): NCBI GI NO: 37534990 NR Description: putative leucine-rich repeat protein
  misc_feature (557)..(811): NCBI GI NO: 22326653 NR Description: leucine rich repeat protein family
  misc_feature (557)..(809): NCBI GI NO: 11357392 NR Description: hypothetical protein F13G24
  misc_feature (574)..(785): NCBI GI NO: 19074817 NR Description: LEUCINE-RICH RAS SUPPRESSOR PROTEIN
  misc_feature (568)..(764): NCBI GI NO: 6677945 NR Description: soc-2 suppressor of clear homolog
  misc_feature (568)..(764): NCBI GI NO: 14423936 NR Description: Leucine-rich repeat protein SHOC-2
  misc_feature (568)..(764): NCBI GI NO: 40788390 NR Description: KIAA0862 protein [Homo sapiens]
  misc_feature (589)..(770): NCBI GI NO: 24215148 NR Description: putative outermembrane protein
  misc_feature (588)..(779): NCBI GI NO: 23124578 NR Description: hypothetical protein [Nostoc punctiforme]
  misc_feature (568)..(764): NCBI GI NO: 20071327 NR Description: Shoc2 protein [Mus musculus]

SEQ ID NO: 2275 - DNA, 1376 bp, Arabidopsis thaliana
  misc_feature (1)..(1376): Ceres Seq. ID no. 13575567
gcccctttgcgtgtttcagcttcttctttatgatctaattcatgtctatgtttcgtttgattctttgttcaattctgaattgagaaaatggcgattcgagatctgtctcttcggttttttagttcgactgatttgggaatgtgaagagatcagattgatttgttgacagagtcttgggggttttcaatcttattcctctagattttcgaaattcgattcctttacatcagatttcgcttaattctctgtcctaggtacaacaagaatggaagaagagtatgagagtcgtcgattgaggagatgggaagagttggacactgacatcttagtaagaattttccagaagtttagcgtctttgagttgacttcgggattagctcatgtttgtagaggatggagagctgcttgttgcgatccgattctttggaagacggtggatttgtcaaacatgagatctagtttcatcaagatcccattagagccttatgtctatgtggaacgccgatctgatgaggccctaacccgcatcctgaaactctccatgaaccttagcggaggaagcacgaggaccttgatttttcatttcaacttgttcttgagtgatgatcagcttacttacaccgcagaaaggtgtccagggttgagacgggtcgtcctaccggcttggaacagaataaagaagactggtatatgcaaagcgataagaatctggaaagatctagagtcactaacaatgccaagcatcgcaaacccgccttatctcttaacagaaattgccaagaactgcaagaattttaaagagctgaagatcatgggtccattcgaggtcttctttgcaaacacgctcatcacttgcctcccaaacatcaaaacactcagcatcagatgctcggcgataaagcgggaagcactgatgaaaatccttgacggattaccaagccttgaagtgctcaacatatcacactctcacctagtggagtacagcggttggcagcctcagcagaaggtgattgttagagagctcgataagacgataatggagaaaacagcaaggctaaagaaattcttgacttgcatggatcacaagacgtgtgtgatgtgtcagaggactgaaaacgatgaagggattgtgagatggtacaagtatgaggaaggagactggaaggttgatgaagtgagttctcttcatctttgatgtttctgctgtgatcattctctgtgaaggacttaacttgttattgttctcatctttgactgttgaattgtttatttctttgtgttgtttgttttgatttgaatcgtattatgtgtatatatctgtaggctatgccaatgaatgtatgtagtgatcaacttttgatcaccaccaaccttgc

SEQ ID NO: 2276 - protein, 309 aa, Arabidopsis thaliana
  peptide (1)..(309): Ceres Seq. ID no. 13575568
  misc_feature (1)..(309): NCBI GI NO: 15229043 NR Description: F-box protein family [Arabidopsis thaliana]
  misc_feature (1)..(309): NCBI GI NO: 21618163 NR Description: unknown [Arabidopsis thaliana]
  misc_feature (111)..(309): NCBI GI NO: 37535806 NR Description: putative Rhizobium-induced nodule development associatedprotein
  misc_feature (59)..(307): NCBI GI NO: 15234238 NR Description: F-box protein family [Arabidopsis thaliana]
  misc_feature (4)..(63): NCBI GI NO: 15234238 NR Description: F-box protein family [Arabidopsis thaliana]
  misc_feature (1)..(231): NCBI GI NO: 18412953 NR Description: F-box protein family, AtFBL9/AtFBL23
  misc_feature (12)..(222): NCBI GI NO: 37718854 NR Description: hypothetical protein
  misc_feature (1)..(231): NCBI GI NO: 18412951 NR Description: F-box protein family, AtFBL22
  misc_feature (11)..(231): NCBI GI NO: 30692594 NR Description: predicted protein [Arabidopsis thaliana]
  misc_feature (13)..(231): NCBI GI NO: 18424042 NR Description: SKP1 interacting partner 1 (SKIP1)
MEEEYESRRLRRWEELDTDILVRIFQKFSVFELTSGLAHVCRGWRAACCDPILWKTVDLSNMRSSFIKIPLEPYVYVERRSDEALTRILKLSMNLSGGSTRTLIFHFNLFLSDDQLTYTAERCPGLRRVVLPAWNRIKKTGICKAIRIWKDLESLTMPSIANPPYLLTEIAKNCKNFKELKIMGPFEVFFANTLITCLPNIKTLSIRCSAIKREALMKILDGLPSLEVLNISHSHLVEYSGWQPQQKVIVRELDKTIMEKTARLKKFLTCMDHKTCVMCQRTENDEGIVRWYKYEEGDWKVDEVSSLHL

SEQ ID NO: 2277 - protein, 248 aa, Arabidopsis thaliana
  peptide (1)..(248): Ceres Seq. ID no. 13575569
  misc_feature (1)..(248): NCBI GI NO: 15229043 NR Description: F-box protein family [Arabidopsis thaliana]
  misc_feature (1)..(248): NCBI GI NO: 21618163 NR Description: unknown [Arabidopsis thaliana]
  misc_feature (50)..(248): NCBI GI NO: 37535806 NR Description: putative Rhizobium-induced nodule development associatedprotein
  misc_feature (1)..(246): NCBI GI NO: 15234238 NR Description: F-box protein family [Arabidopsis thaliana]
  misc_feature (1)..(170): NCBI GI NO: 18412953 NR Description: F-box protein family, AtFBL9/AtFBL23
  misc_feature (1)..(161): NCBI GI NO: 37718854 NR Description: hypothetical protein
  misc_feature (1)..(170): NCBI GI NO: 18412951 NR Description: F-box protein family, AtFBL22
  misc_feature (1)..(170): NCBI GI NO: 30692594 NR Description: predicted protein [Arabidopsis thaliana]
  misc_feature (1)..(170): NCBI GI NO: 18424042 NR Description: SKP1 interacting partner 1 (SKIP1)
  misc_feature (1)..(170): NCBI GI NO: 18413178 NR Description: F-box protein family, AtFBW2
MRSSFIKIPLEPYVYVERRSDEALTRILKLSMNLSGGSTRTLIFHFNLFLSDDQLTYTAERCPGLRRVVLPAWNRIKKTGICKAIRIWKDLESLTMPSIANPPYLLTEIAKNCKNFKELKIMGPFEVFFANTLITCLPNIKTLSIRCSAIKREALMKILDGLPSLEVLNISHSHLVEYSGWQPQQKVIVRELDKTIMEKTARLKKFLTCMDHKTCVMCQRTENDEGIVRWYKYEEGDWKVDEVSSLHL

SEQ ID NO: 2278 - protein, 217 aa, Arabidopsis thaliana
  peptide (1)..(217): Ceres Seq. ID no. 13575570
  misc_feature (1)..(217): NCBI GI NO: 15229043 NR Description: F-box protein family [Arabidopsis thaliana]
  misc_feature (1)..(217): NCBI GI NO: 21618163 NR Description: unknown [Arabidopsis thaliana]
  misc_feature (19)..(217): NCBI GI NO: 37535806 NR Description: putative Rhizobium-induced nodule development associatedprotein
  misc_feature (1)..(215): NCBI GI NO: 15234238 NR Description: F-box protein family [Arabidopsis thaliana]
  misc_feature (1)..(139): NCBI GI NO: 18412953 NR Description: F-box protein family, AtFBL9/AtFBL23
  misc_feature (1)..(130): NCBI GI NO: 37718854 NR Description: hypothetical protein
  misc_feature (1)..(139): NCBI GI NO: 18412951 NR Description: F-box protein family, AtFBL22
  misc_feature (1)..(139): NCBI GI NO: 30692594 NR Description: predicted protein [Arabidopsis thaliana]
  misc_feature (1)..(139): NCBI GI NO: 18424042 NR Description: SKP1 interacting partner 1 (SKIP1)
  misc_feature (1)..(139): NCBI GI NO: 18413178 NR Description: F-box protein family, AtFBW2
MNLSGGSTRTLIFHFNLFLSDDQLTYTAERCPGLRRVVLPAWNRIKKTGICKAIRIWKDLESLTMPSIANPPYLLTEIAKNCKNFKELKIMGPFEVFFANTLITCLPNIKTLSIRCSAIKREALMKILDGLPSLEVLNISHSHLVEYSGWQPQQKVIVRELDKTIMEKTARLKKFLTCMDHKTCVMCQRTENDEGIVRWYKYEEGDWKVDEVSSLHL

SEQ ID NO: 2279 - DNA, 1187 bp, Arabidopsis thaliana
  misc_feature (1)..(1187): Ceres Seq. ID no. 12384786
atcattctcggtttaactgaaacacataataaaacaaagagaaagagatataatatgggtgggtgggcaatcgcagtacacggtggtgccggtatcgaccctaatcttccggcagagagacaagaagaggcgaaacagcttttaactcgttgtctcaacctcggcataatagctttgcgttccaatgtttccgccattgacgtcgttgagctcgtcattagagaattggagacggatcctctgtttaattcaggccgtggatcttctttgacggagaaaggaacggttgagatggaagctagcattatggacggtacgaagagacgatgcggtgccgtttcggggataaccaccgtgaaaaatcctatatctcttgctcgtctcgtcatggacaaatctccccactcttaccttgctttctcaggtgcagaggatttcgcccgcaaacagggagttgaaattgtggacaacgagtactttgtcacggacgacaacgtaggaatgctcaagttggccaaggaagctaactccatcttgtttgattaccggattccgccgatgggatgtgccggcgcagctgcgaccgacagtccaatccaaatgaacggtcttccgatcagcatttacgcaccggagacagtcgggtgcgttgtggttgacgggaaaggacattgtgccgccgggacatccacgggtggtttaatgaacaagatgatgggaaggattggtgactcgccgctgataggagccgggacgtatgcgtcggagttttgtggtgtgtcgtgtaccggagaaggagaagccattataagagcaaccctagctcgtgatgtgtcagctgttatggagtataaaggacttaacctccaagaagcggttgattacgtcatcaagcatcgacttgacgaagggttcgctggactcattgctgtctcgaataaaggagaggtggtttgtggttttaactctaatgggatgttcaggggatgtgcaactgaggatggattcatggacgttgctatttgggagtgagaaatattttagattaagaaaatgtcttactagtatttaatcagtcatcgctctattaatttggttattcattatcataaagctggagtagtaaatttagttctgtcgttatcaccagtcctatattgatttgtgtttaatgcggtttcaaatgg

SEQ ID NO: 2280 - protein, 343 aa, Arabidopsis thaliana
  peptide (1)..(343): Ceres Seq. ID no. 12384787
  misc_feature (20)..(343): Pfam Name: Pfam Description:  Asparaginase
  misc_feature (19)..(343): NCBI GI NO: 18401029 NR Description: putative L-asparaginase; protein id: At3g16150
  misc_feature (19)..(343): NCBI GI NO: 29420787 NR Description: L-asparaginase [Glycine max]
  misc_feature (19)..(343): NCBI GI NO: 23428804 NR Description: L-asparaginase [Glycine max]
  misc_feature (19)..(343): NCBI GI NO: 10241428 NR Description: putative l-asparaginase
  misc_feature (19)..(343): NCBI GI NO: 11066973 NR Description: asparaginase [Hordeum vulgare]
  misc_feature (19)..(342): NCBI GI NO: 231573 NR Description: L-ASPARAGINASE (L-ASPARAGINE AMIDOHYDROLASE)
  misc_feature (19)..(342): NCBI GI NO: 6685231 NR Description: L-asparaginase (L-asparagine amidohydrolase)
  misc_feature (19)..(342): NCBI GI NO: 1703447 NR Description: L-ASPARAGINASE (L-ASPARAGINE AMIDOHYDROLASE)
  misc_feature (168)..(343): NCBI GI NO: 26451560 NR Description: putative L-asparaginase [Arabidopsis thaliana]
  misc_feature (19)..(342): NCBI GI NO: 15241528 NR Description: asparaginase; protein id: At5g08100
IILGLTETHNKTKRKRYNMGGWAIAVHGGAGIDPNLPAERQEEAKQLLTRCLNLGIIALRSNVSAIDVVELVIRELETDPLFNSGRGSSLTEKGTVEMEASIMDGTKRRCGAVSGITTVKNPISLARLVMDKSPHSYLAFSGAEDFARKQGVEIVDNEYFVTDDNVGMLKLAKEANSILFDYRIPPMGCAGAAATDSPIQMNGLPISIYAPETVGCVVVDGKGHCAAGTSTGGLMNKMMGRIGDSPLIGAGTYASEFCGVSCTGEGEAIIRATLARDVSAVMEYKGLNLQEAVDYVIKHRLDEGFAGLIAVSNKGEVVCGFNSNGMFRGCATEDGFMDVAIWE

SEQ ID NO: 2281 - protein, 325 aa, Arabidopsis thaliana
  peptide (1)..(325): Ceres Seq. ID no. 12384788
  misc_feature (2)..(325): Pfam Name: Pfam Description:  Asparaginase
  misc_feature (1)..(325): NCBI GI NO: 18401029 NR Description: putative L-asparaginase; protein id: At3g16150
  misc_feature (1)..(325): NCBI GI NO: 29420787 NR Description: L-asparaginase [Glycine max]
  misc_feature (1)..(325): NCBI GI NO: 23428804 NR Description: L-asparaginase [Glycine max]
  misc_feature (1)..(325): NCBI GI NO: 10241428 NR Description: putative l-asparaginase
  misc_feature (1)..(325): NCBI GI NO: 11066973 NR Description: asparaginase [Hordeum vulgare]
  misc_feature (1)..(324): NCBI GI NO: 231573 NR Description: L-ASPARAGINASE (L-ASPARAGINE AMIDOHYDROLASE)
  misc_feature (1)..(324): NCBI GI NO: 6685231 NR Description: L-asparaginase (L-asparagine amidohydrolase)
  misc_feature (1)..(324): NCBI GI NO: 1703447 NR Description: L-ASPARAGINASE (L-ASPARAGINE AMIDOHYDROLASE)
  misc_feature (150)..(325): NCBI GI NO: 26451560 NR Description: putative L-asparaginase [Arabidopsis thaliana]
  misc_feature (1)..(324): NCBI GI NO: 15241528 NR Description: asparaginase; protein id: At5g08100
MGGWAIAVHGGAGIDPNLPAERQEEAKQLLTRCLNLGIIALRSNVSAIDVVELVIRELETDPLFNSGRGSSLTEKGTVEMEASIMDGTKRRCGAVSGITTVKNPISLARLVMDKSPHSYLAFSGAEDFARKQGVEIVDNEYFVTDDNVGMLKLAKEANSILFDYRIPPMGCAGAAATDSPIQMNGLPISIYAPETVGCVVVDGKGHCAAGTSTGGLMNKMMGRIGDSPLIGAGTYASEFCGVSCTGEGEAIIRATLARDVSAVMEYKGLNLQEAVDYVIKHRLDEGFAGLIAVSNKGEVVCGFNSNGMFRGCATEDGFMDVAIWE

SEQ ID NO: 2282 - protein, 246 aa, Arabidopsis thaliana
  peptide (1)..(246): Ceres Seq. ID no. 12384789
  misc_feature (1)..(246): Pfam Name: Pfam Description:  Asparaginase
  misc_feature (1)..(246): NCBI GI NO: 18401029 NR Description: putative L-asparaginase; protein id: At3g16150
  misc_feature (1)..(246): NCBI GI NO: 29420787 NR Description: L-asparaginase [Glycine max]
  misc_feature (1)..(246): NCBI GI NO: 23428804 NR Description: L-asparaginase [Glycine max]
  misc_feature (1)..(246): NCBI GI NO: 10241428 NR Description: putative l-asparaginase
  misc_feature (1)..(246): NCBI GI NO: 11066973 NR Description: asparaginase [Hordeum vulgare]
  misc_feature (1)..(245): NCBI GI NO: 231573 NR Description: L-ASPARAGINASE (L-ASPARAGINE AMIDOHYDROLASE)
  misc_feature (1)..(245): NCBI GI NO: 6685231 NR Description: L-asparaginase (L-asparagine amidohydrolase)
  misc_feature (1)..(245): NCBI GI NO: 1703447 NR Description: L-ASPARAGINASE (L-ASPARAGINE AMIDOHYDROLASE)
  misc_feature (71)..(246): NCBI GI NO: 26451560 NR Description: putative L-asparaginase [Arabidopsis thaliana]
  misc_feature (1)..(245): NCBI GI NO: 15241528 NR Description: asparaginase; protein id: At5g08100
MEASIMDGTKRRCGAVSGITTVKNPISLARLVMDKSPHSYLAFSGAEDFARKQGVEIVDNEYFVTDDNVGMLKLAKEANSILFDYRIPPMGCAGAAATDSPIQMNGLPISIYAPETVGCVVVDGKGHCAAGTSTGGLMNKMMGRIGDSPLIGAGTYASEFCGVSCTGEGEAIIRATLARDVSAVMEYKGLNLQEAVDYVIKHRLDEGFAGLIAVSNKGEVVCGFNSNGMFRGCATEDGFMDVAIWE

SEQ ID NO: 2283 - DNA, 909 bp, Arabidopsis thaliana
  misc_feature (1)..(909): Ceres Seq. ID no. 13489143
caaagagtataaaaaatatctcatcgagcttgaaaataattaatcacttgctaattctaagcttcttctctttccaaaaatggcgtcatcatcggctttagctctcaggagacttctctcttcttccaccgtcgccgtccctcgcgccttaagagccgttcgtccggtggctgcttcatctcgcctcttcaataccaacgccgccagaaactatgaagacggtgtcgataggaaccatcactcaaaccgacatgtttctcgccacggcggcgatttcttctcacatatactcgatccgtttactccaacgagaagcttgagccagatgctgaatttcatggaccaggtaagcgaaatccctttggtatcagctactcgtggaatgggagcttctggagttagacgtggttggaacgtgaaagagaaagacgacgcgttgcatctaaggatagatatgccgggactaagcagagaggatgtgaaattggctttggaacagaacacattggtgattagaggagaaggggaaacagaggagggagaagatgtttctggagatggacggaggtttacgagtaggattgagttaccggagaaagtatacaagactgatgagattaaggcggaaatgaagaatggtgtgttgaaagtggtgattccaaagattaaagaggatgagcgtaacaatattcgtcacataaacgttgactagagtgttttattttggattgtttgagatggaatggaagtaagtgagtgaatttgtgaactttaaggtgtcctttggtgaatcaaggagaatgacatttcccacggtcctatgtgttcgggattttgacttttttcgttacatcaatgatctatgtacgtttgactactttcatatcataggttcggattttgtttccc

SEQ ID NO: 2284 - protein, 210 aa, Arabidopsis thaliana
  peptide (1)..(210): Ceres Seq. ID no. 13489144
  misc_feature (1)..(210): NCBI GI NO: 15242086 NR Description: heat shock protein, putative
  misc_feature (1)..(210): NCBI GI NO: 21554988 NR Description: mitochondrial heat shock 22 kd protein-like
  misc_feature (4)..(210): NCBI GI NO: 15234969 NR Description: mitochondrion-localized small heat shock protein
  misc_feature (4)..(210): NCBI GI NO: 2326354 NR Description: LMW heat shock protein [Arabidopsis thaliana]
  misc_feature (36)..(210): NCBI GI NO: 2326361 NR Description: hypothetical protein [Arabidopsis thaliana]
  misc_feature (4)..(210): NCBI GI NO: 7159338 NR Description: LMW heat shock protein [Euphorbia esula]
  misc_feature (4)..(210): NCBI GI NO: 1170368 NR Description: Heat shock 22 kDa protein, mitochondrial precursor
  misc_feature (5)..(210): NCBI GI NO: 7441310 NR Description: heat shock protein MTSHP precursor
  misc_feature (5)..(210): NCBI GI NO: 123564 NR Description: Small heat shock protein, chloroplast precursor
  misc_feature (8)..(210): NCBI GI NO: 7441311 NR Description: heat shock protein hsp22 precursor
MASSSALALRRLLSSSTVAVPRALRAVRPVAASSRLFNTNAARNYEDGVDRNHHSNRHVSRHGGDFFSHILDPFTPTRSLSQMLNFMDQVSEIPLVSATRGMGASGVRRGWNVKEKDDALHLRIDMPGLSREDVKLALEQNTLVIRGEGETEEGEDVSGDGRRFTSRIELPEKVYKTDEIKAEMKNGVLKVVIPKIKEDERNNIRHINVD

SEQ ID NO: 2285 - protein, 128 aa, Arabidopsis thaliana
  peptide (1)..(128): Ceres Seq. ID no. 13489145
  misc_feature (1)..(128): NCBI GI NO: 15242086 NR Description: heat shock protein, putative
  misc_feature (1)..(128): NCBI GI NO: 21554988 NR Description: mitochondrial heat shock 22 kd protein-like
  misc_feature (1)..(128): NCBI GI NO: 15234969 NR Description: mitochondrion-localized small heat shock protein
  misc_feature (1)..(128): NCBI GI NO: 2326354 NR Description: LMW heat shock protein [Arabidopsis thaliana]
  misc_feature (1)..(128): NCBI GI NO: 2326361 NR Description: hypothetical protein [Arabidopsis thaliana]
  misc_feature (1)..(128): NCBI GI NO: 7159338 NR Description: LMW heat shock protein [Euphorbia esula]
  misc_feature (1)..(128): NCBI GI NO: 1170368 NR Description: Heat shock 22 kDa protein, mitochondrial precursor
  misc_feature (1)..(128): NCBI GI NO: 7441310 NR Description: heat shock protein MTSHP precursor
  misc_feature (1)..(128): NCBI GI NO: 123564 NR Description: Small heat shock protein, chloroplast precursor
  misc_feature (1)..(128): NCBI GI NO: 7441311 NR Description: heat shock protein hsp22 precursor
MLNFMDQVSEIPLVSATRGMGASGVRRGWNVKEKDDALHLRIDMPGLSREDVKLALEQNTLVIRGEGETEEGEDVSGDGRRFTSRIELPEKVYKTDEIKAEMKNGVLKVVIPKIKEDERNNIRHINVD

SEQ ID NO: 2286 - protein, 124 aa, Arabidopsis thaliana
  peptide (1)..(124): Ceres Seq. ID no. 13489146
  misc_feature (1)..(124): NCBI GI NO: 15242086 NR Description: heat shock protein, putative
  misc_feature (1)..(124): NCBI GI NO: 21554988 NR Description: mitochondrial heat shock 22 kd protein-like
  misc_feature (1)..(124): NCBI GI NO: 15234969 NR Description: mitochondrion-localized small heat shock protein
  misc_feature (1)..(124): NCBI GI NO: 2326354 NR Description: LMW heat shock protein [Arabidopsis thaliana]
  misc_feature (1)..(124): NCBI GI NO: 2326361 NR Description: hypothetical protein [Arabidopsis thaliana]
  misc_feature (1)..(124): NCBI GI NO: 7159338 NR Description: LMW heat shock protein [Euphorbia esula]
  misc_feature (1)..(124): NCBI GI NO: 1170368 NR Description: Heat shock 22 kDa protein, mitochondrial precursor
  misc_feature (1)..(124): NCBI GI NO: 7441310 NR Description: heat shock protein MTSHP precursor
  misc_feature (1)..(124): NCBI GI NO: 123564 NR Description: Small heat shock protein, chloroplast precursor
  misc_feature (1)..(124): NCBI GI NO: 7441311 NR Description: heat shock protein hsp22 precursor
MDQVSEIPLVSATRGMGASGVRRGWNVKEKDDALHLRIDMPGLSREDVKLALEQNTLVIRGEGETEEGEDVSGDGRRFTSRIELPEKVYKTDEIKAEMKNGVLKVVIPKIKEDERNNIRHINVD

SEQ ID NO: 2287 - DNA, 1076 bp, Arabidopsis thaliana
  misc_feature (1)..(1076): Ceres Seq. ID no. 13489405
aaatgtgtataaatgaaatctctttcttctttagaattactgtttctctccgctacaaataccagatttttctctctctcgtcgaaagcaaaacagtctcctttctctatcttctgctcatatcagccattgacacagttgctttgggtttccctcaaacggcgccgattgtctggattttgaccactgatggccttagatcaatcttttgaagatgctgctttacttggagaactctatggagaaggtgcattttgtttcaagagcaagaaacctgaacccattacagtctcggttccttctgatgatactgatgattcgaattttgactgcaatatttgcttagactcggtgcaagaacctgttgtgactctctgtggtcacctcttttgctggccttgtattcacaaatggcttgatgtacagagcttctcaacaagtgatgaataccaaagacatagacagtgtcctgtttgtaaatctaaagtttctcattctactttggttcctttgtatggtagaggccgttgtactactcaggaggaaggtaaaaacagtgtgcctaaaagacccgtaggaccggtttatcggcttgaaatgccgaattcaccttatgcaagtactgatctgcggttatcacaacgggttcatttcaatagcccacaggaaggttactaccctgtctcaggggtgatgagctcgaacagtttatcatactctgctgttttggatccggtgatggtgatggttggagaaatggtagctacgaggttgtttggaacacgagtgatggatagatttgcgtatccggacacttacaatctcgcagggactagcgggccgaggatgagaaggcggataatgcaggcagataaatcgctgggaagaatcttcttcttctttatgtgttgtgttgttctgtgtcttctcttgttttaggttttcatagctagcttggttctgctactgttcagtttcttcaggtgtaaggaaaacatagtcaaagaaatgtacatttgtgttggaaacaaatcaaagttgcttaatgttgaggaatgaggagtttatgttgggtt

SEQ ID NO: 2288 - protein, 249 aa, Arabidopsis thaliana
  peptide (1)..(249): Ceres Seq. ID no. 13489406
  misc_feature (48)..(96): Pfam Name: RING finger Pfam Description: Zinc finger, C3HC4 type
  misc_feature (1)..(249): NCBI GI NO: 15236326 NR Description: E3 ubiquitin ligase, RMA1 [Arabidopsis thaliana]
  misc_feature (35)..(249): NCBI GI NO: 22795037 NR Description: putative RING protein [Populus x canescens]
  misc_feature (39)..(169): NCBI GI NO: 15235242 NR Description: zinc finger
  misc_feature (181)..(249): NCBI GI NO: 15235242 NR Description: zinc finger
  misc_feature (19)..(249): NCBI GI NO: 30687607 NR Description: zinc finger
  misc_feature (19)..(240): NCBI GI NO: 7488309 NR Description: RING zinc finger protein F27G19
  misc_feature (46)..(249): NCBI GI NO: 38346627 NR Description: OSJNBa0074L08.21
  misc_feature (38)..(141): NCBI GI NO: 18394721 NR Description: zinc finger
  misc_feature (28)..(144): NCBI GI NO: 21912604 NR Description: putative ubiquitin ligase [Taenia solium]
  misc_feature (14)..(139): NCBI GI NO: 31215747 NR Description: ENSANGP00000012621 [Anopheles gambiae]
MALDQSFEDAALLGELYGEGAFCFKSKKPEPITVSVPSDDTDDSNFDCNICLDSVQEPVVTLCGHLFCWPCIHKWLDVQSFSTSDEYQRHRQCPVCKSKVSHSTLVPLYGRGRCTTQEEGKNSVPKRPVGPVYRLEMPNSPYASTDLRLSQRVHFNSPQEGYYPVSGVMSSNSLSYSAVLDPVMVMVGEMVATRLFGTRVMDRFAYPDTYNLAGTSGPRMRRRIMQADKSLGRIFFFFMCCVVLCLLLF

SEQ ID NO: 2289 - DNA, 1013 bp, Arabidopsis thaliana
  misc_feature (1)..(1013): Ceres Seq. ID no. 12420931
agtgaaccggagggagacagcgagatgaggccggagatagttctgttcggcgactcgatcacggcgcagtcttttaggtccggcggttggggatctgctcttgccgacgcttactctcgcaaggctgatgttgtggttcgaggctacggcggctacaacacccgatgggctctcttcttgcttcatcacatcttccctctcggctcttcgtctcctcctgttgctacgacgatattcttcggtgcaaacgatgcagctctcaaaggaagaaccagtgatagacaacatgtgccggtggaagagtacacagataatgtcagaaagattgttcagcatttgaagaaatgttcacctacaatgctaattgtgcttataactccaccaccaattgatgaagctggacgtcaaagttatgcagaatcaatctacggtgagaaagctatgaaagagcctgagagaacaaacgaaacaacaggggtatatgcacaacattgtgttgcattggccgaggaactcggtctgcgatgtgtcaacttatggtctaagatgcaggaaaccaatgattggcagaaaaagtacctaagtgatgggctccatctcacgcctgaaggcaatggggtagtttttgatgaagtctcgagagtttttagagaagcttggctctctcccgaagaaatgccgtttgatttcccccatcattcgcatatcgatggtaaaaacccatcgaaagcttttgaagagcgttgcttataacgatcatccccaaattcatgagcaggtttgttttgatttaaattcatgaacacgtttcaatgttgtgatttagaaaactctcggatgtgaataaatacctaaaaagtgcatcatcactagagatcgttttcaagagaaatgaacttatgatgtacttactatatgttgtgacttttgacttatgtacctgcactagctttctatcttccttgctatatatttcagtctgaaagattttttttaatcttcttttcaatgac

SEQ ID NO: 2290 - protein, 250 aa, Arabidopsis thaliana
  peptide (1)..(250): Ceres Seq. ID no. 12420932
  misc_feature (13)..(212): Pfam Name: Pfam Description:  GDSL-like Lipase/Acylhydrolase
  misc_feature (9)..(250): NCBI GI NO: 15242002 NR Description: putative protein; protein id: At5g62930
  misc_feature (9)..(246): NCBI GI NO: 37535366 NR Description: putative esterase
  misc_feature (9)..(247): NCBI GI NO: 15242539 NR Description: putative protein; protein id: At5g45920.1
  misc_feature (9)..(247): NCBI GI NO: 38454102 NR Description: At5g45920 [Arabidopsis thaliana]
  misc_feature (9)..(246): NCBI GI NO: 34903948 NR Description: OSJNBa0038J17.19
  misc_feature (9)..(250): NCBI GI NO: 13161403 NR Description: CPRD49 [Vigna unguiculata]
  misc_feature (5)..(212): NCBI GI NO: 27478045 NR Description: hypothetical protein XP_209490 [Homo sapiens]
  misc_feature (10)..(237): NCBI GI NO: 21554235 NR Description: CPRD49 [Arabidopsis thaliana]
  misc_feature (10)..(237): NCBI GI NO: 18399151 NR Description: expressed protein; protein id: At3g11210
  misc_feature (5)..(209): NCBI GI NO: 27754071 NR Description: hypothetical protein 4833421E05Rik
SEPEGDSEMRPEIVLFGDSITAQSFRSGGWGSALADAYSRKADVVVRGYGGYNTRWALFLLHHIFPLGSSSPPVATTIFFGANDAALKGRTSDRQHVPVEEYTDNVRKIVQHLKKCSPTMLIVLITPPPIDEAGRQSYAESIYGEKAMKEPERTNETTGVYAQHCVALAEELGLRCVNLWSKMQETNDWQKKYLSDGLHLTPEGNGVVFDEVSRVFREAWLSPEEMPFDFPHHSHIDGKNPSKAFEERCL

SEQ ID NO: 2291 - protein, 242 aa, Arabidopsis thaliana
  peptide (1)..(242): Ceres Seq. ID no. 12420933
  misc_feature (5)..(204): Pfam Name: Pfam Description:  GDSL-like Lipase/Acylhydrolase
  misc_feature (1)..(242): NCBI GI NO: 15242002 NR Description: putative protein; protein id: At5g62930
  misc_feature (1)..(238): NCBI GI NO: 37535366 NR Description: putative esterase
  misc_feature (1)..(239): NCBI GI NO: 15242539 NR Description: putative protein; protein id: At5g45920.1
  misc_feature (1)..(239): NCBI GI NO: 38454102 NR Description: At5g45920 [Arabidopsis thaliana]
  misc_feature (1)..(238): NCBI GI NO: 34903948 NR Description: OSJNBa0038J17.19
  misc_feature (1)..(242): NCBI GI NO: 13161403 NR Description: CPRD49 [Vigna unguiculata]
  misc_feature (1)..(204): NCBI GI NO: 27478045 NR Description: hypothetical protein XP_209490 [Homo sapiens]
  misc_feature (2)..(229): NCBI GI NO: 21554235 NR Description: CPRD49 [Arabidopsis thaliana]
  misc_feature (2)..(229): NCBI GI NO: 18399151 NR Description: expressed protein; protein id: At3g11210
  misc_feature (1)..(201): NCBI GI NO: 27754071 NR Description: hypothetical protein 4833421E05Rik
MRPEIVLFGDSITAQSFRSGGWGSALADAYSRKADVVVRGYGGYNTRWALFLLHHIFPLGSSSPPVATTIFFGANDAALKGRTSDRQHVPVEEYTDNVRKIVQHLKKCSPTMLIVLITPPPIDEAGRQSYAESIYGEKAMKEPERTNETTGVYAQHCVALAEELGLRCVNLWSKMQETNDWQKKYLSDGLHLTPEGNGVVFDEVSRVFREAWLSPEEMPFDFPHHSHIDGKNPSKAFEERCL

SEQ ID NO: 2292 - protein, 131 aa, Arabidopsis thaliana
  peptide (1)..(131): Ceres Seq. ID no. 12420934
  misc_feature (1)..(93): Pfam Name: Pfam Description:  GDSL-like Lipase/Acylhydrolase
  misc_feature (1)..(131): NCBI GI NO: 15242002 NR Description: putative protein; protein id: At5g62930
  misc_feature (1)..(127): NCBI GI NO: 37535366 NR Description: putative esterase
  misc_feature (1)..(128): NCBI GI NO: 15242539 NR Description: putative protein; protein id: At5g45920.1
  misc_feature (1)..(128): NCBI GI NO: 38454102 NR Description: At5g45920 [Arabidopsis thaliana]
  misc_feature (1)..(127): NCBI GI NO: 34903948 NR Description: OSJNBa0038J17.19
  misc_feature (1)..(131): NCBI GI NO: 13161403 NR Description: CPRD49 [Vigna unguiculata]
  misc_feature (1)..(93): NCBI GI NO: 27478045 NR Description: hypothetical protein XP_209490 [Homo sapiens]
  misc_feature (1)..(118): NCBI GI NO: 21554235 NR Description: CPRD49 [Arabidopsis thaliana]
  misc_feature (1)..(118): NCBI GI NO: 18399151 NR Description: expressed protein; protein id: At3g11210
  misc_feature (1)..(90): NCBI GI NO: 27754071 NR Description: hypothetical protein 4833421E05Rik
MLIVLITPPPIDEAGRQSYAESIYGEKAMKEPERTNETTGVYAQHCVALAEELGLRCVNLWSKMQETNDWQKKYLSDGLHLTPEGNGVVFDEVSRVFREAWLSPEEMPFDFPHHSHIDGKNPSKAFEERCL

SEQ ID NO: 2293 - DNA, 3652 bp, Arabidopsis thaliana
  misc_feature (1)..(3652): Ceres Seq. ID no. 13648943
ggactcgcgcgcctgcaggtcgacactagtggatccaaagaattcgcggccgcgtcgactacggctgcgagaagacgacagaaggggatcccaagattctcctcttcgtcttccttataaactatctctctgtagagaagaaagcttggatccagattgagagagattcagagagtcacatcaccacactccatcttcagatctcatgatttaaactattccgacgtttcggtgttggaagcaactaagtgacgaatggaatccgaaggagaaaccgcgggaaagccgatgaagaacattgttccgcagacttgccagatctgtagtgacaatgttggcaagactgttgatggagatcgttttgtggcttgtgatatttgttcattcccagtttgtcggccttgctacgagtatgagaggaaagatgggaatcaatcttgtcctcagtgcaaaaccagatacaagaggctcaaaggtagtcctgctattcctggtgataaagacgaggatggcttagctgatgaaggtactgttgagttcaactaccctcagaaggagaaaatttcagagcggatgcttggttggcatcttactcgtgggaagggagaggaaatgggggaaccccagtatgataaagaggtctctcacaatcatcttcctcgtctcacgagcagacaagatacttcaggagagttttctgctgcctcacctgaacgcctctctgtatcttctactatcgctgggggaaagcgccttccctattcatcagatgtcaatcaatcaccaaatagaaggattgtggatcctgttggactcgggaatgtagcttggaaggagagagttgatggctggaaaatgaagcaagagaagaatactggtcctgtcagcacgcaggctgcttctgaaagaggtggagtagatattgatgccagcacagatatcctagcagatgaggctctgctgaatgacgaagcgaggcagcctctgtcaaggaaagtttcaattccttcatcacggatcaatccttacagaatggttattatgctgcggcttgttatcctttgtctcttcttgcattaccgtataacaaacccagtgccaaatgcctttgctctatggctggtctctgtgatatgtgagatctggtttgccttatcctggattttggatcagtttcccaagtggtttcctgtgaaccgtgaaacctacctcgacaggcttgctttaagatatgatcgtgaaggtgagccatcacagttagctgctgttgacattttcgtgagtactgttgaccccttgaaggagccaccccttgtgacagccaacacagtgctctctattctggctgttgactacccagttgacaaggtgtcctgttatgtttctgatgatggtgctgctatgttatcatttgaatcacttgcagaaacatcagagtttgctcgtaaatgggtaccattttgcaagaaatatagcatagagcctcgtgcaccagaatggtactttgctgcgaaaatagattacttgaaggataaagttcagacatcatttgtcaaagatcgtagagctatgaagagggaatatgaggaatttaaaatccgaatcaatgcacttgtttccaaagccctaaaatgtcctgaagaagggtgggttatgcaagatggcacaccgtggcctggaaataatacaagggaccatccaggaatgatccaggtcttcttagggcaaaatggtggacttgatgcagagggcaatgagctcccgcgtttggtatatgtttctcgagaaaagcgaccaggattccagcaccacaaaaaggctggtgctatgaatgcactggtgagagtttcagcagttcttaccaatggacctttcatcttgaatcttgattgtgatcattacataaataacagcaaagccttaagagaagcaatgtgcttcctgatggacccaaacctcgggaagcaagtttgttatgttcagttcccacaaagatttgatggtatcgataagaacgatagatatgctaatcgtaataccgtgttctttgatattaacttgagaggtttagatgggattcaaggacctgtatatgtcggaactggatgtgttttcaacagaacagcattatacggttatgaacctccaataaaagtaaaacacaagaagccaagtcttttatctaagctctgtggtggatcaagaaagaagaattccaaagctaagaaagagtcggacaaaaagaaatcaggcaggcatactgactcaactgttcctgtattcaacctcgatgacatagaagagggagttgaaggtgctggttttgatgatgaaaaggcgctcttaatgtcgcaaatgagcctggagaagcgatttggacagtctgctgtttttgttgcttctaccctaatggaaaatggtggtgttcctccttcagcaactccagaaaaccttctcaaagaggctatccatgtcattagttgtggttatgaggataagtcagattggggaatggagattggatggatctatggttctgtgacagaagatattctgactgggttcaaaatgcatgcccgtggatggcgatccatttactgcatgcctaagcttccagctttcaagggttctgctcctatcaatctttcagatcgtctgaaccaagtgctgaggtgggctttaggttcagttgagattctcttcagtcggcattgtcctatatggtatggttacaatgggaggctaaaatttcttgagaggtttgcgtatgtgaacaccaccatctaccctatcacctccattcctcttctcatgtattgtacattgccagccgtttgtctcttcaccaaccagtttattattcctcagattagtaacattgcaagtatatggtttctgtctctctttctctccattttcgccacgggtatactagaaatgaggtggagtggcgtaggcatagacgaatggtggagaaacgagcagttttgggtcattggtggagtatccgctcatttattcgctgtgtttcaaggtatcctcaaagtccttgccggtattgacacaaacttcacagttacctcaaaagcttcagatgaagacggagactttgctgagctctacttgttcaaatggacaacacttctgattccgccaacgacgctgctcattgtaaacttagtgggagttgttgcaggagtctcttatgctatcaacagtggataccaatcatggggaccactctttggtaagttgttctttgccttctgggtgattgttcacttgtaccctttcctcaagggtttgatgggtcgacagaaccggactcctaccattgttgtggtctggtctgttctcttggcttctatcttctcgttgttgtgggttaggattgatcccttcactagccgagtcactggcccggacattctggaatgtggaatcaactgttgagaagcgagcaaatatttacctgttttgagggttaaaaaaaacacagaatttaaattatttttcattgttttatttgttcacttttttacttttgttgtgtgtatctgtctgttcgttcttctgtcttggtgtcataaatttatgtgtagaatatatcttactctagttactttggaaagttataattaaagtgaaagcc

SEQ ID NO: 2294 - protein, 1065 aa, Arabidopsis thaliana
  peptide (1)..(1065): Ceres Seq. ID no. 13648944
  misc_feature (417)..(1048): NCBI GI NO: 15237873 NR Description: cellulose synthase family [Arabidopsis thaliana]
  misc_feature (220)..(453): NCBI GI NO: 15237873 NR Description: cellulose synthase family [Arabidopsis thaliana]
  misc_feature (19)..(70): NCBI GI NO: 15237873 NR Description: cellulose synthase family [Arabidopsis thaliana]
  misc_feature (417)..(1048): NCBI GI NO: 15228448 NR Description: cellulose synthase family [Arabidopsis thaliana]
  misc_feature (220)..(453): NCBI GI NO: 15228448 NR Description: cellulose synthase family [Arabidopsis thaliana]
  misc_feature (476)..(1048): NCBI GI NO: 15217853 NR Description: cellulose synthase family [Arabidopsis thaliana]
  misc_feature (238)..(453): NCBI GI NO: 15217853 NR Description: cellulose synthase family [Arabidopsis thaliana]
  misc_feature (39)..(85): NCBI GI NO: 15217853 NR Description: cellulose synthase family [Arabidopsis thaliana]
  misc_feature (456)..(1048): NCBI GI NO: 27372782 NR Description: cellulose synthase-like protein D4
  misc_feature (219)..(453): NCBI GI NO: 27372782 NR Description: cellulose synthase-like protein D4
MESEGETAGKPMKNIVPQTCQICSDNVGKTVDGDRFVACDICSFPVCRPCYEYERKDGNQSCPQCKTRYKRLKGSPAIPGDKDEDGLADEGTVEFNYPQKEKISERMLGWHLTRGKGEEMGEPQYDKEVSHNHLPRLTSRQDTSGEFSAASPERLSVSSTIAGGKRLPYSSDVNQSPNRRIVDPVGLGNVAWKERVDGWKMKQEKNTGPVSTQAASERGGVDIDASTDILADEALLNDEARQPLSRKVSIPSSRINPYRMVIMLRLVILCLFLHYRITNPVPNAFALWLVSVICEIWFALSWILDQFPKWFPVNRETYLDRLALRYDREGEPSQLAAVDIFVSTVDPLKEPPLVTANTVLSILAVDYPVDKVSCYVSDDGAAMLSFESLAETSEFARKWVPFCKKYSIEPRAPEWYFAAKIDYLKDKVQTSFVKDRRAMKREYEEFKIRINALVSKALKCPEEGWVMQDGTPWPGNNTRDHPGMIQVFLGQNGGLDAEGNELPRLVYVSREKRPGFQHHKKAGAMNALVRVSAVLTNGPFILNLDCDHYINNSKALREAMCFLMDPNLGKQVCYVQFPQRFDGIDKNDRYANRNTVFFDINLRGLDGIQGPVYVGTGCVFNRTALYGYEPPIKVKHKKPSLLSKLCGGSRKKNSKAKKESDKKKSGRHTDSTVPVFNLDDIEEGVEGAGFDDEKALLMSQMSLEKRFGQSAVFVASTLMENGGVPPSATPENLLKEAIHVISCGYEDKSDWGMEIGWIYGSVTEDILTGFKMHARGWRSIYCMPKLPAFKGSAPINLSDRLNQVLRWALGSVEILFSRHCPIWYGYNGRLKFLERFAYVNTTIYPITSIPLLMYCTLPAVCLFTNQFIIPQISNIASIWFLSLFLSIFATGILEMRWSGVGIDEWWRNEQFWVIGGVSAHLFAVFQGILKVLAGIDTNFTVTSKASDEDGDFAELYLFKWTTLLIPPTTLLIVNLVGVVAGVSYAINSGYQSWGPLFGKLFFAFWVIVHLYPFLKGLMGRQNRTPTIVVVWSVLLASIFSLLWVRIDPFTSRVTGPDILECGINC

SEQ ID NO: 2295 - protein, 1054 aa, Arabidopsis thaliana
  peptide (1)..(1054): Ceres Seq. ID no. 13648945
  misc_feature (406)..(1037): NCBI GI NO: 15237873 NR Description: cellulose synthase family [Arabidopsis thaliana]
  misc_feature (209)..(442): NCBI GI NO: 15237873 NR Description: cellulose synthase family [Arabidopsis thaliana]
  misc_feature (8)..(59): NCBI GI NO: 15237873 NR Description: cellulose synthase family [Arabidopsis thaliana]
  misc_feature (406)..(1037): NCBI GI NO: 15228448 NR Description: cellulose synthase family [Arabidopsis thaliana]
  misc_feature (209)..(442): NCBI GI NO: 15228448 NR Description: cellulose synthase family [Arabidopsis thaliana]
  misc_feature (465)..(1037): NCBI GI NO: 15217853 NR Description: cellulose synthase family [Arabidopsis thaliana]
  misc_feature (227)..(442): NCBI GI NO: 15217853 NR Description: cellulose synthase family [Arabidopsis thaliana]
  misc_feature (28)..(74): NCBI GI NO: 15217853 NR Description: cellulose synthase family [Arabidopsis thaliana]
  misc_feature (445)..(1037): NCBI GI NO: 27372782 NR Description: cellulose synthase-like protein D4
  misc_feature (208)..(442): NCBI GI NO: 27372782 NR Description: cellulose synthase-like protein D4
MKNIVPQTCQICSDNVGKTVDGDRFVACDICSFPVCRPCYEYERKDGNQSCPQCKTRYKRLKGSPAIPGDKDEDGLADEGTVEFNYPQKEKISERMLGWHLTRGKGEEMGEPQYDKEVSHNHLPRLTSRQDTSGEFSAASPERLSVSSTIAGGKRLPYSSDVNQSPNRRIVDPVGLGNVAWKERVDGWKMKQEKNTGPVSTQAASERGGVDIDASTDILADEALLNDEARQPLSRKVSIPSSRINPYRMVIMLRLVILCLFLHYRITNPVPNAFALWLVSVICEIWFALSWILDQFPKWFPVNRETYLDRLALRYDREGEPSQLAAVDIFVSTVDPLKEPPLVTANTVLSILAVDYPVDKVSCYVSDDGAAMLSFESLAETSEFARKWVPFCKKYSIEPRAPEWYFAAKIDYLKDKVQTSFVKDRRAMKREYEEFKIRINALVSKALKCPEEGWVMQDGTPWPGNNTRDHPGMIQVFLGQNGGLDAEGNELPRLVYVSREKRPGFQHHKKAGAMNALVRVSAVLTNGPFILNLDCDHYINNSKALREAMCFLMDPNLGKQVCYVQFPQRFDGIDKNDRYANRNTVFFDINLRGLDGIQGPVYVGTGCVFNRTALYGYEPPIKVKHKKPSLLSKLCGGSRKKNSKAKKESDKKKSGRHTDSTVPVFNLDDIEEGVEGAGFDDEKALLMSQMSLEKRFGQSAVFVASTLMENGGVPPSATPENLLKEAIHVISCGYEDKSDWGMEIGWIYGSVTEDILTGFKMHARGWRSIYCMPKLPAFKGSAPINLSDRLNQVLRWALGSVEILFSRHCPIWYGYNGRLKFLERFAYVNTTIYPITSIPLLMYCTLPAVCLFTNQFIIPQISNIASIWFLSLFLSIFATGILEMRWSGVGIDEWWRNEQFWVIGGVSAHLFAVFQGILKVLAGIDTNFTVTSKASDEDGDFAELYLFKWTTLLIPPTTLLIVNLVGVVAGVSYAINSGYQSWGPLFGKLFFAFWVIVHLYPFLKGLMGRQNRTPTIVVVWSVLLASIFSLLWVRIDPFTSRVTGPDILECGINC

SEQ ID NO: 2296 - protein, 959 aa, Arabidopsis thaliana
  peptide (1)..(959): Ceres Seq. ID no. 13648946
  misc_feature (311)..(942): NCBI GI NO: 15237873 NR Description: cellulose synthase family [Arabidopsis thaliana]
  misc_feature (114)..(347): NCBI GI NO: 15237873 NR Description: cellulose synthase family [Arabidopsis thaliana]
  misc_feature (311)..(942): NCBI GI NO: 15228448 NR Description: cellulose synthase family [Arabidopsis thaliana]
  misc_feature (114)..(347): NCBI GI NO: 15228448 NR Description: cellulose synthase family [Arabidopsis thaliana]
  misc_feature (370)..(942): NCBI GI NO: 15217853 NR Description: cellulose synthase family [Arabidopsis thaliana]
  misc_feature (132)..(347): NCBI GI NO: 15217853 NR Description: cellulose synthase family [Arabidopsis thaliana]
  misc_feature (350)..(942): NCBI GI NO: 27372782 NR Description: cellulose synthase-like protein D4
  misc_feature (113)..(347): NCBI GI NO: 27372782 NR Description: cellulose synthase-like protein D4
  misc_feature (618)..(944): NCBI GI NO: 15233733 NR Description: cellulose synthase family [Arabidopsis thaliana]
  misc_feature (618)..(944): NCBI GI NO: 28973666 NR Description: unknown protein [Arabidopsis thaliana]
MLGWHLTRGKGEEMGEPQYDKEVSHNHLPRLTSRQDTSGEFSAASPERLSVSSTIAGGKRLPYSSDVNQSPNRRIVDPVGLGNVAWKERVDGWKMKQEKNTGPVSTQAASERGGVDIDASTDILADEALLNDEARQPLSRKVSIPSSRINPYRMVIMLRLVILCLFLHYRITNPVPNAFALWLVSVICEIWFALSWILDQFPKWFPVNRETYLDRLALRYDREGEPSQLAAVDIFVSTVDPLKEPPLVTANTVLSILAVDYPVDKVSCYVSDDGAAMLSFESLAETSEFARKWVPFCKKYSIEPRAPEWYFAAKIDYLKDKVQTSFVKDRRAMKREYEEFKIRINALVSKALKCPEEGWVMQDGTPWPGNNTRDHPGMIQVFLGQNGGLDAEGNELPRLVYVSREKRPGFQHHKKAGAMNALVRVSAVLTNGPFILNLDCDHYINNSKALREAMCFLMDPNLGKQVCYVQFPQRFDGIDKNDRYANRNTVFFDINLRGLDGIQGPVYVGTGCVFNRTALYGYEPPIKVKHKKPSLLSKLCGGSRKKNSKAKKESDKKKSGRHTDSTVPVFNLDDIEEGVEGAGFDDEKALLMSQMSLEKRFGQSAVFVASTLMENGGVPPSATPENLLKEAIHVISCGYEDKSDWGMEIGWIYGSVTEDILTGFKMHARGWRSIYCMPKLPAFKGSAPINLSDRLNQVLRWALGSVEILFSRHCPIWYGYNGRLKFLERFAYVNTTIYPITSIPLLMYCTLPAVCLFTNQFIIPQISNIASIWFLSLFLSIFATGILEMRWSGVGIDEWWRNEQFWVIGGVSAHLFAVFQGILKVLAGIDTNFTVTSKASDEDGDFAELYLFKWTTLLIPPTTLLIVNLVGVVAGVSYAINSGYQSWGPLFGKLFFAFWVIVHLYPFLKGLMGRQNRTPTIVVVWSVLLASIFSLLWVRIDPFTSRVTGPDILECGINC

SEQ ID NO: 2297 - DNA, 846 bp, Arabidopsis thaliana
  misc_feature (1)..(846): Ceres Seq. ID no. 12393939
atcctgatcgggaaacccaaaacgagtggtcgaatagtttccgactgattcttccgaggcttgaagctcaatagctatggcttctctttcagtctcttcctcttcaaccatcatcgattcaagagctcctccttctcgactagcctccgcctccgcctcttctccgtcgtgcatttcacttcccacacttccgattcagtctcatacccgtgccgctaaagccactgcttactgtcggaagattgtgaggaacgttgtgacgagagctactactgaagttggtgaagctcctgccactactaccgaagctgagactactgagttacctgaaatcgtcaagactgctcaagaagcttgggagaaagtggatgacaagtacgctattggttctcttgcctttgctagtgtagtggctctttggggttctgctggaatgatttcggcaatcgataggcttccattggttcctggtgttcttgaacttgtaggcatcggttacacaggatggttcacttacaagaacctggtcttcaaaccagacagggaggctttgtttgagaaggtcaagagcacatacaaagacatattagggagcagctgaatcaaaggaggaagaagaagaagaagagcctttttgaggccattcatgaattggaatgaaggatatcaaaagaatctaacacaaaggccacgtccttccttcaatctttccttcttgtaactaaataattttcatcctttctctctctctgtctctggtcttttttagctcaaagtatcatccatttatgtcaaagtgttgtaaattcctcaagactatatatgagatgttttgtttcattttcc

SEQ ID NO: 2298 - protein, 174 aa, Arabidopsis thaliana
  peptide (1)..(174): Ceres Seq. ID no. 12393940
  misc_feature (1)..(174): NCBI GI NO: 18407178 NR Description: expressed protein; protein id: At2g46820
  misc_feature (1)..(174): NCBI GI NO: 21555057 NR Description: unknown [Arabidopsis thaliana]
  misc_feature (27)..(174): NCBI GI NO: 34393236 NR Description: unknown protein
  misc_feature (1)..(171): NCBI GI NO: 37536446 NR Description: hypothetical protein
  misc_feature (80)..(172): NCBI GI NO: 18403896 NR Description: expressed protein; protein id: At1g52220
  misc_feature (3)..(173): NCBI GI NO: 687677 NR Description: unknown
  misc_feature (3)..(173): NCBI GI NO: 18411555 NR Description: expressed protein; protein id: At4g01150
  misc_feature (80)..(172): NCBI GI NO: 21554231 NR Description: unknown [Arabidopsis thaliana]
  misc_feature (17)..(172): NCBI GI NO: 34909746 NR Description: contains ESTsAU066201
  misc_feature (22)..(173): NCBI GI NO: 38175474 NR Description: unknown protein
MASLSVSSSSTIIDSRAPPSRLASASASSPSCISLPTLPIQSHTRAAKATAYCRKIVRNVVTRATTEVGEAPATTTEAETTELPEIVKTAQEAWEKVDDKYAIGSLAFASVVALWGSAGMISAIDRLPLVPGVLELVGIGYTGWFTYKNLVFKPDREALFEKVKSTYKDILGSS

SEQ ID NO: 2299 - DNA, 757 bp, Arabidopsis thaliana
  misc_feature (1)..(757): Ceres Seq. ID no. 12673410
atgattccttgctctaagcttcaccactacctctgatctgatttataccaaatccaacttttcttctttcaaaaagtaaaaaaatcaatcatttataatttattatggagaagtgagagcaagtgttagcttttgatctttcttatattcttctctgaaatagtaacacactgtgaagagtttttcctacatctgaattttgtctgatccagctgagaacaggaaaaagaagaaaatggcgtttgtgacaactgcggaagtttgtgacgcgaatcaagagctgattcggagtggtcagctacgagctttgcaacccattttccagatttatggccgtcgacaaatattctcaggaccagttgtcactgtcaaagtttttgaagacaatggcttaatccgtcaattcatcgaggagaaaggaaacggtagagttcttgtggtggatggtggagggagtcaacgatgtgcaatactcggaggtaaccccgttgttcaagctcagaacaacggatgggcaggaatcgttgtgaacggatgcatcagagacgtcgatgagatcaacggttgtgatatcggagtgagagctttggcctctcatccgataaaagcgagtaagaaaggacttggagaacaacgagttccggtaaatatcgcagggactcggatttgtgatggtgaatggctttatgcagatactgatgggattcttgtctcccaaattgagttatccgtttaataaaaaaggctttgatcagtt

SEQ ID NO: 2300 - protein, 166 aa, Arabidopsis thaliana
  peptide (1)..(166): Ceres Seq. ID no. 12673411
  misc_feature (2)..(159): Pfam Name: Pfam Description:  Demethylmenaquinone methyltransferase
  misc_feature (1)..(166): NCBI GI NO: 15237348 NR Description: expressed protein; protein id: At5g16450
  misc_feature (1)..(166): NCBI GI NO: 21537415 NR Description: S-adenosylmethionine: 2-demethylmenaquinonemethyltransferase-like
  misc_feature (1)..(166): NCBI GI NO: 15232963 NR Description: expressed protein; protein id: At3g02770
  misc_feature (4)..(166): NCBI GI NO: 34910724 NR Description: S-adenosylmethionine: 2-demethylmenaquinonemethyltransferase-like
  misc_feature (1)..(166): NCBI GI NO: 15241161 NR Description: expressed protein; protein id: At5g56260.1
  misc_feature (1)..(164): NCBI GI NO: 22982141 NR Description: hypothetical protein [Burkholderia fungorum]
  misc_feature (1)..(164): NCBI GI NO: 22978085 NR Description: hypothetical protein [Ralstonia metallidurans]
  misc_feature (4)..(164): NCBI GI NO: 17546073 NR Description: PROBABLE S-ADENOSYLMETHIONINE: 2-DEMETHYLMENAQUINONEMETHYLTRANSFERASE PROTEIN
  misc_feature (1)..(160): NCBI GI NO: 34497095 NR Description: S-adenosylmethionine: 2-demethylmenaquinonemethyltransferase
  misc_feature (6)..(166): NCBI GI NO: 23468849 NR Description: hypothetical protein
MAFVTTAEVCDANQELIRSGQLRALQPIFQIYGRRQIFSGPVVTVKVFEDNGLIRQFIEEKGNGRVLVVDGGGSQRCAILGGNPVVQAQNNGWAGIVVNGCIRDVDEINGCDIGVRALASHPIKASKKGLGEQRVPVNIAGTRICDGEWLYADTDGILVSQIELSV

SEQ ID NO: 2301 - DNA, 727 bp, Arabidopsis thaliana
  misc_feature (1)..(727): Ceres Seq. ID no. 12420803
atgccttcttctcatttctcaccaactccctccaaacccaacaaaagtgtttatattagcaaagccgccaaagtgtaaacgaaagtttataaatttcatttctgtgatcttacgtaattggaggaagatcaaaattttcaatccccattcttcgattgcttcaattgaagtttctccgatggcgcaagttagcagaatctgcaatggtgtgcagaacccatctcttatctccaatctctcgaaatccagtcaacgcaaatctcccttatcggtttctctgaagacgcagcagcatccacgagcttatccgatttcgtcgtcgtggggattgaagaagagtgggatggacgttaattggctctgaccttcgtcctcttaaggtcatgtcttctgtttccacggcggagaaagcgtcggagattgtacttcaacccattagagaaatctccggtcttattaagcttcctggctccaagtctctatcaaatcggatcctgcttctcgctgctctatctgagggaacaactgtagtggacaacttgttgaatagcgatgacatcaattacatgcttgatgcgttgaagagattgggacttaatgtggaaactgacagtgaaaataatcgtgctgtagttgaaggatgtggcgggatattcccagcttccatagattcaaagagtgatatcgaactttacctcggtaatgcaggaacagcaatgcgtccact

SEQ ID NO: 2302 - protein, 120 aa, Arabidopsis thaliana
  peptide (1)..(120): Ceres Seq. ID no. 12420804
  misc_feature (60)..(115): NCBI GI NO: 66618 NR Description: 3-phosphoshikimate 1-carboxyvinyltransferase (EC 2
  misc_feature (60)..(115): NCBI GI NO: 1351978 NR Description: 3-phosphoshikimate 1-carboxyvinyltransferase
  misc_feature (60)..(115): NCBI GI NO: 15225450 NR Description: 5-enolpyruvylshikimate-3-phosphate
  misc_feature (60)..(118): NCBI GI NO: 18251236 NR Description: 5-enolpyruvylshikimate-3-phosphate synthase
  misc_feature (60)..(118): NCBI GI NO: 114171 NR Description: 3-phosphoshikimate 1-carboxyvinyltransferase
CLLLISHQLPPNPTKVFILAKPPKCKRKFINFISVILRNWRKIKIFNPHSSIASIEVSPMAQVSRICNGVQNPSLISNLSKSSQRKSPLSVSLKTQQHPRAYPISSSWGLKKSGMDVNWL

SEQ ID NO: 2303 - protein, 114 aa, Arabidopsis thaliana
  peptide (1)..(114): Ceres Seq. ID no. 12420805
  misc_feature (1)..(113): NCBI GI NO: 66618 NR Description: 3-phosphoshikimate 1-carboxyvinyltransferase (EC 2
  misc_feature (1)..(113): NCBI GI NO: 1351978 NR Description: 3-phosphoshikimate 1-carboxyvinyltransferase
  misc_feature (1)..(113): NCBI GI NO: 15225450 NR Description: 5-enolpyruvylshikimate-3-phosphate
  misc_feature (1)..(113): NCBI GI NO: 18251236 NR Description: 5-enolpyruvylshikimate-3-phosphate synthase
  misc_feature (1)..(113): NCBI GI NO: 114171 NR Description: 3-phosphoshikimate 1-carboxyvinyltransferase
  misc_feature (1)..(113): NCBI GI NO: 15221986 NR Description: 5-enolpyruvylshikimate-3-phosphate
  misc_feature (1)..(113): NCBI GI NO: 21555078 NR Description: 5-enolpyruvylshikimate-3-phosphate
  misc_feature (1)..(113): NCBI GI NO: 114176 NR Description: 3-phosphoshikimate 1-carboxyvinyltransferase
  misc_feature (1)..(113): NCBI GI NO: 114165 NR Description: 3-phosphoshikimate 1-carboxyvinyltransferase 1
  misc_feature (1)..(113): NCBI GI NO: 66619 NR Description: 3-phosphoshikimate 1-carboxyvinyltransferase (EC 2
MSSVSTAEKASEIVLQPIREISGLIKLPGSKSLSNRILLLAALSEGTTVVDNLLNSDDINYMLDALKRLGLNVETDSENNRAVVEGCGGIFPASIDSKSDIELYLGNAGTAMRP

SEQ ID NO: 2304 - protein, 61 aa, Arabidopsis thaliana
  peptide (1)..(61): Ceres Seq. ID no. 12420806
  misc_feature (1)..(56): NCBI GI NO: 66618 NR Description: 3-phosphoshikimate 1-carboxyvinyltransferase (EC 2
  misc_feature (1)..(56): NCBI GI NO: 1351978 NR Description: 3-phosphoshikimate 1-carboxyvinyltransferase
  misc_feature (1)..(56): NCBI GI NO: 15225450 NR Description: 5-enolpyruvylshikimate-3-phosphate
  misc_feature (1)..(59): NCBI GI NO: 18251236 NR Description: 5-enolpyruvylshikimate-3-phosphate synthase
  misc_feature (1)..(59): NCBI GI NO: 114171 NR Description: 3-phosphoshikimate 1-carboxyvinyltransferase
MAQVSRICNGVQNPSLISNLSKSSQRKSPLSVSLKTQQHPRAYPISSSWGLKKSGMDVNWL

SEQ ID NO: 2305 - DNA, 843 bp, Arabidopsis thaliana
  misc_feature (1)..(843): Ceres Seq. ID no. 13592896
actcaaaacataatttgctctcaataagacattaacaaagtcccagaggcagagagagagaatcagagagagagaagtcgagatgtttttccacatagtattggagcggaacatgcagttgcatcctcgtttctttggtcgtaacctaaaagaaaacctcgtatctaagctcatgaaagatgtcgaaggcacttgcagtggccgacatggatttgtagtggcgataactggaatagatacaataggaaagggtttgatcagagatgggactggttttgtcacctttccagttaaataccaatgcgtcgttttcagacctttcaaaggcgagattttggaagctgttgtcactttggtcaataagatgggattcttcgctgaagctggccctgttcagatttttgtgtctaagcatttgattccagatgatatggagtttcaagctggagacatgcctaactataccacatcagatggatcagttaagatccagaaggagtgtgaagtgagactaaagattattggaacaagagttgatgccactgcgattttttgtgtgggtaccatcaaagacgattttttgggagtcataaacgaccctgcagcggcataaaaagtttcaagcagatttcaattttggtcttctttctttcacagagaatgctgtcttgtgataaagttgtattatagttgaagttttggatctatttaatccgaaagattggaaccacgcttgttggatttaacttatatgcaagtttagtgaactttgtatttgttcaaaactgttgtcattttgagaacaatatagtaccgagtggtggatcaaattctacatgtcac

SEQ ID NO: 2306 - protein, 176 aa, Arabidopsis thaliana
  peptide (1)..(176): Ceres Seq. ID no. 13592897
  misc_feature (78)..(160): Pfam Name: Pfam Description:  S1 RNA binding domain
  misc_feature (1)..(176): NCBI GI NO: 15237831 NR Description: RNA polymerase II [Arabidopsis thaliana]
  misc_feature (1)..(174): NCBI GI NO: 1173137 NR Description: DNA-DIRECTED RNA POLYMERASE II 19 KD POLYPEPTIDE
  misc_feature (1)..(172): NCBI GI NO: 24647020 NR Description: CG31155-PA [Drosophila melanogaster]
  misc_feature (1)..(169): NCBI GI NO: 39595528 NR Description: Hypothetical protein CBG04195
  misc_feature (1)..(171): NCBI GI NO: 4505947 NR Description: DNA directed RNA polymerase II polypeptide G
  misc_feature (1)..(169): NCBI GI NO: 17510349 NR Description: RNA polymerase Rpb7
  misc_feature (1)..(171): NCBI GI NO: 28278826 NR Description: Unknown (protein for MGC:55297) [Danio rerio]
  misc_feature (2)..(170): NCBI GI NO: 19114885 NR Description: RNA polymerase II subunit rpb7
  misc_feature (1)..(168): NCBI GI NO: 12655858 NR Description: RNA polymerase II subunit 7 [Candida albicans]
  misc_feature (1)..(168): NCBI GI NO: 13811986 NR Description: RNA polymerase II RPB7 subunit-like protein
MFFHIVLERNMQLHPRFFGRNLKENLVSKLMKDVEGTCSGRHGFVVAITGIDTIGKGLIRDGTGFVTFPVKYQCVVFRPFKGEILEAVVTLVNKMGFFAEAGPVQIFVSKHLIPDDMEFQAGDMPNYTTSDGSVKIQKECEVRLKIIGTRVDATAIFCVGTIKDDFLGVINDPAAA

SEQ ID NO: 2307 - protein, 166 aa, Arabidopsis thaliana
  peptide (1)..(166): Ceres Seq. ID no. 13592898
  misc_feature (68)..(150): Pfam Name: Pfam Description:  S1 RNA binding domain
  misc_feature (1)..(166): NCBI GI NO: 15237831 NR Description: RNA polymerase II [Arabidopsis thaliana]
  misc_feature (1)..(164): NCBI GI NO: 1173137 NR Description: DNA-DIRECTED RNA POLYMERASE II 19 KD POLYPEPTIDE
  misc_feature (1)..(162): NCBI GI NO: 24647020 NR Description: CG31155-PA [Drosophila melanogaster]
  misc_feature (1)..(159): NCBI GI NO: 39595528 NR Description: Hypothetical protein CBG04195
  misc_feature (1)..(161): NCBI GI NO: 4505947 NR Description: DNA directed RNA polymerase II polypeptide G
  misc_feature (1)..(159): NCBI GI NO: 17510349 NR Description: RNA polymerase Rpb7
  misc_feature (1)..(161): NCBI GI NO: 28278826 NR Description: Unknown (protein for MGC:55297) [Danio rerio]
  misc_feature (1)..(160): NCBI GI NO: 19114885 NR Description: RNA polymerase II subunit rpb7
  misc_feature (1)..(158): NCBI GI NO: 12655858 NR Description: RNA polymerase II subunit 7 [Candida albicans]
  misc_feature (1)..(158): NCBI GI NO: 13811986 NR Description: RNA polymerase II RPB7 subunit-like protein
MQLHPRFFGRNLKENLVSKLMKDVEGTCSGRHGFVVAITGIDTIGKGLIRDGTGFVTFPVKYQCVVFRPFKGEILEAVVTLVNKMGFFAEAGPVQIFVSKHLIPDDMEFQAGDMPNYTTSDGSVKIQKECEVRLKIIGTRVDATAIFCVGTIKDDFLGVINDPAAA

SEQ ID NO: 2308 - protein, 146 aa, Arabidopsis thaliana
  peptide (1)..(146): Ceres Seq. ID no. 13592899
  misc_feature (48)..(130): Pfam Name: Pfam Description:  S1 RNA binding domain
  misc_feature (1)..(146): NCBI GI NO: 15237831 NR Description: RNA polymerase II [Arabidopsis thaliana]
  misc_feature (1)..(144): NCBI GI NO: 1173137 NR Description: DNA-DIRECTED RNA POLYMERASE II 19 KD POLYPEPTIDE
  misc_feature (1)..(142): NCBI GI NO: 24647020 NR Description: CG31155-PA [Drosophila melanogaster]
  misc_feature (1)..(139): NCBI GI NO: 39595528 NR Description: Hypothetical protein CBG04195
  misc_feature (1)..(141): NCBI GI NO: 4505947 NR Description: DNA directed RNA polymerase II polypeptide G
  misc_feature (1)..(141): NCBI GI NO: 28278826 NR Description: Unknown (protein for MGC:55297) [Danio rerio]
  misc_feature (1)..(139): NCBI GI NO: 17510349 NR Description: RNA polymerase Rpb7
  misc_feature (1)..(140): NCBI GI NO: 19114885 NR Description: RNA polymerase II subunit rpb7
  misc_feature (1)..(138): NCBI GI NO: 12655858 NR Description: RNA polymerase II subunit 7 [Candida albicans]
  misc_feature (1)..(138): NCBI GI NO: 13811986 NR Description: RNA polymerase II RPB7 subunit-like protein
MKDVEGTCSGRHGFVVAITGIDTIGKGLIRDGTGFVTFPVKYQCVVFRPFKGEILEAVVTLVNKMGFFAEAGPVQIFVSKHLIPDDMEFQAGDMPNYTTSDGSVKIQKECEVRLKIIGTRVDATAIFCVGTIKDDFLGVINDPAAA

SEQ ID NO: 2309 - DNA, 597 bp, Arabidopsis thaliana
  misc_feature (1)..(597): Ceres Seq. ID no. 12579462
aagcgaatagcggaagaacagaaaaagggaaattctgaggaaaggtagaagaatcgagtcggaaaaatggaaacgacgaagagtaacagcagcgagtccgatgtcaacgccaaatgggacgcttgtctcgatctcactgctcgtcgctttgtctactcttccctcggcggcgctttcgccggtcttctcttcttcaggagtccggttacgagatgggcgtcgattgcttttggtgctggaattggtattggttctgcatacacagattgttctcgtgtttttgatgcgtcttcttcaacttcagctactttattagcagctcccaagagtacagagacttctgtatctcaggcagcagaagagtgaagacaacgaggaagcttggaggtaaaaaaccaaacattgatagggttacattacgaaatggtaattgatcttgcaggacaaggcttttgagataacgccattgttaaaaaaaaacttttgcttctcagtgtggttttgtacactgatgtcaaaattgttaatgacccactcattttttttgttttgaaaaatcttatgttcttttacttgagaaataattcctccggtttg

SEQ ID NO: 2310 - protein, 99 aa, Arabidopsis thaliana
  peptide (1)..(99): Ceres Seq. ID no. 12579463
  misc_feature (1)..(73): Pfam Name: DUF543 Pfam Description: Domain of unknown function
  misc_feature (1)..(99): NCBI GI NO: 18395129 NR Description: expressed protein; protein id: At1g22520
  misc_feature (2)..(99): NCBI GI NO: 18410008 NR Description: unknown protein; protein id: At1g72170
  misc_feature (2)..(99): NCBI GI NO: 21553491 NR Description: unknown [Arabidopsis thaliana]
  misc_feature (2)..(95): NCBI GI NO: 25406151 NR Description: unknown protein T9N14.2
METTKSNSSESDVNAKWDACLDLTARRFVYSSLGGAFAGLLFFRSPVTRWASIAFGAGIGIGSAYTDCSRVFDASSSTSATLLAAPKSTETSVSQAAEE

SEQ ID NO: 2311 - protein, 71 aa, Arabidopsis thaliana
  peptide (1)..(71): Ceres Seq. ID no. 12579464
MSTPNGTLVSISLLVALSTLPSAALSPVFSSSGVRLRDGRRLLLVLELVLVLHTQIVLVFLMRLLQLQLLY

SEQ ID NO: 2312 - protein, 56 aa, Arabidopsis thaliana
  peptide (1)..(56): Ceres Seq. ID no. 12579465
MGRLSRSHCSSLCLLFPRRRFRRSSLLQESGYEMGVDCFWCWNWYWFCIHRLFSCF

SEQ ID NO: 2313 - DNA, 1136 bp, Arabidopsis thaliana
  misc_feature (1)..(1136): Ceres Seq. ID no. 13489147
tgattcttctcttgatctcttcttctttaacgtttatactttatatacatcgaaagcatttcttctttgtccgttcacatcattttcgaatttgtgttttccctagaaattgtctttttttttttctttcttatagagaaaatcaagaaaatgtaaaaaagattgatatatttatttattctcgttcaaatgaatcactctttatttgactcgttagtccatgtctcgtctcactctcttaatctctatttcctctcagatctctcaaaaagtgtagttttgtgacaaaaactgttttttaaagttagctataagaagatgaggaagatcatagggtttagaatcgggagacgagtctcaagatggatctttcgcaaaacccggatccaacgttcaggatacaaccggatacactcgacccagcaagcttgcatgctgatgagaccattagccaaactcaaaagttggggccaacgtctcaagcaaagtttcagacgcaggtctacgagaagatccgcatacatacccgttgatcataagaaagccgacccggttccaaggggacacttagctatctacgtgggtcaaaaagacggcgactgtcatagagttttggtacccatcgtttactttaaccatcctttgttcggtgagctgcttcgagaagccgaaaaagagtacggattttgccacgaaggaggtatcactattccttgtctgtattcagatttcgaacgggtcaagacccggatcgcatcggggtcaagttctcgggtatttccatggggccgtcattgccgcaattgaagacaattatggaaatagttcttaggattttcaagcttttattttctttgtagatattgttccctttcatttaccattttctaatcttgttactttttgtcactttacacttttcttgtgatagtctcaattatacagtaagctgataacgtaaataattattaagagtctaatagtgattatcgataatgatgtgattagcatggggacacttagtggtatactgtctttggacattgatataaagatgaaatggaaattggtgatgaaacaccaaaggaaaagtgtaacacgattctattctctatatgggtctactcaagattttt

SEQ ID NO: 2314 - protein, 162 aa, Arabidopsis thaliana
  peptide (1)..(162): Ceres Seq. ID no. 13489148
  misc_feature (37)..(146): Pfam Name: Pfam Description:  Auxin responsive protein
  misc_feature (1)..(162): NCBI GI NO: 15225432 NR Description: auxin-induced
  misc_feature (1)..(158): NCBI GI NO: 15232400 NR Description: auxin-induced
  misc_feature (1)..(152): NCBI GI NO: 15234550 NR Description: auxin-induced
  misc_feature (1)..(152): NCBI GI NO: 15235723 NR Description: auxin-induced
  misc_feature (6)..(151): NCBI GI NO: 38567865 NR Description: OSJNBa0091D06.3
  misc_feature (73)..(162): NCBI GI NO: 15238779 NR Description: auxin-induced
  misc_feature (73)..(162): NCBI GI NO: 38454072 NR Description: At5g53590 [Arabidopsis thaliana]
  misc_feature (72)..(142): NCBI GI NO: 18411465 NR Description: auxin-induced
  misc_feature (75)..(159): NCBI GI NO: 15226425 NR Description: auxin-induced
  misc_feature (79)..(145): NCBI GI NO: 15228626 NR Description: auxin-induced
MRKIIGFRIGRRVSRWIFRKTRIQRSGYNRIHSTQQACMLMRPLAKLKSWGQRLKQSFRRRSTRRSAYIPVDHKKADPVPRGHLAIYVGQKDGDCHRVLVPIVYFNHPLFGELLREAEKEYGFCHEGGITIPCLYSDFERVKTRIASGSSSRVFPWGRHCRN

SEQ ID NO: 2315 - protein, 124 aa, Arabidopsis thaliana
  peptide (1)..(124): Ceres Seq. ID no. 13489149
  misc_feature (1)..(108): Pfam Name: Pfam Description:  Auxin responsive protein
  misc_feature (1)..(124): NCBI GI NO: 15225432 NR Description: auxin-induced
  misc_feature (1)..(120): NCBI GI NO: 15232400 NR Description: auxin-induced
  misc_feature (1)..(114): NCBI GI NO: 15234550 NR Description: auxin-induced
  misc_feature (1)..(114): NCBI GI NO: 15235723 NR Description: auxin-induced
  misc_feature (1)..(113): NCBI GI NO: 38567865 NR Description: OSJNBa0091D06.3
  misc_feature (35)..(124): NCBI GI NO: 15238779 NR Description: auxin-induced
  misc_feature (35)..(124): NCBI GI NO: 38454072 NR Description: At5g53590 [Arabidopsis thaliana]
  misc_feature (34)..(104): NCBI GI NO: 18411465 NR Description: auxin-induced
  misc_feature (37)..(121): NCBI GI NO: 15226425 NR Description: auxin-induced
  misc_feature (41)..(107): NCBI GI NO: 15228626 NR Description: auxin-induced
MLMRPLAKLKSWGQRLKQSFRRRSTRRSAYIPVDHKKADPVPRGHLAIYVGQKDGDCHRVLVPIVYFNHPLFGELLREAEKEYGFCHEGGITIPCLYSDFERVKTRIASGSSSRVFPWGRHCRN

SEQ ID NO: 2316 - protein, 122 aa, Arabidopsis thaliana
  peptide (1)..(122): Ceres Seq. ID no. 13489150
  misc_feature (1)..(106): Pfam Name: Pfam Description:  Auxin responsive protein
  misc_feature (1)..(122): NCBI GI NO: 15225432 NR Description: auxin-induced
  misc_feature (1)..(118): NCBI GI NO: 15232400 NR Description: auxin-induced
  misc_feature (1)..(112): NCBI GI NO: 15234550 NR Description: auxin-induced
  misc_feature (1)..(112): NCBI GI NO: 15235723 NR Description: auxin-induced
  misc_feature (1)..(111): NCBI GI NO: 38567865 NR Description: OSJNBa0091D06.3
  misc_feature (33)..(122): NCBI GI NO: 15238779 NR Description: auxin-induced
  misc_feature (33)..(122): NCBI GI NO: 38454072 NR Description: At5g53590 [Arabidopsis thaliana]
  misc_feature (32)..(102): NCBI GI NO: 18411465 NR Description: auxin-induced
  misc_feature (35)..(119): NCBI GI NO: 15226425 NR Description: auxin-induced
  misc_feature (39)..(105): NCBI GI NO: 15228626 NR Description: auxin-induced
MRPLAKLKSWGQRLKQSFRRRSTRRSAYIPVDHKKADPVPRGHLAIYVGQKDGDCHRVLVPIVYFNHPLFGELLREAEKEYGFCHEGGITIPCLYSDFERVKTRIASGSSSRVFPWGRHCRN

SEQ ID NO: 2317 - DNA, 913 bp, Arabidopsis thaliana
  misc_feature (1)..(913): Ceres Seq. ID no. 12604865
accaaagatcggatttttatcagacggaaaggaggagacggaagaaaatgccggtgagagttgttgagagcaacacgcctgctcaagtttcaggaactgatcctgggaatcgatcaccacttccccctagttcacttctcggcgctggccaggcattttctggtacgcaaaatgtctctaatcaacagaaggaggaagcttggagagtcaacgtccagatacagggtattgaccttgaacatggttatctttgtggcaccatggaagctctaaacgttcccatggcagacactcctgtcataacattctgggaaggggaaatcgttgatggaaagaattataccttttacaccggaaaatgggaagcaacgagggaagatgatatgagacattggtcaaagttcccgtctttttcgcctcttcagggacaagttgaatctgatggtggcaggcaattggatcttaacaattatccttatatatttatgagatggaaagagcaatactttgtaaacgttggcacagattgtggactaacaatagctggattttactacgtatgcttctcctgcagcgatggttccatcagcggtttctattatgatccaaacagcagtccgtttcagaagctggagctgaaaacagttaacgaaggaagatctggtttcagcttttcttcttacgagttgcaatgatgaatgctaccaaaatcatcagacagcgccatatgatactctcgtctaaacatgcgatgcacgtgatccagtacattatgacgtgtcaattattataaattattagtaagatatttttttgcttagctagtagaccagaccaagtaaagaactaaaaatactattttgtcattatggtaccaagctaatagtttatctggaaaaagaacaaattgtcc

SEQ ID NO: 2318 - protein, 230 aa, Arabidopsis thaliana
  peptide (1)..(230): Ceres Seq. ID no. 12604866
  misc_feature (16)..(230): NCBI GI NO: 29150393 NR Description: unknown protein
  misc_feature (50)..(185): NCBI GI NO: 15224341 NR Description: hypothetical protein; protein id: At2g37680.1
  misc_feature (143)..(230): NCBI GI NO: 34895748 NR Description: P0024G09.20
  misc_feature (12)..(218): NCBI GI NO: 40747141 NR Description: hypothetical protein AN1179.2
  misc_feature (16)..(217): NCBI GI NO: 34870809 NR Description: similar to RIKEN cDNA 4933439F18
  misc_feature (16)..(217): NCBI GI NO: 12848536 NR Description: unnamed protein product [Mus musculus]
  misc_feature (16)..(217): NCBI GI NO: 34328469 NR Description: RIKEN cDNA 4933439F18 [Mus musculus]
  misc_feature (16)..(217): NCBI GI NO: 23111007 NR Description: hypothetical protein MGC3048 [Homo sapiens]
  misc_feature (16)..(217): NCBI GI NO: 18676842 NR Description: unnamed protein product [Homo sapiens]
  misc_feature (38)..(217): NCBI GI NO: 32406292 NR Description: hypothetical protein [Neurospora crassa]
QRSDFYQTERRRRKKMPVRVVESNTPAQVSGTDPGNRSPLPPSSLLGAGQAFSGTQNVSNQQKEEAWRVNVQIQGIDLEHGYLCGTMEALNVPMADTPVITFWEGEIVDGKNYTFYTGKWEATREDDMRHWSKFPSFSPLQGQVESDGGRQLDLNNYPYIFMRWKEQYFVNVGTDCGLTIAGFYYVCFSCSDGSISGFYYDPNSSPFQKLELKTVNEGRSGFSFSSYELQ

SEQ ID NO: 2319 - protein, 215 aa, Arabidopsis thaliana
  peptide (1)..(215): Ceres Seq. ID no. 12604867
  misc_feature (1)..(215): NCBI GI NO: 29150393 NR Description: unknown protein
  misc_feature (35)..(170): NCBI GI NO: 15224341 NR Description: hypothetical protein; protein id: At2g37680.1
  misc_feature (128)..(215): NCBI GI NO: 34895748 NR Description: P0024G09.20
  misc_feature (1)..(203): NCBI GI NO: 40747141 NR Description: hypothetical protein AN1179.2
  misc_feature (1)..(202): NCBI GI NO: 34870809 NR Description: similar to RIKEN cDNA 4933439F18
  misc_feature (1)..(202): NCBI GI NO: 12848536 NR Description: unnamed protein product [Mus musculus]
  misc_feature (1)..(202): NCBI GI NO: 34328469 NR Description: RIKEN cDNA 4933439F18 [Mus musculus]
  misc_feature (1)..(202): NCBI GI NO: 23111007 NR Description: hypothetical protein MGC3048 [Homo sapiens]
  misc_feature (1)..(202): NCBI GI NO: 18676842 NR Description: unnamed protein product [Homo sapiens]
  misc_feature (23)..(202): NCBI GI NO: 32406292 NR Description: hypothetical protein [Neurospora crassa]
MPVRVVESNTPAQVSGTDPGNRSPLPPSSLLGAGQAFSGTQNVSNQQKEEAWRVNVQIQGIDLEHGYLCGTMEALNVPMADTPVITFWEGEIVDGKNYTFYTGKWEATREDDMRHWSKFPSFSPLQGQVESDGGRQLDLNNYPYIFMRWKEQYFVNVGTDCGLTIAGFYYVCFSCSDGSISGFYYDPNSSPFQKLELKTVNEGRSGFSFSSYELQ

SEQ ID NO: 2320 - protein, 144 aa, Arabidopsis thaliana
  peptide (1)..(144): Ceres Seq. ID no. 12604868
  misc_feature (1)..(144): NCBI GI NO: 29150393 NR Description: unknown protein
  misc_feature (1)..(99): NCBI GI NO: 15224341 NR Description: hypothetical protein; protein id: At2g37680.1
  misc_feature (57)..(144): NCBI GI NO: 34895748 NR Description: P0024G09.20
  misc_feature (1)..(132): NCBI GI NO: 40747141 NR Description: hypothetical protein AN1179.2
  misc_feature (1)..(131): NCBI GI NO: 34870809 NR Description: similar to RIKEN cDNA 4933439F18
  misc_feature (1)..(131): NCBI GI NO: 12848536 NR Description: unnamed protein product [Mus musculus]
  misc_feature (1)..(131): NCBI GI NO: 34328469 NR Description: RIKEN cDNA 4933439F18 [Mus musculus]
  misc_feature (1)..(131): NCBI GI NO: 23111007 NR Description: hypothetical protein MGC3048 [Homo sapiens]
  misc_feature (1)..(131): NCBI GI NO: 18676842 NR Description: unnamed protein product [Homo sapiens]
  misc_feature (1)..(131): NCBI GI NO: 32406292 NR Description: hypothetical protein [Neurospora crassa]
MEALNVPMADTPVITFWEGEIVDGKNYTFYTGKWEATREDDMRHWSKFPSFSPLQGQVESDGGRQLDLNNYPYIFMRWKEQYFVNVGTDCGLTIAGFYYVCFSCSDGSISGFYYDPNSSPFQKLELKTVNEGRSGFSFSSYELQ

SEQ ID NO: 2321 - DNA, 919 bp, Arabidopsis thaliana
  misc_feature (1)..(919): Ceres Seq. ID no. 12489522
acttaaaccctagtctagtcatttctcagactctgacctcactgatctccaatggcgaaaaccctagctcgctccacagcgtcacgcatcaccaagcgcttaatctccacctccggagccaccactccttccccttcttatatcctctcccgtcgatcaaccccggtgttctcccatgccgtcggattcatctcttccttgaatcgtttcacaacgattcgaactcgaatggataggtccggtggatcgtactctcctctaaaatccggttcgaatttcagcgaccgagcacccactgagatggcgccgttgtttcctggctgcgattatgagcattggttgattgtaatggacaaacctggaggcgaaaacgctactaagcagcaaatgattgattgttatgttcaaaccctagctaaaattatcggcagtgaggaagaagctaagaagaagatttataatgtatcgtgtgaaaggtattttggatttggttgtgagattgatgaagagacatcaaacaaacttgaaggacttcctggtgttctcttcattttaccagactcttatgttgatcaagagaacaaagattacggagctgagctgtttgtgaatggagaaatagttcaacgtcctccagagagacagagaaagatcattgagttaacgacccagagaaccaatgataaaccaaagtaccacgacaagaccagatatgtccgaagaagagagaacatgcgttgaatccaaatctgatatcagaccatacagaagttgttgttcaatgttcatgtgtctgcaagcaacagatgttttctgttttgaggtctctctctccttatgtaatggctttgtagtttggattttagaacttggaattggctaaaactattatcattgcatatacataatttggcctttg

SEQ ID NO: 2322 - protein, 229 aa, Arabidopsis thaliana
  peptide (1)..(229): Ceres Seq. ID no. 12489523
  misc_feature (1)..(229): NCBI GI NO: 15223247 NR Description: plastid protein, putative; protein id: At1g32580
  misc_feature (1)..(229): NCBI GI NO: 15226934 NR Description: unknown protein; protein id: At2g35240
  misc_feature (52)..(229): NCBI GI NO: 15226108 NR Description: plastid protein; protein id: At2g33430
  misc_feature (52)..(229): NCBI GI NO: 21617909 NR Description: plastid protein [Arabidopsis thaliana]
  misc_feature (52)..(229): NCBI GI NO: 25370552 NR Description: DAG protein homolog
  misc_feature (52)..(229): NCBI GI NO: 2440029 NR Description: DAL1 protein [Arabidopsis thaliana]
  misc_feature (8)..(229): NCBI GI NO: 34897972 NR Description: putative plastid protein
  misc_feature (19)..(227): NCBI GI NO: 38344141 NR Description: OSJNBa0041A02.8
  misc_feature (1)..(229): NCBI GI NO: 27754695 NR Description: putative DAG protein [Arabidopsis thaliana]
  misc_feature (1)..(229): NCBI GI NO: 15230785 NR Description: DAG protein, putative; protein id: At3g06790.1
MAKTLARSTASRITKRLISTSGATTPSPSYILSRRSTPVFSHAVGFISSLNRFTTIRTRMDRSGGSYSPLKSGSNFSDRAPTEMAPLFPGCDYEHWLIVMDKPGGENATKQQMIDCYVQTLAKIIGSEEEAKKKIYNVSCERYFGFGCEIDEETSNKLEGLPGVLFILPDSYVDQENKDYGAELFVNGEIVQRPPERQRKIIELTTQRTNDKPKYHDKTRYVRRRENMR

SEQ ID NO: 2323 - protein, 170 aa, Arabidopsis thaliana
  peptide (1)..(170): Ceres Seq. ID no. 12489524
  misc_feature (1)..(170): NCBI GI NO: 15223247 NR Description: plastid protein, putative; protein id: At1g32580
  misc_feature (1)..(170): NCBI GI NO: 15226934 NR Description: unknown protein; protein id: At2g35240
  misc_feature (1)..(170): NCBI GI NO: 15226108 NR Description: plastid protein; protein id: At2g33430
  misc_feature (1)..(170): NCBI GI NO: 25370552 NR Description: DAG protein homolog
  misc_feature (1)..(170): NCBI GI NO: 21617909 NR Description: plastid protein [Arabidopsis thaliana]
  misc_feature (1)..(170): NCBI GI NO: 2440029 NR Description: DAL1 protein [Arabidopsis thaliana]
  misc_feature (1)..(170): NCBI GI NO: 34897972 NR Description: putative plastid protein
  misc_feature (1)..(168): NCBI GI NO: 38344141 NR Description: OSJNBa0041A02.8
  misc_feature (1)..(170): NCBI GI NO: 27754695 NR Description: putative DAG protein [Arabidopsis thaliana]
  misc_feature (1)..(170): NCBI GI NO: 15230785 NR Description: DAG protein, putative; protein id: At3g06790.1
MDRSGGSYSPLKSGSNFSDRAPTEMAPLFPGCDYEHWLIVMDKPGGENATKQQMIDCYVQTLAKIIGSEEEAKKKIYNVSCERYFGFGCEIDEETSNKLEGLPGVLFILPDSYVDQENKDYGAELFVNGEIVQRPPERQRKIIELTTQRTNDKPKYHDKTRYVRRRENMR

SEQ ID NO: 2324 - protein, 146 aa, Arabidopsis thaliana
  peptide (1)..(146): Ceres Seq. ID no. 12489525
  misc_feature (1)..(146): NCBI GI NO: 15223247 NR Description: plastid protein, putative; protein id: At1g32580
  misc_feature (1)..(146): NCBI GI NO: 15226934 NR Description: unknown protein; protein id: At2g35240
  misc_feature (1)..(146): NCBI GI NO: 15226108 NR Description: plastid protein; protein id: At2g33430
  misc_feature (1)..(146): NCBI GI NO: 25370552 NR Description: DAG protein homolog
  misc_feature (1)..(146): NCBI GI NO: 21617909 NR Description: plastid protein [Arabidopsis thaliana]
  misc_feature (1)..(146): NCBI GI NO: 2440029 NR Description: DAL1 protein [Arabidopsis thaliana]
  misc_feature (1)..(146): NCBI GI NO: 34897972 NR Description: putative plastid protein
  misc_feature (1)..(144): NCBI GI NO: 38344141 NR Description: OSJNBa0041A02.8
  misc_feature (1)..(146): NCBI GI NO: 27754695 NR Description: putative DAG protein [Arabidopsis thaliana]
  misc_feature (1)..(146): NCBI GI NO: 15230785 NR Description: DAG protein, putative; protein id: At3g06790.1
MAPLFPGCDYEHWLIVMDKPGGENATKQQMIDCYVQTLAKIIGSEEEAKKKIYNVSCERYFGFGCEIDEETSNKLEGLPGVLFILPDSYVDQENKDYGAELFVNGEIVQRPPERQRKIIELTTQRTNDKPKYHDKTRYVRRRENMR

SEQ ID NO: 2325 - DNA, 985 bp, Arabidopsis thaliana
  misc_feature (1)..(985): Ceres Seq. ID no. 12330438
aaagccctaaaaatcagagattccattttctcttatctctctctctctctttctctttttccgattctgattctattttttcttcaccaaccacacaaaacaattctacgtttgatctcttcttctttctccgtccaaattaatctctacgtttaatttctcttgttcaatcatgggacacgaaacaatgacgccggcaacaacaacgctcgtgttcacgtacggaactctaaagagaggattctcaaatcatgtcctgatgcaagatctgatccgatctggtgacgcttctttcaaaggtgtttaccaaactctagacaaatatcctctcgtctgtggaccttaccgagtccctttcctcctcaacaaacctggatcgggctatcacgtcaacggcgagctttacgcggtttctcctcgcggtctctctcgtctcgacgagctcgaaggaatcagtcgcggtcattacatccggcaaccgatacgtctcgcggcggcggaggaagaagaagaagaagaaggagatctggaaacagaggcgccgtcgtcgtgcgtggtggaggcgtattacgctcataagagttatgaggaagagctgtggaggaggaatagaggaagatcattcggcgcgtacacggaaaacgaagcgcgtggatatgtgaaacgcaatgataggcctcagcatcttagcttcttggatcatatccgtattttcgtatcttctccatgtgattgatttttatttctttcgtggtctctcccgctcgtcgcttttctatgtttgtttgtttttttctcgggacaaaagaaacaaaaaaaaaaacacaaacacaaactagttttacaacttgtaagggtcccaccagtccgtccgtccgtcgtctccgtatcgatttgattagagagattgttgggtgtaaaacttatgattcccatcttaaataagttttaggttgtttttgagtttatggttaattttccagtt

SEQ ID NO: 2326 - protein, 187 aa, Arabidopsis thaliana
  peptide (1)..(187): Ceres Seq. ID no. 12330439
  misc_feature (21)..(136): Pfam Name: UPF0131 Pfam Description: Uncharacterised protein family
  misc_feature (1)..(187): NCBI GI NO: 18396380 NR Description: expressed protein; protein id: At3g02910
  misc_feature (1)..(187): NCBI GI NO: 21555032 NR Description: unknown [Arabidopsis thaliana]
  misc_feature (6)..(187): NCBI GI NO: 11387354 NR Description: Hypothetical protein At3g02910
  misc_feature (9)..(184): NCBI GI NO: 29126342 NR Description: unknown protein
  misc_feature (6)..(187): NCBI GI NO: 15237492 NR Description: unknown protein; protein id: At5g46720.1
  misc_feature (9)..(143): NCBI GI NO: 13279332 NR Description: Unknown (protein for IMAGE:2822295) [Homo sapiens]
  misc_feature (13)..(143): NCBI GI NO: 33875960 NR Description: LOC87769 protein [Homo sapiens]
  misc_feature (14)..(120): NCBI GI NO: 11387365 NR Description: Hypothetical protein CG2811
  misc_feature (14)..(112): NCBI GI NO: 28573638 NR Description: CG2811-PA [Drosophila melanogaster]
  misc_feature (14)..(112): NCBI GI NO: 34876150 NR Description: similar to cDNA sequence BC006662
MGHETMTPATTTLVFTYGTLKRGFSNHVLMQDLIRSGDASFKGVYQTLDKYPLVCGPYRVPFLLNKPGSGYHVNGELYAVSPRGLSRLDELEGISRGHYIRQPIRLAAAEEEEEEEGDLETEAPSSCVVEAYYAHKSYEEELWRRNRGRSFGAYTENEARGYVKRNDRPQHLSFLDHIRIFVSSPCD

SEQ ID NO: 2327 - protein, 182 aa, Arabidopsis thaliana
  peptide (1)..(182): Ceres Seq. ID no. 12330440
  misc_feature (16)..(131): Pfam Name: UPF0131 Pfam Description: Uncharacterised protein family
  misc_feature (1)..(182): NCBI GI NO: 18396380 NR Description: expressed protein; protein id: At3g02910
  misc_feature (1)..(182): NCBI GI NO: 21555032 NR Description: unknown [Arabidopsis thaliana]
  misc_feature (1)..(182): NCBI GI NO: 11387354 NR Description: Hypothetical protein At3g02910
  misc_feature (4)..(179): NCBI GI NO: 29126342 NR Description: unknown protein
  misc_feature (1)..(182): NCBI GI NO: 15237492 NR Description: unknown protein; protein id: At5g46720.1
  misc_feature (4)..(138): NCBI GI NO: 13279332 NR Description: Unknown (protein for IMAGE:2822295) [Homo sapiens]
  misc_feature (8)..(138): NCBI GI NO: 33875960 NR Description: LOC87769 protein [Homo sapiens]
  misc_feature (9)..(115): NCBI GI NO: 11387365 NR Description: Hypothetical protein CG2811
  misc_feature (9)..(107): NCBI GI NO: 28573638 NR Description: CG2811-PA [Drosophila melanogaster]
  misc_feature (9)..(107): NCBI GI NO: 34876150 NR Description: similar to cDNA sequence BC006662
MTPATTTLVFTYGTLKRGFSNHVLMQDLIRSGDASFKGVYQTLDKYPLVCGPYRVPFLLNKPGSGYHVNGELYAVSPRGLSRLDELEGISRGHYIRQPIRLAAAEEEEEEEGDLETEAPSSCVVEAYYAHKSYEEELWRRNRGRSFGAYTENEARGYVKRNDRPQHLSFLDHIRIFVSSPCD

SEQ ID NO: 2328 - protein, 158 aa, Arabidopsis thaliana
  peptide (1)..(158): Ceres Seq. ID no. 12330441
  misc_feature (1)..(107): Pfam Name: UPF0131 Pfam Description: Uncharacterised protein family
  misc_feature (1)..(158): NCBI GI NO: 18396380 NR Description: expressed protein; protein id: At3g02910
  misc_feature (1)..(158): NCBI GI NO: 21555032 NR Description: unknown [Arabidopsis thaliana]
  misc_feature (1)..(158): NCBI GI NO: 11387354 NR Description: Hypothetical protein At3g02910
  misc_feature (1)..(155): NCBI GI NO: 29126342 NR Description: unknown protein
  misc_feature (1)..(158): NCBI GI NO: 15237492 NR Description: unknown protein; protein id: At5g46720.1
  misc_feature (1)..(114): NCBI GI NO: 13279332 NR Description: Unknown (protein for IMAGE:2822295) [Homo sapiens]
  misc_feature (1)..(114): NCBI GI NO: 33875960 NR Description: LOC87769 protein [Homo sapiens]
  misc_feature (1)..(91): NCBI GI NO: 11387365 NR Description: Hypothetical protein CG2811
  misc_feature (1)..(83): NCBI GI NO: 28573638 NR Description: CG2811-PA [Drosophila melanogaster]
  misc_feature (1)..(83): NCBI GI NO: 34876150 NR Description: similar to cDNA sequence BC006662
MQDLIRSGDASFKGVYQTLDKYPLVCGPYRVPFLLNKPGSGYHVNGELYAVSPRGLSRLDELEGISRGHYIRQPIRLAAAEEEEEEEGDLETEAPSSCVVEAYYAHKSYEEELWRRNRGRSFGAYTENEARGYVKRNDRPQHLSFLDHIRIFVSSPCD

SEQ ID NO: 2329 - DNA, 2127 bp, Arabidopsis thaliana; identical to SEQ ID NO: 469
  misc_feature (1)..(2127): Ceres Seq. ID no. 13576329

SEQ ID NO: 2330 - protein, 614 aa, Arabidopsis thaliana; identical to SEQ ID NO: 470
  peptide (1)..(614): Ceres Seq. ID no. 13576330
  misc_feature (69)..(417): Pfam Name: Pfam Description:  Glycosyl hydrolases family 28
  misc_feature (1)..(481): NCBI GI NO: 18410809 NR Description: polygalacturonase, putative [Arabidopsis thaliana]
  misc_feature (1)..(309): NCBI GI NO: 17473561 NR Description: putative protein [Arabidopsis thaliana]
  misc_feature (2)..(193): NCBI GI NO: 24417492 NR Description: unknown [Arabidopsis thaliana]
  misc_feature (501)..(614): NCBI GI NO: 18410807 NR Description: expressed protein [Arabidopsis thaliana]
  misc_feature (501)..(613): NCBI GI NO: 15227917 NR Description: expressed protein [Arabidopsis thaliana]
  misc_feature (39)..(406): NCBI GI NO: 15890426 NR Description: AGR_L_619p [Agrobacterium tumefaciens]
  misc_feature (39)..(406): NCBI GI NO: 17938249 NR Description: polygalacturonase
  misc_feature (501)..(604): NCBI GI NO: 9858777 NR Description: BAC19.9 [Lycopersicon esculentum]
  misc_feature (45)..(389): NCBI GI NO: 36958630 NR Description: possible polygalacturonase [Rhizobium sp. NGR234]
  misc_feature (35)..(319): NCBI GI NO: 15238207 NR Description: polygalacturonase, putative [Arabidopsis thaliana]

SEQ ID NO: 2331 - protein, 613 aa, Arabidopsis thaliana; identical to SEQ ID NO: 471
  peptide (1)..(613): Ceres Seq. ID no. 13576331
  misc_feature (68)..(416): Pfam Name: Pfam Description:  Glycosyl hydrolases family 28
  misc_feature (1)..(480): NCBI GI NO: 18410809 NR Description: polygalacturonase, putative [Arabidopsis thaliana]
  misc_feature (1)..(308): NCBI GI NO: 17473561 NR Description: putative protein [Arabidopsis thaliana]
  misc_feature (1)..(192): NCBI GI NO: 24417492 NR Description: unknown [Arabidopsis thaliana]
  misc_feature (500)..(613): NCBI GI NO: 18410807 NR Description: expressed protein [Arabidopsis thaliana]
  misc_feature (500)..(612): NCBI GI NO: 15227917 NR Description: expressed protein [Arabidopsis thaliana]
  misc_feature (38)..(405): NCBI GI NO: 15890426 NR Description: AGR_L_619p [Agrobacterium tumefaciens]
  misc_feature (38)..(405): NCBI GI NO: 17938249 NR Description: polygalacturonase
  misc_feature (500)..(603): NCBI GI NO: 9858777 NR Description: BAC19.9 [Lycopersicon esculentum]
  misc_feature (44)..(388): NCBI GI NO: 36958630 NR Description: possible polygalacturonase [Rhizobium sp. NGR234]
  misc_feature (34)..(318): NCBI GI NO: 15238207 NR Description: polygalacturonase, putative [Arabidopsis thaliana]

SEQ ID NO: 2332 - protein, 458 aa, Arabidopsis thaliana; identical to SEQ ID NO: 472
  peptide (1)..(458): Ceres Seq. ID no. 13576332
  misc_feature (1)..(261): Pfam Name: Pfam Description:  Glycosyl hydrolases family 28
  misc_feature (1)..(325): NCBI GI NO: 18410809 NR Description: polygalacturonase, putative [Arabidopsis thaliana]
  misc_feature (1)..(153): NCBI GI NO: 17473561 NR Description: putative protein [Arabidopsis thaliana]
  misc_feature (1)..(37): NCBI GI NO: 24417492 NR Description: unknown [Arabidopsis thaliana]
  misc_feature (345)..(458): NCBI GI NO: 18410807 NR Description: expressed protein [Arabidopsis thaliana]
  misc_feature (345)..(457): NCBI GI NO: 15227917 NR Description: expressed protein [Arabidopsis thaliana]
  misc_feature (1)..(250): NCBI GI NO: 15890426 NR Description: AGR_L_619p [Agrobacterium tumefaciens]
  misc_feature (1)..(250): NCBI GI NO: 17938249 NR Description: polygalacturonase
  misc_feature (345)..(448): NCBI GI NO: 9858777 NR Description: BAC19.9 [Lycopersicon esculentum]
  misc_feature (1)..(233): NCBI GI NO: 36958630 NR Description: possible polygalacturonase [Rhizobium sp. NGR234]
  misc_feature (1)..(163): NCBI GI NO: 15238207 NR Description: polygalacturonase, putative [Arabidopsis thaliana]

SEQ ID NO: 2333 - DNA, 1198 bp, Arabidopsis thaliana
  misc_feature (1)..(1198): Ceres Seq. ID no. 12422047
acaagtcacaaccccaccatgcatgtcatatctctttcgttatcctcaatattctttttcctcttcctcacatcaaccattttgatttctccggtacaacccacaacctctaagcctccggcaccacggccccacagagagctctccgccgattactactccaagaaatgtcctcagcttgaaactctcgtcggttccgtcacttctcagcggttcaaagaagtccccatctcagctccagccaccattcgcctcttctttcacgactgcttcgttgagggttgtgatgggtcgatattgatagaaacaaagaaaggaagcaagaaattagcagagagagaagcatatgagaataaggaattgagagaggaaggatttgatagtatcatcaaggcgaaggccttggttgagtctcattgcccttctctcgtctcttgctctgatattctcgctattgccgctcgagatttcattcatctggcaggtgggccttactatcaagtgaaaaaaggaaggtgggacggaaaaagatcaacggcaaagaacgtccctccaaacatacctcgatcaaactccaccgttgatcaactcatcaagctcttcgcgtccaaaggactaaccgtagaggaactcgtcgtcctttctggttcccacaccatcggcttcgcccattgtaaaaatttccttggtcgtctctacgactacaaaggcacaaaacgacccgacccgagtcttgaccaaagattactaaaagagctccggatgtcttgtcctttttccggcggaagctctggagtcgtccttccgctcgacgctacaactccgtttgtgtttgataatggatatttcacaggtctaggaaccaacatgggccttctcgggtcggaccaagctttgttccttgacccgaggacgaagcccattgcacttgagatggcaagagataagcagaagtttctcaaggcgtttggagacgctatggataaaatgggttccattggtgtaaagagagggaagagacatggggaaatacgtacggattgtcgagtctttttatagattttctttattgtcttgtctgatggtttttgtcttgatcttgatgtgttctgtgtcatgtgtcctttaatttattagcattttcgtgattgttttgttgatagtataaggtatttttttaaagcaacactaacttatc

SEQ ID NO: 2334 - protein, 352 aa, Arabidopsis thaliana
  peptide (1)..(352): Ceres Seq. ID no. 12422048
  misc_feature (64)..(315): Pfam Name: Pfam Description:  Peroxidase
  misc_feature (7)..(352): NCBI GI NO: 15226205 NR Description: peroxidase, putative; protein id: At2g34060.1
  misc_feature (15)..(352): NCBI GI NO: 19347720 NR Description: putative peroxidase [Arabidopsis thaliana]
  misc_feature (47)..(351): NCBI GI NO: 17027271 NR Description: putative peroxidase
  misc_feature (43)..(350): NCBI GI NO: 7433086 NR Description: peroxidase (EC 1
  misc_feature (47)..(351): NCBI GI NO: 14485511 NR Description: putative peroxidase [Solanum tuberosum]
  misc_feature (47)..(351): NCBI GI NO: 28629828 NR Description: peroxidase 1 [Artemisia annua]
  misc_feature (47)..(351): NCBI GI NO: 15240737 NR Description: peroxidase, putative; protein id: At5g67400.1
  misc_feature (47)..(351): NCBI GI NO: 15241315 NR Description: peroxidase, putative; protein id: At5g14130
  misc_feature (42)..(351): NCBI GI NO: 7433082 NR Description: probable peroxidase (EC 1
  misc_feature (16)..(350): NCBI GI NO: 34905826 NR Description: putative peroxidase
TSHNPTMHVISLSLSSIFFFLFLTSTILISPVQPTTSKPPAPRPHRELSADYYSKKCPQLETLVGSVTSQRFKEVPISAPATIRLFFHDCFVEGCDGSILIETKKGSKKLAEREAYENKELREEGFDSIIKAKALVESHCPSLVSCSDILAIAARDFIHLAGGPYYQVKKGRWDGKRSTAKNVPPNIPRSNSTVDQLIKLFASKGLTVEELVVLSGSHTIGFAHCKNFLGRLYDYKGTKRPDPSLDQRLLKELRMSCPFSGGSSGVVLPLDATTPFVFDNGYFTGLGTNMGLLGSDQALFLDPRTKPIALEMARDKQKFLKAFGDAMDKMGSIGVKRGKRHGEIRTDCRVFL

SEQ ID NO: 2335 - protein, 346 aa, Arabidopsis thaliana
  peptide (1)..(346): Ceres Seq. ID no. 12422049
  misc_feature (58)..(309): Pfam Name: Pfam Description:  Peroxidase
  misc_feature (1)..(346): NCBI GI NO: 15226205 NR Description: peroxidase, putative; protein id: At2g34060.1
  misc_feature (9)..(346): NCBI GI NO: 19347720 NR Description: putative peroxidase [Arabidopsis thaliana]
  misc_feature (41)..(345): NCBI GI NO: 17027271 NR Description: putative peroxidase
  misc_feature (37)..(344): NCBI GI NO: 7433086 NR Description: peroxidase (EC 1
  misc_feature (41)..(345): NCBI GI NO: 14485511 NR Description: putative peroxidase [Solanum tuberosum]
  misc_feature (41)..(345): NCBI GI NO: 28629828 NR Description: peroxidase 1 [Artemisia annua]
  misc_feature (41)..(345): NCBI GI NO: 15240737 NR Description: peroxidase, putative; protein id: At5g67400.1
  misc_feature (41)..(345): NCBI GI NO: 15241315 NR Description: peroxidase, putative; protein id: At5g14130
  misc_feature (36)..(345): NCBI GI NO: 7433082 NR Description: probable peroxidase (EC 1
  misc_feature (10)..(344): NCBI GI NO: 34905826 NR Description: putative peroxidase
MHVISLSLSSIFFFLFLTSTILISPVQPTTSKPPAPRPHRELSADYYSKKCPQLETLVGSVTSQRFKEVPISAPATIRLFFHDCFVEGCDGSILIETKKGSKKLAEREAYENKELREEGFDSIIKAKALVESHCPSLVSCSDILAIAARDFIHLAGGPYYQVKKGRWDGKRSTAKNVPPNIPRSNSTVDQLIKLFASKGLTVEELVVLSGSHTIGFAHCKNFLGRLYDYKGTKRPDPSLDQRLLKELRMSCPFSGGSSGVVLPLDATTPFVFDNGYFTGLGTNMGLLGSDQALFLDPRTKPIALEMARDKQKFLKAFGDAMDKMGSIGVKRGKRHGEIRTDCRVFL

SEQ ID NO: 2336 - DNA, 1830 bp, Arabidopsis thaliana
  misc_feature (1)..(1830): Ceres Seq. ID no. 13592216
gaacaactaaactaattgacatttgacaataaaaagctgaactttattatgcatctctaggctttttccttgagagtttctctctttgaagtcatttacgtatatatatataaacccttgcaccattcttcttcgtcttgttaagcttttaagaatctctactcacattttctctgtaaaaatgggaactaggttccaatcattcttgctcgtgttcttgctttcatgtttaatcctcatatcaactgcctcgtgtgagcgaaatggtgatggaacgattagaattggattgaagaagaggaaactagaccggagcaacaggctagcttctcagctttttttgaaaaaccgagggtctcattggtctcccaaacactattttcgcctgaacgatgaaaatgcggatatggttccgctgaaaaactatttggatgctcaatactatggtgacattaccattggtactcctcctcagaagttcactgtgatctttgatactggtagctccaatctctggataccatctactaaatgttacctatcggttgcttgttatttccactccaagtacaaggctagccagtcatcgtcatatagaaagaacggaaaacccgcgtctatccgctatgggacgggtgctatttctggttactttagcaatgatgatgttaaagttggtgatattgttgtgaaagagcaggaattcatagaggctactagtgagcctggtataacattcttgctagcaaagtttgatggtatcctcggtttgggtttcaaagagatttctgtaggaaactcaactccggtttggtataacatggtagaaaaaggtttagttaaggaaccgattttttcgttctggcttaaccgtaacccgaaagatccagaaggcggtgagattgttttcggtggagtcgacccgaagcacttcaaaggagagcatacttttgttcctgtgacacataaaggttactggcagtttgacatgggtgatctccaaattgctggcaaaccaaccggatattgtgctaaaggttgttctgctattgctgattccggaacttctctgctcaccggtccatcgactgtcatcacgatgatcaatcacgcgataggagcacaaggaattgtaagccgtgaatgcaaggccgtggtggatcaatacggaaaaaccatgttgaattctcttctagctcaggaggatccgaagaaagtatgctcacaaattggagtctgcgcttatgatggtacacagagtgtgagtatggggatccagtcagttgtagacgatggaacatcgggtcttttaaaccaagcgatgtgcagtgcttgcgaaatggcagccgtgtggatggagagcgaattgactcagaatcaaacacaagaacgcatactcgcttatgctgctgagctatgtgaccatataccaacccaaaaccaacaatcagcagtggactgtgggagggtttcgtcgatgcctatagtcacattctcaattggtggcagaagctttgatctaactcctcaagactatatattcaagatcggggaaggagttgagtctcagtgcaccagcggtttcacggcaatggatattgctccgcctcgtggacctctctggatcttgggtgatatcttcatgggaccataccacacagtgttcgattatgggaaaggaagagttggattcgccaaagctgcttaaacaatatctcttctttaataccctcgttttttatatgatgtttgtgaatgtgtttgtaataacttaaaacatattgctatcctagaatggtatcatcttaatacagatttttatttggtttc

SEQ ID NO: 2337 - protein, 508 aa, Arabidopsis thaliana
  peptide (1)..(508): Ceres Seq. ID no. 13592217
  misc_feature (32)..(361): Pfam Name: Pfam Description:  Eukaryotic aspartyl protease
  misc_feature (1)..(508): NCBI GI NO: 15233518 NR Description: aspartic protease -related [Arabidopsis thaliana]
  misc_feature (1)..(508): NCBI GI NO: 21616053 NR Description: aspartic proteinase [Theobroma cacao]
  misc_feature (1)..(508): NCBI GI NO: 7435838 NR Description: probable aspartic proteinase (EC 3
  misc_feature (1)..(508): NCBI GI NO: 15186732 NR Description: aspartic proteinase 1 [Glycine max]
  misc_feature (11)..(508): NCBI GI NO: 15221141 NR Description: aspartic proteinase -related
  misc_feature (1)..(508): NCBI GI NO: 20800441 NR Description: aspartic proteinase [Vigna unguiculata]
  misc_feature (26)..(508): NCBI GI NO: 1354272 NR Description: aspartic proteinase [Arabidopsis thaliana]
  misc_feature (1)..(508): NCBI GI NO: 7435837 NR Description: aspartic proteinase (EC 3.4.23.-) - cowpea
  misc_feature (18)..(507): NCBI GI NO: 22330379 NR Description: aspartic protease -related [Arabidopsis thaliana]
  misc_feature (7)..(508): NCBI GI NO: 2811025 NR Description: Aspartic proteinase precursor
MGTRFQSFLLVFLLSCLILISTASCERNGDGTIRIGLKKRKLDRSNRLASQLFLKNRGSHWSPKHYFRLNDENADMVPLKNYLDAQYYGDITIGTPPQKFTVIFDTGSSNLWIPSTKCYLSVACYFHSKYKASQSSSYRKNGKPASIRYGTGAISGYFSNDDVKVGDIVVKEQEFIEATSEPGITFLLAKFDGILGLGFKEISVGNSTPVWYNMVEKGLVKEPIFSFWLNRNPKDPEGGEIVFGGVDPKHFKGEHTFVPVTHKGYWQFDMGDLQIAGKPTGYCAKGCSAIADSGTSLLTGPSTVITMINHAIGAQGIVSRECKAVVDQYGKTMLNSLLAQEDPKKVCSQIGVCAYDGTQSVSMGIQSVVDDGTSGLLNQAMCSACEMAAVWMESELTQNQTQERILAYAAELCDHIPTQNQQSAVDCGRVSSMPIVTFSIGGRSFDLTPQDYIFKIGEGVESQCTSGFTAMDIAPPRGPLWILGDIFMGPYHTVFDYGKGRVGFAKAA

SEQ ID NO: 2338 - protein, 433 aa, Arabidopsis thaliana
  peptide (1)..(433): Ceres Seq. ID no. 13592218
  misc_feature (1)..(286): Pfam Name: Pfam Description:  Eukaryotic aspartyl protease
  misc_feature (1)..(433): NCBI GI NO: 15233518 NR Description: aspartic protease -related [Arabidopsis thaliana]
  misc_feature (1)..(433): NCBI GI NO: 21616053 NR Description: aspartic proteinase [Theobroma cacao]
  misc_feature (1)..(433): NCBI GI NO: 7435838 NR Description: probable aspartic proteinase (EC 3
  misc_feature (1)..(433): NCBI GI NO: 15186732 NR Description: aspartic proteinase 1 [Glycine max]
  misc_feature (1)..(433): NCBI GI NO: 15221141 NR Description: aspartic proteinase -related
  misc_feature (1)..(433): NCBI GI NO: 20800441 NR Description: aspartic proteinase [Vigna unguiculata]
  misc_feature (1)..(433): NCBI GI NO: 1354272 NR Description: aspartic proteinase [Arabidopsis thaliana]
  misc_feature (1)..(433): NCBI GI NO: 7435837 NR Description: aspartic proteinase (EC 3.4.23.-) - cowpea
  misc_feature (1)..(432): NCBI GI NO: 22330379 NR Description: aspartic protease -related [Arabidopsis thaliana]
  misc_feature (1)..(433): NCBI GI NO: 2811025 NR Description: Aspartic proteinase precursor
MVPLKNYLDAQYYGDITIGTPPQKFTVIFDTGSSNLWIPSTKCYLSVACYFHSKYKASQSSSYRKNGKPASIRYGTGAISGYFSNDDVKVGDIVVKEQEFIEATSEPGITFLLAKFDGILGLGFKEISVGNSTPVWYNMVEKGLVKEPIFSFWLNRNPKDPEGGEIVFGGVDPKHFKGEHTFVPVTHKGYWQFDMGDLQIAGKPTGYCAKGCSAIADSGTSLLTGPSTVITMINHAIGAQGIVSRECKAVVDQYGKTMLNSLLAQEDPKKVCSQIGVCAYDGTQSVSMGIQSVVDDGTSGLLNQAMCSACEMAAVWMESELTQNQTQERILAYAAELCDHIPTQNQQSAVDCGRVSSMPIVTFSIGGRSFDLTPQDYIFKIGEGVESQCTSGFTAMDIAPPRGPLWILGDIFMGPYHTVFDYGKGRVGFAKAA

SEQ ID NO: 2339 - protein, 295 aa, Arabidopsis thaliana
  peptide (1)..(295): Ceres Seq. ID no. 13592219
  misc_feature (1)..(148): Pfam Name: Pfam Description:  Eukaryotic aspartyl protease
  misc_feature (1)..(295): NCBI GI NO: 15233518 NR Description: aspartic protease -related [Arabidopsis thaliana]
  misc_feature (1)..(295): NCBI GI NO: 21616053 NR Description: aspartic proteinase [Theobroma cacao]
  misc_feature (1)..(295): NCBI GI NO: 7435838 NR Description: probable aspartic proteinase (EC 3
  misc_feature (1)..(295): NCBI GI NO: 15186732 NR Description: aspartic proteinase 1 [Glycine max]
  misc_feature (1)..(295): NCBI GI NO: 15221141 NR Description: aspartic proteinase -related
  misc_feature (1)..(295): NCBI GI NO: 20800441 NR Description: aspartic proteinase [Vigna unguiculata]
  misc_feature (1)..(295): NCBI GI NO: 1354272 NR Description: aspartic proteinase [Arabidopsis thaliana]
  misc_feature (1)..(295): NCBI GI NO: 7435837 NR Description: aspartic proteinase (EC 3.4.23.-) - cowpea
  misc_feature (1)..(294): NCBI GI NO: 22330379 NR Description: aspartic protease -related [Arabidopsis thaliana]
  misc_feature (1)..(295): NCBI GI NO: 2811025 NR Description: Aspartic proteinase precursor
MVEKGLVKEPIFSFWLNRNPKDPEGGEIVFGGVDPKHFKGEHTFVPVTHKGYWQFDMGDLQIAGKPTGYCAKGCSAIADSGTSLLTGPSTVITMINHAIGAQGIVSRECKAVVDQYGKTMLNSLLAQEDPKKVCSQIGVCAYDGTQSVSMGIQSVVDDGTSGLLNQAMCSACEMAAVWMESELTQNQTQERILAYAAELCDHIPTQNQQSAVDCGRVSSMPIVTFSIGGRSFDLTPQDYIFKIGEGVESQCTSGFTAMDIAPPRGPLWILGDIFMGPYHTVFDYGKGRVGFAKAA

SEQ ID NO: 2340 - DNA, 1706 bp, Arabidopsis thaliana
  misc_feature (1)..(1706): Ceres Seq. ID no. 12336441
acacacacctctctttcctcaaaaaccctagatctctccctctctctctctctctctctccatctcttgtctttgccttttacgaagcttcccttcccttagtttatacattactctcagctctctttatttcactcagcttcacgttgaagacgagtttctctatttgccagatctgttatctttcacatttctggtgattgcttctctaatttcgttctgggttttactgtttccatctgaaatttacctcatttcttcgtgggttttatctgaattccgttaattcccaagttctagtgtatgatctcgttgaaatcgagttaaaaatctgatctttactcttgattctgcagatctgtttgaagaaagctatgacttgtgtttgataaagagagaagcaaaaaaaggaacagtttttatataaagatatttgctttatttgtttgttcttaattgttgccacgaaaatggcaatgccaccacctggaaatgttactactccgtctgagaaattgcagtttcctcctccggcaaattggatcccagacgagcgagatgggtttatctcctggcttcgtgcggagttcgctgcggctaacgcgatcatcgattcgctttgtcagcatctacaagcggttggggatcacaacgagtacgaatccgtgatcggaagcattcatcatcgtcgcttagcctggtctcaagtgcttactatgcagcagtttttcccagttgcagatgtttcttacaatcttcagcagattgcttggaaaaggcaacagcaaatgccacctcaaaggcattacaattctgatcaagttgggaaatttggagcaaggagatcagggcctgggtttaacaagcatcatggtggtggtgggggttacagaggagctgattcgatggcgagaaatgggcataatttcaatggcgttaacagtgatcgtgttgagcatcgggaggaagctaagttggcaagtgatgttaaggcattgtctgttgcagaagagaagagagatggtagcgagaaaccgaggagtgatagtaaagttgagaaaaaattggaagaatctgaaactcaagaggagatagtgaagaaccataagtgtaactcgggttctaaagataacagtctcatttctgagcaaaagcaggaggagaacgataaagagtgtcctgcaagcatggcaaagacttttgtggttcaagagatgtatgatgcaaaaatggttaatgttgtcgaaggattgaagctatacgacaaaatgcttgacgcaaacgaagtttctcaactcgtttctcttgtaaccaatctgagacttgctggaagaagaggtcaacttcaaagtgaggcatatgtgggttataaacggccaaatagaggacatggacgtgagatgatccaactcggtcttcctatagctgatacgccgcctgatgatgatagtatcaaagatcgaagaatagagccaatcccatcagctctttcagacatcattgaacgtttggtctcaaagcaaatcatacctgtgaaaccagacgcatgcatcattgatttcttcagcgagggagatcactcgcagcctcatatgtttgttccctggtttggacgacccatcagtgtcttgtccttgtctgaatctgattatacatttggaagagtcattgtctctgaaaatcccggcgactacaaaggctctctc

SEQ ID NO: 2341 - protein, 412 aa, Arabidopsis thaliana
  peptide (1)..(412): Ceres Seq. ID no. 12336442
  misc_feature (356)..(411): Pfam Name: II Pfam Description: 2OG-Fe
  misc_feature (1)..(411): NCBI GI NO: 18394153 NR Description: expressed protein; protein id: At1g14710.1
  misc_feature (1)..(331): NCBI GI NO: 8778238 NR Description: F10B6.11 [Arabidopsis thaliana]
  misc_feature (330)..(411): NCBI GI NO: 8778238 NR Description: F10B6.11 [Arabidopsis thaliana]
  misc_feature (1)..(177): NCBI GI NO: 37530586 NR Description: unknown protein
  misc_feature (244)..(411): NCBI GI NO: 37530586 NR Description: unknown protein
  misc_feature (178)..(411): NCBI GI NO: 15236223 NR Description: hypothetical protein; protein id: At4g02940
  misc_feature (6)..(111): NCBI GI NO: 15236223 NR Description: hypothetical protein; protein id: At4g02940
  misc_feature (215)..(411): NCBI GI NO: 25409091 NR Description: hypothetical protein At2g48080
  misc_feature (20)..(98): NCBI GI NO: 25409091 NR Description: hypothetical protein At2g48080
  misc_feature (215)..(411): NCBI GI NO: 30690892 NR Description: oxidoreductase, 2OG-Fe(II) oxygenase family
MAMPPPGNVTTPSEKLQFPPPANWIPDERDGFISWLRAEFAAANAIIDSLCQHLQAVGDHNEYESVIGSIHHRRLAWSQVLTMQQFFPVADVSYNLQQIAWKRQQQMPPQRHYNSDQVGKFGARRSGPGFNKHHGGGGGYRGADSMARNGHNFNGVNSDRVEHREEAKLASDVKALSVAEEKRDGSEKPRSDSKVEKKLEESETQEEIVKNHKCNSGSKDNSLISEQKQEENDKECPASMAKTFVVQEMYDAKMVNVVEGLKLYDKMLDANEVSQLVSLVTNLRLAGRRGQLQSEAYVGYKRPNRGHGREMIQLGLPIADTPPDDDSIKDRRIEPIPSALSDIIERLVSKQIIPVKPDACIIDFFSEGDHSQPHMFVPWFGRPISVLSLSESDYTFGRVIVSENPGDYKGSL

SEQ ID NO: 2342 - protein, 410 aa, Arabidopsis thaliana
  peptide (1)..(410): Ceres Seq. ID no. 12336443
  misc_feature (354)..(409): Pfam Name: II Pfam Description: 2OG-Fe
  misc_feature (1)..(409): NCBI GI NO: 18394153 NR Description: expressed protein; protein id: At1g14710.1
  misc_feature (1)..(329): NCBI GI NO: 8778238 NR Description: F10B6.11 [Arabidopsis thaliana]
  misc_feature (328)..(409): NCBI GI NO: 8778238 NR Description: F10B6.11 [Arabidopsis thaliana]
  misc_feature (1)..(175): NCBI GI NO: 37530586 NR Description: unknown protein
  misc_feature (242)..(409): NCBI GI NO: 37530586 NR Description: unknown protein
  misc_feature (176)..(409): NCBI GI NO: 15236223 NR Description: hypothetical protein; protein id: At4g02940
  misc_feature (4)..(109): NCBI GI NO: 15236223 NR Description: hypothetical protein; protein id: At4g02940
  misc_feature (213)..(409): NCBI GI NO: 25409091 NR Description: hypothetical protein At2g48080
  misc_feature (18)..(96): NCBI GI NO: 25409091 NR Description: hypothetical protein At2g48080
  misc_feature (213)..(409): NCBI GI NO: 30690892 NR Description: oxidoreductase, 2OG-Fe(II) oxygenase family
MPPPGNVTTPSEKLQFPPPANWIPDERDGFISWLRAEFAAANAIIDSLCQHLQAVGDHNEYESVIGSIHHRRLAWSQVLTMQQFFPVADVSYNLQQIAWKRQQQMPPQRHYNSDQVGKFGARRSGPGFNKHHGGGGGYRGADSMARNGHNFNGVNSDRVEHREEAKLASDVKALSVAEEKRDGSEKPRSDSKVEKKLEESETQEEIVKNHKCNSGSKDNSLISEQKQEENDKECPASMAKTFVVQEMYDAKMVNVVEGLKLYDKMLDANEVSQLVSLVTNLRLAGRRGQLQSEAYVGYKRPNRGHGREMIQLGLPIADTPPDDDSIKDRRIEPIPSALSDIIERLVSKQIIPVKPDACIIDFFSEGDHSQPHMFVPWFGRPISVLSLSESDYTFGRVIVSENPGDYKGSL

SEQ ID NO: 2343 - protein, 330 aa, Arabidopsis thaliana
  peptide (1)..(330): Ceres Seq. ID no. 12336444
  misc_feature (274)..(329): Pfam Name: II Pfam Description: 2OG-Fe
  misc_feature (1)..(329): NCBI GI NO: 18394153 NR Description: expressed protein; protein id: At1g14710.1
  misc_feature (1)..(249): NCBI GI NO: 8778238 NR Description: F10B6.11 [Arabidopsis thaliana]
  misc_feature (248)..(329): NCBI GI NO: 8778238 NR Description: F10B6.11 [Arabidopsis thaliana]
  misc_feature (1)..(95): NCBI GI NO: 37530586 NR Description: unknown protein
  misc_feature (162)..(329): NCBI GI NO: 37530586 NR Description: unknown protein
  misc_feature (96)..(329): NCBI GI NO: 15236223 NR Description: hypothetical protein; protein id: At4g02940
  misc_feature (1)..(29): NCBI GI NO: 15236223 NR Description: hypothetical protein; protein id: At4g02940
  misc_feature (133)..(329): NCBI GI NO: 25409091 NR Description: hypothetical protein At2g48080
  misc_feature (1)..(16): NCBI GI NO: 25409091 NR Description: hypothetical protein At2g48080
  misc_feature (133)..(329): NCBI GI NO: 30690892 NR Description: oxidoreductase, 2OG-Fe(II) oxygenase family
MQQFFPVADVSYNLQQIAWKRQQQMPPQRHYNSDQVGKFGARRSGPGFNKHHGGGGGYRGADSMARNGHNFNGVNSDRVEHREEAKLASDVKALSVAEEKRDGSEKPRSDSKVEKKLEESETQEEIVKNHKCNSGSKDNSLISEQKQEENDKECPASMAKTFVVQEMYDAKMVNVVEGLKLYDKMLDANEVSQLVSLVTNLRLAGRRGQLQSEAYVGYKRPNRGHGREMIQLGLPIADTPPDDDSIKDRRIEPIPSALSDIIERLVSKQIIPVKPDACIIDFFSEGDHSQPHMFVPWFGRPISVLSLSESDYTFGRVIVSENPGDYKGSL

SEQ ID NO: 2344 - DNA, 1235 bp, Arabidopsis thaliana
  misc_feature (1)..(1235): Ceres Seq. ID no. 12329563
aactaaatcagaagattactactaaacagagtcttttttgacttgccaaaaacacatctgtctctctctctctttgcggatctgaaatggcgattcctgttatcgatttctccaaactcaatggtgaagaaagagagaagacactgtctgaaatcgctagagcttgcgaagagtggggattttttcagctggtgaaccatggtattccattggagcttctaaataaggtgaagaagctgagctcagattgctacaaaacagagagagaagaagcattcaagacttctaatcccgtgaagttgctcaacgaattggttcaaaagaactctggcgagaagctagaaaacgtggactgggaagatgtcttcactctcttggaccataaccaaaacgaatggccatccaaaattaaagagactatgggagaatacagagaagaagtgaggaagctagcgagcaagatgatggaagtgatggatgagaatttgggtttgcctaaaggttacataaagaaagctttcaatgaaggaatggaagatggagaagagacagctttctttgggactaaagtcagccattaccctccttgtcctcatcctgagctagtcaatggccttcgagctcatactgatgcaggaggtgtcgttttgcttttccaagacgatgaatatgatggccttcaggtcttgaaagacggcgagtggatcgatgttcagcctctacctaatgccattgttatcaacactggtgatcagattgaagttcttagcaacggaaggtacaagagtgcgtggcacagggtggtggcgagggaggaaggaaacagaaggtctatagcttccttctacaatccgtcgtacaaggcggcgatagggccagccacggtggcggaagaggaaggaagtgagaagaagtatccaaagtttgtgtttggagattacatggatgtttatgcaaaccagaagttcatgcctaaagagcctcgttttctagctgtaaagtctctctaaatgtactattttatttatttttacagtactatcactgttttatctacacccattatgtattttctcttaagctataaatgccaaattatatagttaaaaatttggcatctgctctccaggctttatatttttttgtttttttttgttttgccatgtgatgtatgaatctttcttgtgtgacctatgttcttagtttttgaatataaatgtgtgtgcctttttctt

SEQ ID NO: 2345 - protein, 307 aa, Arabidopsis thaliana
  peptide (1)..(307): Ceres Seq. ID no. 12329564
  misc_feature (156)..(256): Pfam Name: II Pfam Description: 2OG-Fe
  misc_feature (1)..(307): NCBI GI NO: 21555054 NR Description: 1-aminocyclopropane-1-carboxylate oxidase
  misc_feature (1)..(307): NCBI GI NO: 18411485 NR Description: 1-aminocyclopropane-1-carboxylate oxidase
  misc_feature (1)..(307): NCBI GI NO: 25285689 NR Description: hypothetical protein F2P24.4
  misc_feature (1)..(307): NCBI GI NO: 28949891 NR Description: 1-aminocyclopropane-1-carboxylic acid oxidase
  misc_feature (1)..(307): NCBI GI NO: 27371996 NR Description: 1-aminocyclopropane-1-carboxylic acid oxidase
  misc_feature (1)..(307): NCBI GI NO: 12001828 NR Description: 1-aminocyclopropane-1-carboxylate oxidase
  misc_feature (1)..(307): NCBI GI NO: 25452792 NR Description: 1-aminocyclopropane-1-carboxylate oxidase
  misc_feature (1)..(306): NCBI GI NO: 7433217 NR Description: 1-aminocyclopropane-1-carboxylate oxidase (EC 1
  misc_feature (1)..(306): NCBI GI NO: 15220770 NR Description: ACC oxidase, putative; protein id: At1g62380
  misc_feature (1)..(306): NCBI GI NO: 25285704 NR Description: 1-aminocyclopropane-1-carboxylate oxidase (EC 1
MAIPVIDFSKLNGEEREKTLSEIARACEEWGFFQLVNHGIPLELLNKVKKLSSDCYKTEREEAFKTSNPVKLLNELVQKNSGEKLENVDWEDVFTLLDHNQNEWPSKIKETMGEYREEVRKLASKMMEVMDENLGLPKGYIKKAFNEGMEDGEETAFFGTKVSHYPPCPHPELVNGLRAHTDAGGVVLLFQDDEYDGLQVLKDGEWIDVQPLPNAIVINTGDQIEVLSNGRYKSAWHRVVAREEGNRRSIASFYNPSYKAAIGPATVAEEEGSEKKYPKFVFGDYMDVYANQKFMPKEPRFLAVKSL

SEQ ID NO: 2346 - protein, 196 aa, Arabidopsis thaliana
  peptide (1)..(196): Ceres Seq. ID no. 12329565
  misc_feature (45)..(145): Pfam Name: II Pfam Description: 2OG-Fe
  misc_feature (1)..(196): NCBI GI NO: 21555054 NR Description: 1-aminocyclopropane-1-carboxylate oxidase
  misc_feature (1)..(196): NCBI GI NO: 18411485 NR Description: 1-aminocyclopropane-1-carboxylate oxidase
  misc_feature (1)..(196): NCBI GI NO: 25285689 NR Description: hypothetical protein F2P24.4
  misc_feature (1)..(196): NCBI GI NO: 28949891 NR Description: 1-aminocyclopropane-1-carboxylic acid oxidase
  misc_feature (1)..(196): NCBI GI NO: 27371996 NR Description: 1-aminocyclopropane-1-carboxylic acid oxidase
  misc_feature (1)..(196): NCBI GI NO: 12001828 NR Description: 1-aminocyclopropane-1-carboxylate oxidase
  misc_feature (1)..(196): NCBI GI NO: 25452792 NR Description: 1-aminocyclopropane-1-carboxylate oxidase
  misc_feature (1)..(195): NCBI GI NO: 7433217 NR Description: 1-aminocyclopropane-1-carboxylate oxidase (EC 1
  misc_feature (1)..(195): NCBI GI NO: 15220770 NR Description: ACC oxidase, putative; protein id: At1g62380
  misc_feature (1)..(195): NCBI GI NO: 25285704 NR Description: 1-aminocyclopropane-1-carboxylate oxidase (EC 1
MGEYREEVRKLASKMMEVMDENLGLPKGYIKKAFNEGMEDGEETAFFGTKVSHYPPCPHPELVNGLRAHTDAGGVVLLFQDDEYDGLQVLKDGEWIDVQPLPNAIVINTGDQIEVLSNGRYKSAWHRVVAREEGNRRSIASFYNPSYKAAIGPATVAEEEGSEKKYPKFVFGDYMDVYANQKFMPKEPRFLAVKSL

SEQ ID NO: 2347 - protein, 182 aa, Arabidopsis thaliana
  peptide (1)..(182): Ceres Seq. ID no. 12329566
  misc_feature (31)..(131): Pfam Name: II Pfam Description: 2OG-Fe
  misc_feature (1)..(182): NCBI GI NO: 21555054 NR Description: 1-aminocyclopropane-1-carboxylate oxidase
  misc_feature (1)..(182): NCBI GI NO: 18411485 NR Description: 1-aminocyclopropane-1-carboxylate oxidase
  misc_feature (1)..(182): NCBI GI NO: 25285689 NR Description: hypothetical protein F2P24.4
  misc_feature (1)..(182): NCBI GI NO: 28949891 NR Description: 1-aminocyclopropane-1-carboxylic acid oxidase
  misc_feature (1)..(182): NCBI GI NO: 27371996 NR Description: 1-aminocyclopropane-1-carboxylic acid oxidase
  misc_feature (1)..(182): NCBI GI NO: 12001828 NR Description: 1-aminocyclopropane-1-carboxylate oxidase
  misc_feature (1)..(182): NCBI GI NO: 25452792 NR Description: 1-aminocyclopropane-1-carboxylate oxidase
  misc_feature (1)..(181): NCBI GI NO: 7433217 NR Description: 1-aminocyclopropane-1-carboxylate oxidase (EC 1
  misc_feature (1)..(181): NCBI GI NO: 15220770 NR Description: ACC oxidase, putative; protein id: At1g62380
  misc_feature (1)..(181): NCBI GI NO: 25285704 NR Description: 1-aminocyclopropane-1-carboxylate oxidase (EC 1
MMEVMDENLGLPKGYIKKAFNEGMEDGEETAFFGTKVSHYPPCPHPELVNGLRAHTDAGGVVLLFQDDEYDGLQVLKDGEWIDVQPLPNAIVINTGDQIEVLSNGRYKSAWHRVVAREEGNRRSIASFYNPSYKAAIGPATVAEEEGSEKKYPKFVFGDYMDVYANQKFMPKEPRFLAVKSL

SEQ ID NO: 2348 - DNA, 1810 bp, Arabidopsis thaliana
  misc_feature (1)..(1810): Ceres Seq. ID no. 12329567
accggaggcaaaaatcgtctctcgcttgagctgcgaagatgcaagcagtaaaaagatccaggagacatgttgaagaagagccaacaatggtagaacctaaaaccaagtacgatcgtcagctcaggatttggggggaggtaggtcaagcggccttggaagaagcgagtatctgtttactcaattgtggccctactggttccgaggctttgaagaatctcgtacttggtggtgttggtagcatcaccgttgttgatggatctaaggttcaatttggtgaccttgggaacaatttcatggtcgatgcgaagagtgttggccaatcaaaagccaaatctgtttgtgcgtttctccaagagcttaatgattctgttaacgccaagtttattgaggagaatccagacacgttgattactactaacccatctttcttctctcagttcactctcgttatagccactcagctggtggaagattcaatgttgaaacttgatagaatctgtcgagatgcaaacgttaagttggttttggttcgctcttatggccttgctgggtttgttcgcatctctgtaaaggagcaccccataattgactcaaaacctgatcattttcttgacgacctccgcctgaataatccatggcctgaactcaagagttttgtggagaccattgatctgaatgtatcagagccggccgctgcacataagcacataccttacgtcgtcattcttgtaaagatggctgaggagtgggctcaatcccatagtggtaatcttccctcaaccagggaagagaaaaaagagtttaaggatttggttaagtccaagatggtatctacggatgaagataactacaaagaagccattgaagccgctttcaaagtttttgctcctcgaggaatcagctcagaggttcaaaaattaattaatgatagttgtgctgaagtgaattcaaactcctcagctttttgggtgatggtagcggctctgaaggagtttgttttaaatgaaggtggtggagaggcaccccttgaaggttctataccagatatgacctcttcaacagaacactatatcaatttgcagaaaatctatttagccaaagccgaggctgattttcttgtcattgaggaacgagttaaaaacattttaaagaaaatcggtcgagatccgagcagcatcccaaaaccaacaatcaagagcttctgcaagaatgcaaggaaacttaaattgtgcagatatcgtatggtagaggacgagttcagaaatccttctgtaactgaaattcaaaagtatttagcggacgaggattacagtggtgcaatgggattttatattcttcttagagctgcggacagatttgctgccaactataacaagtttcctgggcagtttgatggaggaatggatgaggacatttctcgattaaaaactactgccttgagtcttcttaccgacttgggctgtaacggctcagtactcccagatgaccttatccatgagatgtgtcgctttggtgcctcagagattcatgtggtttctgcctttgttggaggaatcgcatctcaagaagtcatcaagcttgtcacaaagcagtttgttccgatgttggggacttacatcttcaatggcattgatcacaagtctcagttattgaaattgtagaagatctttccttaacacattggcttgaaacagagagaaagagctctatcatatattattcttctgattaaaagataatctttttgctactactgagaaacaaaattttcaatgacagttcagctgagaccatccgactcagaatcttc

SEQ ID NO: 2349 - protein, 540 aa, Arabidopsis thaliana
  peptide (1)..(540): Ceres Seq. ID no. 12329568
  misc_feature (40)..(176): Pfam Name: Pfam Description:  ThiF family
  misc_feature (1)..(540): NCBI GI NO: 15220442 NR Description: RUB-activating enzyme AXR1; protein id: At1g05180
  misc_feature (17)..(540): NCBI GI NO: 15225241 NR Description: putative ubiquitin activating enzyme
  misc_feature (19)..(540): NCBI GI NO: 29124137 NR Description: putative ubiquitin-activating enzyme
  misc_feature (19)..(540): NCBI GI NO: 29124136 NR Description: putative ubiquitin-activating enzyme
  misc_feature (14)..(540): NCBI GI NO: 21450341 NR Description: amyloid beta precursor protein binding protein 1
  misc_feature (23)..(540): NCBI GI NO: 40889581 NR Description: Chain A
  misc_feature (14)..(540): NCBI GI NO: 23274055 NR Description: amyloid beta precursor protein binding protein 1
  misc_feature (23)..(540): NCBI GI NO: 4502169 NR Description: amyloid beta precursor protein-binding protein 1
  misc_feature (17)..(540): NCBI GI NO: 33416343 NR Description: Unknown (protein for MGC:66148) [Danio rerio]
  misc_feature (23)..(540): NCBI GI NO: 14091760 NR Description: APP-binding protein 1 [Rattus norvegicus]
MQAVKRSRRHVEEEPTMVEPKTKYDRQLRIWGEVGQAALEEASICLLNCGPTGSEALKNLVLGGVGSITVVDGSKVQFGDLGNNFMVDAKSVGQSKAKSVCAFLQELNDSVNAKFIEENPDTLITTNPSFFSQFTLVIATQLVEDSMLKLDRICRDANVKLVLVRSYGLAGFVRISVKEHPIIDSKPDHFLDDLRLNNPWPELKSFVETIDLNVSEPAAAHKHIPYVVILVKMAEEWAQSHSGNLPSTREEKKEFKDLVKSKMVSTDEDNYKEAIEAAFKVFAPRGISSEVQKLINDSCAEVNSNSSAFWVMVAALKEFVLNEGGGEAPLEGSIPDMTSSTEHYINLQKIYLAKAEADFLVIEERVKNILKKIGRDPSSIPKPTIKSFCKNARKLKLCRYRMVEDEFRNPSVTEIQKYLADEDYSGAMGFYILLRAADRFAANYNKFPGQFDGGMDEDISRLKTTALSLLTDLGCNGSVLPDDLIHEMCRFGASEIHVVSAFVGGIASQEVIKLVTKQFVPMLGTYIFNGIDHKSQLLKL

SEQ ID NO: 2350 - protein, 524 aa, Arabidopsis thaliana
  peptide (1)..(524): Ceres Seq. ID no. 12329569
  misc_feature (24)..(160): Pfam Name: Pfam Description:  ThiF family
  misc_feature (1)..(524): NCBI GI NO: 15220442 NR Description: RUB-activating enzyme AXR1; protein id: At1g05180
  misc_feature (1)..(524): NCBI GI NO: 15225241 NR Description: putative ubiquitin activating enzyme
  misc_feature (3)..(524): NCBI GI NO: 29124137 NR Description: putative ubiquitin-activating enzyme
  misc_feature (3)..(524): NCBI GI NO: 29124136 NR Description: putative ubiquitin-activating enzyme
  misc_feature (1)..(524): NCBI GI NO: 21450341 NR Description: amyloid beta precursor protein binding protein 1
  misc_feature (7)..(524): NCBI GI NO: 40889581 NR Description: Chain A
  misc_feature (1)..(524): NCBI GI NO: 23274055 NR Description: amyloid beta precursor protein binding protein 1
  misc_feature (7)..(524): NCBI GI NO: 4502169 NR Description: amyloid beta precursor protein-binding protein 1
  misc_feature (1)..(524): NCBI GI NO: 33416343 NR Description: Unknown (protein for MGC:66148) [Danio rerio]
  misc_feature (7)..(524): NCBI GI NO: 14091760 NR Description: APP-binding protein 1 [Rattus norvegicus]
MVEPKTKYDRQLRIWGEVGQAALEEASICLLNCGPTGSEALKNLVLGGVGSITVVDGSKVQFGDLGNNFMVDAKSVGQSKAKSVCAFLQELNDSVNAKFIEENPDTLITTNPSFFSQFTLVIATQLVEDSMLKLDRICRDANVKLVLVRSYGLAGFVRISVKEHPIIDSKPDHFLDDLRLNNPWPELKSFVETIDLNVSEPAAAHKHIPYVVILVKMAEEWAQSHSGNLPSTREEKKEFKDLVKSKMVSTDEDNYKEAIEAAFKVFAPRGISSEVQKLINDSCAEVNSNSSAFWVMVAALKEFVLNEGGGEAPLEGSIPDMTSSTEHYINLQKIYLAKAEADFLVIEERVKNILKKIGRDPSSIPKPTIKSFCKNARKLKLCRYRMVEDEFRNPSVTEIQKYLADEDYSGAMGFYILLRAADRFAANYNKFPGQFDGGMDEDISRLKTTALSLLTDLGCNGSVLPDDLIHEMCRFGASEIHVVSAFVGGIASQEVIKLVTKQFVPMLGTYIFNGIDHKSQLLKL

SEQ ID NO: 2351 - protein, 455 aa, Arabidopsis thaliana
  peptide (1)..(455): Ceres Seq. ID no. 12329570
  misc_feature (1)..(91): Pfam Name: Pfam Description:  ThiF family
  misc_feature (1)..(455): NCBI GI NO: 15220442 NR Description: RUB-activating enzyme AXR1; protein id: At1g05180
  misc_feature (1)..(455): NCBI GI NO: 15225241 NR Description: putative ubiquitin activating enzyme
  misc_feature (1)..(455): NCBI GI NO: 29124137 NR Description: putative ubiquitin-activating enzyme
  misc_feature (1)..(455): NCBI GI NO: 29124136 NR Description: putative ubiquitin-activating enzyme
  misc_feature (1)..(455): NCBI GI NO: 21450341 NR Description: amyloid beta precursor protein binding protein 1
  misc_feature (1)..(455): NCBI GI NO: 40889581 NR Description: Chain A
  misc_feature (1)..(455): NCBI GI NO: 23274055 NR Description: amyloid beta precursor protein binding protein 1
  misc_feature (1)..(455): NCBI GI NO: 4502169 NR Description: amyloid beta precursor protein-binding protein 1
  misc_feature (1)..(455): NCBI GI NO: 33416343 NR Description: Unknown (protein for MGC:66148) [Danio rerio]
  misc_feature (1)..(455): NCBI GI NO: 14091760 NR Description: APP-binding protein 1 [Rattus norvegicus]
MVDAKSVGQSKAKSVCAFLQELNDSVNAKFIEENPDTLITTNPSFFSQFTLVIATQLVEDSMLKLDRICRDANVKLVLVRSYGLAGFVRISVKEHPIIDSKPDHFLDDLRLNNPWPELKSFVETIDLNVSEPAAAHKHIPYVVILVKMAEEWAQSHSGNLPSTREEKKEFKDLVKSKMVSTDEDNYKEAIEAAFKVFAPRGISSEVQKLINDSCAEVNSNSSAFWVMVAALKEFVLNEGGGEAPLEGSIPDMTSSTEHYINLQKIYLAKAEADFLVIEERVKNILKKIGRDPSSIPKPTIKSFCKNARKLKLCRYRMVEDEFRNPSVTEIQKYLADEDYSGAMGFYILLRAADRFAANYNKFPGQFDGGMDEDISRLKTTALSLLTDLGCNGSVLPDDLIHEMCRFGASEIHVVSAFVGGIASQEVIKLVTKQFVPMLGTYIFNGIDHKSQLLKL

SEQ ID NO: 2352 - DNA, 1264 bp, Arabidopsis thaliana
  misc_feature (1)..(1264): Ceres Seq. ID no. 12562497
  misc_feature (307)..(307): n is a, c, t, g, unknown, or other
  misc_feature (292)..(292): n is a, c, t, g, unknown, or other
tagagcttcataatccctagttgcccaaaaggattctgggttttgtgagaatgatgacgtcatgtcggaatatagatttaggtacgatgatgatggcatgtggttgtggccgtcgtcagtttccttcattagcgaagactgtttgtaagtttggtagcagcaatagaagctatggcggtctggtgactctgtttgagctagtagctgttgatctgcagactttgaatgacaatcttttatcgattgttggtgcggaaaatccggttttgatatctgcggctgagcagatttncggagctggtggtanaagaatgagaccgggtttggtattccttcacatgccacggcggaattagcaggcctaaatgaactaacaacagaacaccggcgtttggctgagatcatcgagatgatacacactgcaagcttgatacacgacgatgtgttagacgagagtgacatgcgaagaggaaaggaaacagttcatgagcttttcggcacaagagtagcggtgctagctggagatttcatgtttgctcaagcgtcatggtacttagcaaatctcgagaatcttgaagttattaagctcatcagtcaggtgatcaaagactttgcaagcggagagataaagcaggcgtccagcttatttgactgcgacaccaagctcgacgagtacttactcaaaagtttctacaagacagcctctttagtggctgcgagcaccaaaggagctgccattttcagcagagttgagcctgatgtgacagaacaaatgtacgagtttgggaagaatctcggtctctctttccagatagttgatgatattttggatttcactcagtcgacagagcagctcgggaagccagcagggagtgatttggctaaaggtaacttaacagcacctgtgattttcgctctggagagggagccaaggctaagagagatcattgagtcagagttttgtgaggcgggttctctggaagaagcgattgaagcggtgacaaaaggtggggggattaagagagcacaagaattggctagggagaaagctgatgacgctataaagaatctacagtgtctacctcgaagtggcttcaggtcggctctagaagatatggtgttgtataacctcgaaagaattgattagctttccaaaagaagttggaaacactgagacatgcttatagacttatagtacagtaaaacacacacaaaagaggaatgattgtaactcctatttcaaaagtaacaacacatgatttcg

SEQ ID NO: 2353 - protein, 245 aa, Arabidopsis thaliana
  peptide (1)..(245): Ceres Seq. ID no. 12562498
  misc_feature (1)..(199): Pfam Name: Pfam Description:  Polyprenyl synthetase
  misc_feature (1)..(245): NCBI GI NO: 25314331 NR Description: hypothetical protein T30F21.15
  misc_feature (1)..(245): NCBI GI NO: 30699332 NR Description: geranyl diphosphate synthase
  misc_feature (1)..(245): NCBI GI NO: 22329620 NR Description: geranyl diphosphate synthase
  misc_feature (1)..(245): NCBI GI NO: 25314280 NR Description: prenyl transferase homolog
  misc_feature (1)..(245): NCBI GI NO: 28393675 NR Description: putative geranyl diphosphate synthase
  misc_feature (1)..(244): NCBI GI NO: 16329171 NR Description: solanesyl diphosphate synthase
  misc_feature (1)..(244): NCBI GI NO: 22299300 NR Description: solanesyl diphosphate synthase
  misc_feature (1)..(244): NCBI GI NO: 23125555 NR Description: hypothetical protein [Nostoc punctiforme]
  misc_feature (1)..(244): NCBI GI NO: 17227592 NR Description: solanesyl diphosphate synthase
  misc_feature (1)..(241): NCBI GI NO: 11465411 NR Description: prenyl transferase [Cyanidium caldarium]
MIHTASLIHDDVLDESDMRRGKETVHELFGTRVAVLAGDFMFAQASWYLANLENLEVIKLISQVIKDFASGEIKQASSLFDCDTKLDEYLLKSFYKTASLVAASTKGAAIFSRVEPDVTEQMYEFGKNLGLSFQIVDDILDFTQSTEQLGKPAGSDLAKGNLTAPVIFALEREPRLREIIESEFCEAGSLEEAIEAVTKGGGIKRAQELAREKADDAIKNLQCLPRSGFRSALEDMVLYNLERID

SEQ ID NO: 2354 - protein, 228 aa, Arabidopsis thaliana
  peptide (1)..(228): Ceres Seq. ID no. 12562499
  misc_feature (1)..(182): Pfam Name: Pfam Description:  Polyprenyl synthetase
  misc_feature (1)..(228): NCBI GI NO: 25314331 NR Description: hypothetical protein T30F21.15
  misc_feature (1)..(228): NCBI GI NO: 30699332 NR Description: geranyl diphosphate synthase
  misc_feature (1)..(228): NCBI GI NO: 22329620 NR Description: geranyl diphosphate synthase
  misc_feature (1)..(228): NCBI GI NO: 25314280 NR Description: prenyl transferase homolog
  misc_feature (1)..(228): NCBI GI NO: 28393675 NR Description: putative geranyl diphosphate synthase
  misc_feature (1)..(227): NCBI GI NO: 16329171 NR Description: solanesyl diphosphate synthase
  misc_feature (1)..(227): NCBI GI NO: 22299300 NR Description: solanesyl diphosphate synthase
  misc_feature (1)..(227): NCBI GI NO: 23125555 NR Description: hypothetical protein [Nostoc punctiforme]
  misc_feature (1)..(227): NCBI GI NO: 17227592 NR Description: solanesyl diphosphate synthase
  misc_feature (1)..(224): NCBI GI NO: 11465411 NR Description: prenyl transferase [Cyanidium caldarium]
MRRGKETVHELFGTRVAVLAGDFMFAQASWYLANLENLEVIKLISQVIKDFASGEIKQASSLFDCDTKLDEYLLKSFYKTASLVAASTKGAAIFSRVEPDVTEQMYEFGKNLGLSFQIVDDILDFTQSTEQLGKPAGSDLAKGNLTAPVIFALEREPRLREIIESEFCEAGSLEEAIEAVTKGGGIKRAQELAREKADDAIKNLQCLPRSGFRSALEDMVLYNLERID

SEQ ID NO: 2355 - protein, 205 aa, Arabidopsis thaliana
  peptide (1)..(205): Ceres Seq. ID no. 12562500
  misc_feature (1)..(159): Pfam Name: Pfam Description:  Polyprenyl synthetase
  misc_feature (1)..(205): NCBI GI NO: 25314331 NR Description: hypothetical protein T30F21.15
  misc_feature (1)..(205): NCBI GI NO: 30699332 NR Description: geranyl diphosphate synthase
  misc_feature (1)..(205): NCBI GI NO: 22329620 NR Description: geranyl diphosphate synthase
  misc_feature (1)..(205): NCBI GI NO: 25314280 NR Description: prenyl transferase homolog
  misc_feature (1)..(205): NCBI GI NO: 28393675 NR Description: putative geranyl diphosphate synthase
  misc_feature (1)..(204): NCBI GI NO: 16329171 NR Description: solanesyl diphosphate synthase
  misc_feature (1)..(204): NCBI GI NO: 22299300 NR Description: solanesyl diphosphate synthase
  misc_feature (1)..(204): NCBI GI NO: 23125555 NR Description: hypothetical protein [Nostoc punctiforme]
  misc_feature (1)..(204): NCBI GI NO: 17227592 NR Description: solanesyl diphosphate synthase
  misc_feature (1)..(201): NCBI GI NO: 11465411 NR Description: prenyl transferase [Cyanidium caldarium]
MFAQASWYLANLENLEVIKLISQVIKDFASGEIKQASSLFDCDTKLDEYLLKSFYKTASLVAASTKGAAIFSRVEPDVTEQMYEFGKNLGLSFQIVDDILDFTQSTEQLGKPAGSDLAKGNLTAPVIFALEREPRLREIIESEFCEAGSLEEAIEAVTKGGGIKRAQELAREKADDAIKNLQCLPRSGFRSALEDMVLYNLERID

SEQ ID NO: 2356 - DNA, 1776 bp, Arabidopsis thaliana
  misc_feature (1)..(1776): Ceres Seq. ID no. 12562519
gtctcatcacttcccactttcctctctgcatttgttgtctctctctcctgaaaacccttgaattttgctacacgatctctgaaacgtgtctctttgactgacttcaatcttctttatcacttaccgtttctgggttttatgaagcaactgagctaataaaaagcttcttcttagactcggaagaagaaaaaaaacagaatctttattgtttaaagcttccaaattcgagaagagaatttgaaacgaccaagttcaggatattcgtttcttcgtctactttggtctcttcctcttctctttcgaaaagggtttattctgtcttaaaagaaacctttttgagagggtaaaaaaagcttcaattttcagagaaacacaaaaggcagaaacagagaaaaacaaatcatctaattcatgaaacagggttcaatgaatagatcgtgtctctgtagtgtcttaatcaccactgctctgatttgtggtgcttacttcatttgcaatgcttatcttgctaaagactttaaagagaagttgctgaagtgggaaatcactgataagatgcataacagtactgataagatgcagaatgcaacaacaaccagtacatgcaagaatttcaataagccagtgggtactgaagcactaccgcaaggaattatcgagaaaacatcgaacctggaaacacaacatctatggaactacgatgacacaaaaaagagaaggcctaaccattcgatgagtttgttagccatggcggtcggtatcaagcaaaaggagctagttaacaaagttatccaaaagtttcctcctcgagatttcgcggtcatgctttttcattatgatggtgttgtcgatgactggaagcagtatccatggaataatcatgcgattcatgtttccgtgatgaatcaaacaaaatggtggttcgccaagcgattcttgcatcccgatatagttgcagagtacgagtatatatttctttgggacgaagatcttggtgttggtcatttcaatcctcaacgatatctatctattgtcaaagaagaggggcttgagatatcgcaacctgctcttgacacttcaaaatcagaagtgcatcatcctataaccgctcgtcaaaaaaaatcaaaagttcatagaagaatgtataaatacaaaggtagcgggcgatgtgatgaccatagcaccaatcctccttgcatcgggtgggtggaaatgatggcacctgttttctctagagctgcatggagatgttcttggtatatgattcagaatgatttgatccatgcttggggtctggatacgcagcttggttattgtgctcaaggtgaccgaaagaaaaatgtcggtgttgttgatgcggagtacataattcattatggtcttccaacactcggtgtggttgaaaccgcttcaagcgctttgcggaatgagacagactcgaaatcaacggaatcattagagtctcgtgaagtggataatagaccagaagtgaggatgaaatcatttgtggagatgaagagattcaaggaacgttggaagaaagctgtgagggatgatacatgttgggttgatccgtattgaaatccgagcggtttaagtaaaccgaatcgaaccggattcttttccttgttgagtgtgctttgtggtccattgtataccattattttggtacatagattttgttttacttcgagaaaaattagtgtatttatgtgttttatggaccacagtgtagatttaacattttggagcattatacaaaagtgtttttgtgcc

SEQ ID NO: 2357 - protein, 389 aa, Arabidopsis thaliana
  peptide (1)..(389): Ceres Seq. ID no. 12562520
  misc_feature (14)..(84): Pfam Name: DUF707 Pfam Description: Protein of unknown function
  misc_feature (198)..(389): NCBI GI NO: 15233917 NR Description: putative protein; protein id: At4g18530.1
  misc_feature (1)..(84): NCBI GI NO: 15233917 NR Description: putative protein; protein id: At4g18530.1
  misc_feature (81)..(129): NCBI GI NO: 15233917 NR Description: putative protein; protein id: At4g18530.1
  misc_feature (62)..(389): NCBI GI NO: 19386727 NR Description: P0678F11.16
  misc_feature (27)..(389): NCBI GI NO: 22329488 NR Description: hypothetical protein; protein id: At1g11170
  misc_feature (40)..(387): NCBI GI NO: 15219892 NR Description: hypothetical protein; protein id: At1g61240.1
  misc_feature (31)..(389): NCBI GI NO: 33146749 NR Description: putative lysine ketoglutarate reductase trans-splicingrelated 1
  misc_feature (69)..(387): NCBI GI NO: 24636978 NR Description: lysine ketoglutarate reductase trans-splicing related 1
  misc_feature (98)..(328): NCBI GI NO: 34903420 NR Description: hypothetical protein~similar to Oryza sativa chromosome 1
  misc_feature (357)..(389): NCBI GI NO: 34903420 NR Description: hypothetical protein~similar to Oryza sativa chromosome 1
MKQGSMNRSCLCSVLITTALICGAYFICNAYLAKDFKEKLLKWEITDKMHNSTDKMQNATTTSTCKNFNKPVGTEALPQGIIEKTSNLETQHLWNYDDTKKRRPNHSMSLLAMAVGIKQKELVNKVIQKFPPRDFAVMLFHYDGVVDDWKQYPWNNHAIHVSVMNQTKWWFAKRFLHPDIVAEYEYIFLWDEDLGVGHFNPQRYLSIVKEEGLEISQPALDTSKSEVHHPITARQKKSKVHRRMYKYKGSGRCDDHSTNPPCIGWVEMMAPVFSRAAWRCSWYMIQNDLIHAWGLDTQLGYCAQGDRKKNVGVVDAEYIIHYGLPTLGVVETASSALRNETDSKSTESLESREVDNRPEVRMKSFVEMKRFKERWKKAVRDDTCWVDPY

SEQ ID NO: 2358 - protein, 384 aa, Arabidopsis thaliana
  peptide (1)..(384): Ceres Seq. ID no. 12562521
  misc_feature (9)..(79): Pfam Name: DUF707 Pfam Description: Protein of unknown function
  misc_feature (193)..(384): NCBI GI NO: 15233917 NR Description: putative protein; protein id: At4g18530.1
  misc_feature (1)..(79): NCBI GI NO: 15233917 NR Description: putative protein; protein id: At4g18530.1
  misc_feature (76)..(124): NCBI GI NO: 15233917 NR Description: putative protein; protein id: At4g18530.1
  misc_feature (57)..(384): NCBI GI NO: 19386727 NR Description: P0678F11.16
  misc_feature (22)..(384): NCBI GI NO: 22329488 NR Description: hypothetical protein; protein id: At1g11170
  misc_feature (35)..(382): NCBI GI NO: 15219892 NR Description: hypothetical protein; protein id: At1g61240.1
  misc_feature (26)..(384): NCBI GI NO: 33146749 NR Description: putative lysine ketoglutarate reductase trans-splicingrelated 1
  misc_feature (64)..(382): NCBI GI NO: 24636978 NR Description: lysine ketoglutarate reductase trans-splicing related 1
  misc_feature (93)..(323): NCBI GI NO: 34903420 NR Description: hypothetical protein~similar to Oryza sativa chromosome 1
  misc_feature (352)..(384): NCBI GI NO: 34903420 NR Description: hypothetical protein~similar to Oryza sativa chromosome 1
MNRSCLCSVLITTALICGAYFICNAYLAKDFKEKLLKWEITDKMHNSTDKMQNATTTSTCKNFNKPVGTEALPQGIIEKTSNLETQHLWNYDDTKKRRPNHSMSLLAMAVGIKQKELVNKVIQKFPPRDFAVMLFHYDGVVDDWKQYPWNNHAIHVSVMNQTKWWFAKRFLHPDIVAEYEYIFLWDEDLGVGHFNPQRYLSIVKEEGLEISQPALDTSKSEVHHPITARQKKSKVHRRMYKYKGSGRCDDHSTNPPCIGWVEMMAPVFSRAAWRCSWYMIQNDLIHAWGLDTQLGYCAQGDRKKNVGVVDAEYIIHYGLPTLGVVETASSALRNETDSKSTESLESREVDNRPEVRMKSFVEMKRFKERWKKAVRDDTCWVDPY

SEQ ID NO: 2359 - protein, 341 aa, Arabidopsis thaliana
  peptide (1)..(341): Ceres Seq. ID no. 12562522
  misc_feature (150)..(341): Pfam Name: DUF707 Pfam Description: Protein of unknown function
  misc_feature (150)..(341): NCBI GI NO: 15233917 NR Description: putative protein; protein id: At4g18530.1
  misc_feature (1)..(36): NCBI GI NO: 15233917 NR Description: putative protein; protein id: At4g18530.1
  misc_feature (33)..(81): NCBI GI NO: 15233917 NR Description: putative protein; protein id: At4g18530.1
  misc_feature (14)..(341): NCBI GI NO: 19386727 NR Description: P0678F11.16
  misc_feature (1)..(341): NCBI GI NO: 22329488 NR Description: hypothetical protein; protein id: At1g11170
  misc_feature (1)..(339): NCBI GI NO: 15219892 NR Description: hypothetical protein; protein id: At1g61240.1
  misc_feature (1)..(341): NCBI GI NO: 33146749 NR Description: putative lysine ketoglutarate reductase trans-splicingrelated 1
  misc_feature (21)..(339): NCBI GI NO: 24636978 NR Description: lysine ketoglutarate reductase trans-splicing related 1
  misc_feature (50)..(280): NCBI GI NO: 34903420 NR Description: hypothetical protein~similar to Oryza sativa chromosome 1
  misc_feature (309)..(341): NCBI GI NO: 34903420 NR Description: hypothetical protein~similar to Oryza sativa chromosome 1
MHNSTDKMQNATTTSTCKNFNKPVGTEALPQGIIEKTSNLETQHLWNYDDTKKRRPNHSMSLLAMAVGIKQKELVNKVIQKFPPRDFAVMLFHYDGVVDDWKQYPWNNHAIHVSVMNQTKWWFAKRFLHPDIVAEYEYIFLWDEDLGVGHFNPQRYLSIVKEEGLEISQPALDTSKSEVHHPITARQKKSKVHRRMYKYKGSGRCDDHSTNPPCIGWVEMMAPVFSRAAWRCSWYMIQNDLIHAWGLDTQLGYCAQGDRKKNVGVVDAEYIIHYGLPTLGVVETASSALRNETDSKSTESLESREVDNRPEVRMKSFVEMKRFKERWKKAVRDDTCWVDPY

SEQ ID NO: 2360 - DNA, 1351 bp, Arabidopsis thaliana
  misc_feature (1)..(1351): Ceres Seq. ID no. 13509099
aacctccactgttaataaactcaaacctctgcaattgtcttcttctcttcaactccatcatctccaccaccggcattctcgccggaatccaatggagcttaccagcttccatcgctcttctctcttattcctcatctcactaacattgatcattctcccgacgacaacaacttcaatcggagtaaactacggtcaaatcggagacaacctcccctccccaaccgacgtaatcccactaataaaatcaatcggagcaacaaaagtaaaactctacgacgcaaatccacaaatcctcaaagctttctccaacaccggaatcgaattcatcatcggactcggcaacgaatacctctccaaaatgaaagatccttcaaaagccttaacatggatcaaacaaaacgttactccatttttacctgcgactaacatcacatgcataactatcggtaacgaaatcctcgctctcaacgactcttcactcactaccaatctcctcccagcgatgcaaggagttcactctgctttaatcaccgccggtctctccgatcaaatctccgtcaccaccgcgcattctctctcgatcctcaaatcctcattcccaccttccgccggcgagtttcaaccggatctactcgattcgctaactccgatcttagaatttcaccggaaaactgattctccgttcttaatcaacgcgtatcctttcttcgcttacaaaggaaaccctaaagaagttcctttagatttcgttctgtttcaacctaatcaaggaatcgtagatccggccaccggttttcactacgataacatgttgttcgctcagatcgacgctgtctactctgctttagcggcggcggggtttaaatcgttgagagttgagatatcggagactgggtggccatcgaaaggtgacgacgatgaggtcggagctacgccggagaatgcgaagaggtataacggaaacttgattaagatgatgatgagtggtaaaaagactaaaacgcccttgaagcctaataatgatctaagtatttacgtttttgccctttttaatgagaatttgaaacctggtccgacgtcggagaggaattatggcttgtttaaacctgatgggactcaggcttattcacttgggtttgctttaaacgatgtcgtgagaggtgctagtggtggtggtaccggtggtgggaatagtagtagcggtggaggaagggataagtcaccggtgtttccggtttctccggtggccccggatagtgcgtccactggttatttagcaatttcggcttctccggtaacggtaagattcttcgaattttctttttcgttaaagttgatatcttttttttaa

SEQ ID NO: 2361 - protein, 449 aa, Arabidopsis thaliana
  peptide (1)..(449): Ceres Seq. ID no. 13509100
  misc_feature (59)..(379): Pfam Name: Pfam Description:  Glycosyl hydrolases family 17
  misc_feature (31)..(449): NCBI GI NO: 25316443 NR Description: CDS protein F9L11.6
  misc_feature (31)..(433): NCBI GI NO: 30692765 NR Description: glycosyl hydrolase family 17
  misc_feature (29)..(443): NCBI GI NO: 419789 NR Description: hypothetical protein - potato
  misc_feature (33)..(446): NCBI GI NO: 15238298 NR Description: glycosyl hydrolase family 17
  misc_feature (33)..(385): NCBI GI NO: 18401444 NR Description: glycosyl hydrolase family 17
  misc_feature (33)..(385): NCBI GI NO: 25316425 NR Description: probable beta-1,3-glucanase
  misc_feature (39)..(397): NCBI GI NO: 38346337 NR Description: OSJNBa0073L04.8
  misc_feature (58)..(430): NCBI GI NO: 6006371 NR Description: Similar to hypothetical protein - potato (S31196)
  misc_feature (31)..(390): NCBI GI NO: 34908492 NR Description: putative beta-1,3-glucanase
  misc_feature (44)..(407): NCBI GI NO: 25316444 NR Description: probable beta-1,3-glucanase
TSTVNKLKPLQLSSSLQLHHLHHRHSRRNPMELTSFHRSSLLFLISLTLIILPTTTTSIGVNYGQIGDNLPSPTDVIPLIKSIGATKVKLYDANPQILKAFSNTGIEFIIGLGNEYLSKMKDPSKALTWIKQNVTPFLPATNITCITIGNEILALNDSSLTTNLLPAMQGVHSALITAGLSDQISVTTAHSLSILKSSFPPSAGEFQPDLLDSLTPILEFHRKTDSPFLINAYPFFAYKGNPKEVPLDFVLFQPNQGIVDPATGFHYDNMLFAQIDAVYSALAAAGFKSLRVEISETGWPSKGDDDEVGATPENAKRYNGNLIKMMMSGKKTKTPLKPNNDLSIYVFALFNENLKPGPTSERNYGLFKPDGTQAYSLGFALNDVVRGASGGGTGGGNSSSGGGRDKSPVFPVSPVAPDSASTGYLAISASPVTVRFFEFSFSLKLISFF

SEQ ID NO: 2362 - protein, 419 aa, Arabidopsis thaliana
  peptide (1)..(419): Ceres Seq. ID no. 13509101
  misc_feature (29)..(349): Pfam Name: Pfam Description:  Glycosyl hydrolases family 17
  misc_feature (1)..(419): NCBI GI NO: 25316443 NR Description: CDS protein F9L11.6
  misc_feature (1)..(403): NCBI GI NO: 30692765 NR Description: glycosyl hydrolase family 17
  misc_feature (1)..(413): NCBI GI NO: 419789 NR Description: hypothetical protein - potato
  misc_feature (3)..(416): NCBI GI NO: 15238298 NR Description: glycosyl hydrolase family 17
  misc_feature (3)..(355): NCBI GI NO: 18401444 NR Description: glycosyl hydrolase family 17
  misc_feature (3)..(355): NCBI GI NO: 25316425 NR Description: probable beta-1,3-glucanase
  misc_feature (9)..(367): NCBI GI NO: 38346337 NR Description: OSJNBa0073L04.8
  misc_feature (28)..(400): NCBI GI NO: 6006371 NR Description: Similar to hypothetical protein - potato (S31196)
  misc_feature (1)..(360): NCBI GI NO: 34908492 NR Description: putative beta-1,3-glucanase
  misc_feature (14)..(377): NCBI GI NO: 25316444 NR Description: probable beta-1,3-glucanase
MELTSFHRSSLLFLISLTLIILPTTTTSIGVNYGQIGDNLPSPTDVIPLIKSIGATKVKLYDANPQILKAFSNTGIEFIIGLGNEYLSKMKDPSKALTWIKQNVTPFLPATNITCITIGNEILALNDSSLTTNLLPAMQGVHSALITAGLSDQISVTTAHSLSILKSSFPPSAGEFQPDLLDSLTPILEFHRKTDSPFLINAYPFFAYKGNPKEVPLDFVLFQPNQGIVDPATGFHYDNMLFAQIDAVYSALAAAGFKSLRVEISETGWPSKGDDDEVGATPENAKRYNGNLIKMMMSGKKTKTPLKPNNDLSIYVFALFNENLKPGPTSERNYGLFKPDGTQAYSLGFALNDVVRGASGGGTGGGNSSSGGGRDKSPVFPVSPVAPDSASTGYLAISASPVTVRFFEFSFSLKLISFF

SEQ ID NO: 2363 - protein, 330 aa, Arabidopsis thaliana
  peptide (1)..(330): Ceres Seq. ID no. 13509102
  misc_feature (1)..(260): Pfam Name: Pfam Description:  Glycosyl hydrolases family 17
  misc_feature (1)..(330): NCBI GI NO: 25316443 NR Description: CDS protein F9L11.6
  misc_feature (1)..(314): NCBI GI NO: 30692765 NR Description: glycosyl hydrolase family 17
  misc_feature (1)..(324): NCBI GI NO: 419789 NR Description: hypothetical protein - potato
  misc_feature (1)..(327): NCBI GI NO: 15238298 NR Description: glycosyl hydrolase family 17
  misc_feature (1)..(266): NCBI GI NO: 18401444 NR Description: glycosyl hydrolase family 17
  misc_feature (1)..(266): NCBI GI NO: 25316425 NR Description: probable beta-1,3-glucanase
  misc_feature (1)..(278): NCBI GI NO: 38346337 NR Description: OSJNBa0073L04.8
  misc_feature (1)..(311): NCBI GI NO: 6006371 NR Description: Similar to hypothetical protein - potato (S31196)
  misc_feature (1)..(271): NCBI GI NO: 34908492 NR Description: putative beta-1,3-glucanase
  misc_feature (1)..(288): NCBI GI NO: 25316444 NR Description: probable beta-1,3-glucanase
MKDPSKALTWIKQNVTPFLPATNITCITIGNEILALNDSSLTTNLLPAMQGVHSALITAGLSDQISVTTAHSLSILKSSFPPSAGEFQPDLLDSLTPILEFHRKTDSPFLINAYPFFAYKGNPKEVPLDFVLFQPNQGIVDPATGFHYDNMLFAQIDAVYSALAAAGFKSLRVEISETGWPSKGDDDEVGATPENAKRYNGNLIKMMMSGKKTKTPLKPNNDLSIYVFALFNENLKPGPTSERNYGLFKPDGTQAYSLGFALNDVVRGASGGGTGGGNSSSGGGRDKSPVFPVSPVAPDSASTGYLAISASPVTVRFFEFSFSLKLISFF

SEQ ID NO: 2364 - DNA, 730 bp, Arabidopsis thaliana
  misc_feature (1)..(730): Ceres Seq. ID no. 13509103
accatcacaacaatcaatcgcagcgccgattctccttcaaaaacttttcctaagtcgtcactttttacgatggcagaaacgaagaagatgatcatccttaagagctccgacggtgaatccttcgagatcgaggaagccgtcgctgttaagtcccagacgattaagcacatgattgaggacgactgtgccgataacggaattccacttcccaatgtcaccggagccatcctcgccaaggttattgagtattgcaagaagcacgttgaagccgctgctgaagctggtggagacaaggatttctatggttccgctgagaacgacgagcttaagaattgggacagcgaattcgtcaaagtcgatcagcctactctcttcgatctcatcttggctgcgaactatttgaacatcggtggacttcttgaccttacgtgcaaggccgtggctgatcagatgagaggcaaaactccagagcagatgcgtgcacacttcaacatcaagaacgattacacacctgaggaagaggcggaggttcgcaatgagaacaagtgggcgttcgagtgattggatcggatctgaagggtgtttaggaatctctagtctttctatttagatgtgtttagctttcaagatttcggattgttttttttttctttctttttctcttcgattggagttgtccttgtcgatgaaaacctaatgctttgttctactaacaacatctattggtttt

SEQ ID NO: 2365 - protein, 186 aa, Arabidopsis thaliana
  peptide (1)..(186): Ceres Seq. ID no. 13509104
  misc_feature (109)..(186): Pfam Name: Pfam Description:  Skp1 family, dimerisation domain
  misc_feature (24)..(186): NCBI GI NO: 18394828 NR Description: SKP1, putative [Arabidopsis thaliana]
  misc_feature (24)..(186): NCBI GI NO: 18400912 NR Description: E3 ubiquitin ligase SCF complex subunit SKP1/ASK1
  misc_feature (25)..(186): NCBI GI NO: 7378764 NR Description: putative kinetochore protein
  misc_feature (25)..(186): NCBI GI NO: 40644754 NR Description: putative SKP1 protein [Triticum aestivum]
  misc_feature (27)..(186): NCBI GI NO: 18958257 NR Description: kinetochore protein [Brassica juncea]
  misc_feature (27)..(186): NCBI GI NO: 18958259 NR Description: kinetochore protein [Brassica juncea]
  misc_feature (27)..(186): NCBI GI NO: 4959710 NR Description: Skp1 [Medicago sativa]
  misc_feature (27)..(186): NCBI GI NO: 18958253 NR Description: kinetochore protein [Brassica juncea]
  misc_feature (29)..(186): NCBI GI NO: 18410982 NR Description: E3 ubiquitin ligase SCF complex subunit
  misc_feature (27)..(186): NCBI GI NO: 3719211 NR Description: UIP2 [Arabidopsis thaliana]
TITTINRSADSPSKTFPKSSLFTMAETKKMIILKSSDGESFEIEEAVAVKSQTIKHMIEDDCADNGIPLPNVTGAILAKVIEYCKKHVEAAAEAGGDKDFYGSAENDELKNWDSEFVKVDQPTLFDLILAANYLNIGGLLDLTCKAVADQMRGKTPEQMRAHFNIKNDYTPEEEAEVRNENKWAFE

SEQ ID NO: 2366 - protein, 163 aa, Arabidopsis thaliana
  peptide (1)..(163): Ceres Seq. ID no. 13509105
  misc_feature (86)..(163): Pfam Name: Pfam Description:  Skp1 family, dimerisation domain
  misc_feature (1)..(163): NCBI GI NO: 18394828 NR Description: SKP1, putative [Arabidopsis thaliana]
  misc_feature (1)..(163): NCBI GI NO: 18400912 NR Description: E3 ubiquitin ligase SCF complex subunit SKP1/ASK1
  misc_feature (2)..(163): NCBI GI NO: 7378764 NR Description: putative kinetochore protein
  misc_feature (2)..(163): NCBI GI NO: 40644754 NR Description: putative SKP1 protein [Triticum aestivum]
  misc_feature (4)..(163): NCBI GI NO: 18958257 NR Description: kinetochore protein [Brassica juncea]
  misc_feature (4)..(163): NCBI GI NO: 18958259 NR Description: kinetochore protein [Brassica juncea]
  misc_feature (4)..(163): NCBI GI NO: 4959710 NR Description: Skp1 [Medicago sativa]
  misc_feature (4)..(163): NCBI GI NO: 18958253 NR Description: kinetochore protein [Brassica juncea]
  misc_feature (6)..(163): NCBI GI NO: 18410982 NR Description: E3 ubiquitin ligase SCF complex subunit
  misc_feature (4)..(163): NCBI GI NO: 3719211 NR Description: UIP2 [Arabidopsis thaliana]
MAETKKMIILKSSDGESFEIEEAVAVKSQTIKHMIEDDCADNGIPLPNVTGAILAKVIEYCKKHVEAAAEAGGDKDFYGSAENDELKNWDSEFVKVDQPTLFDLILAANYLNIGGLLDLTCKAVADQMRGKTPEQMRAHFNIKNDYTPEEEAEVRNENKWAFE

SEQ ID NO: 2367 - protein, 157 aa, Arabidopsis thaliana
  peptide (1)..(157): Ceres Seq. ID no. 13509106
  misc_feature (80)..(157): Pfam Name: Pfam Description:  Skp1 family, dimerisation domain
  misc_feature (1)..(157): NCBI GI NO: 18394828 NR Description: SKP1, putative [Arabidopsis thaliana]
  misc_feature (1)..(157): NCBI GI NO: 18400912 NR Description: E3 ubiquitin ligase SCF complex subunit SKP1/ASK1
  misc_feature (1)..(157): NCBI GI NO: 7378764 NR Description: putative kinetochore protein
  misc_feature (1)..(157): NCBI GI NO: 40644754 NR Description: putative SKP1 protein [Triticum aestivum]
  misc_feature (1)..(157): NCBI GI NO: 18958257 NR Description: kinetochore protein [Brassica juncea]
  misc_feature (1)..(157): NCBI GI NO: 18958259 NR Description: kinetochore protein [Brassica juncea]
  misc_feature (1)..(157): NCBI GI NO: 4959710 NR Description: Skp1 [Medicago sativa]
  misc_feature (1)..(157): NCBI GI NO: 18958253 NR Description: kinetochore protein [Brassica juncea]
  misc_feature (1)..(157): NCBI GI NO: 18410982 NR Description: E3 ubiquitin ligase SCF complex subunit
  misc_feature (1)..(157): NCBI GI NO: 3719211 NR Description: UIP2 [Arabidopsis thaliana]
MIILKSSDGESFEIEEAVAVKSQTIKHMIEDDCADNGIPLPNVTGAILAKVIEYCKKHVEAAAEAGGDKDFYGSAENDELKNWDSEFVKVDQPTLFDLILAANYLNIGGLLDLTCKAVADQMRGKTPEQMRAHFNIKNDYTPEEEAEVRNENKWAFE

SEQ ID NO: 2368 - DNA, 1661 bp, Arabidopsis thaliana
  misc_feature (1)..(1661): Ceres Seq. ID no. 12394544
atcaagaagaagtctctgctagttccaaaacagaacaagtgaatccctcaagtttcttattacaaaacccaaaaaccaaagtgaaccagtgttgttgtttgtactcacagatccatcctccactgattcatttcttgctctgcttcttctctcttagttttgttaagaatcttctcttatccattgtgttttttctattttataaatacatatataattttagttgggggagagcttgcctggtgtcgccttcttctctctctaagacttgtgcttaatttacggacatgtgaagatacttcgcttttgcctcatcgaagggcatgttagctatttacttatctcttctcttctcttctttgtcttgtgagctctcaaatcttcatagatacaaatcaagaaagtgatcaaacaaaaaaagaacaagtctttttggtatttcagatcgagaaaaaatgtggttgcaaggtttgaagtaatcttgcaatggattctttgactggatttagaatggaacccaaatggcaaattgatcctcagcttctctttgttggtccaaagattggtgaaggagctcatgctaaagtctatgagggaaaatacaagaatcagacagttgctataaagatagttcacagaggagaaacaccagaagagattgctaaaagagattcaagattccttagagaagtagaaatgctctcacgtgttcaacacaagaatttggtcaagttcattggtgcttgcaaggagcctgtaatggtgatagttacagaacttcttcaaggcggtacattgcgtaaatatctattaaacttgagacccgcatgtttggagactcgtgtggctatcggttttgcgcttgatattgctcgtggtatggaatgcttgcattcccatgggatcattcaccgtgatctcaaacccgagaacttgcttttaactgcagaccataaaacagtaaaactagcagattttggattagcaagagaagagtcactgactgagatgatgacggctgagacaggaacataccgatggatggcacctgagttgtacagcacggtaactcttcgattgggagagaagaagcactacaatcataaagtcgacgcctatagctttgcaatagttctttgggagcttttacacaataaattgccttttgagggaatgtcaaatctccaagcagcatatgcagcagccttcaaaaatgtgagaccaagcgcggagagcttaccggaggagttgggcgacattgtaacatcatgttggaatgaggatccgaatgctcggcccaacttcacgcatatcattgagttacttcttaactatctctctaaagttggatctccgatatccgctattccacaacggattcttgcttcgaagaacacgctattgccaccggattctcctggaactagctctttgatggctaagcttgatgaatgtggggaaactccaaaggccaaaagtgaagacaaacgaaaaggtttgtttttctgcttcaatcaatgttattaaccttgaaatcacagagtggttttaggaccagagatttggtagacatcactcaaattattcatgtaataatatcctccctaccatatgaatttagcaagaagttcatttatataaataaatagttatgtaactgt

SEQ ID NO: 2369 - protein, 346 aa, Arabidopsis thaliana
  peptide (1)..(346): Ceres Seq. ID no. 12394545
  misc_feature (1)..(346): NCBI GI NO: 15240630 NR Description: protein kinase ATN1-like protein
  misc_feature (1)..(342): NCBI GI NO: 15237443 NR Description: protein kinase - like protein
  misc_feature (3)..(346): NCBI GI NO: 32815816 NR Description: protein kinase [Cucumis sativus]
  misc_feature (7)..(340): NCBI GI NO: 2129698 NR Description: protein kinase ATN1 (EC 2
  misc_feature (7)..(340): NCBI GI NO: 15232197 NR Description: putative protein kinase, ATN1
  misc_feature (9)..(290): NCBI GI NO: 30679428 NR Description: protein kinase, putative [Arabidopsis thaliana]
  misc_feature (82)..(290): NCBI GI NO: 11259780 NR Description: protein kinase ATN1-like protein
  misc_feature (9)..(82): NCBI GI NO: 11259780 NR Description: protein kinase ATN1-like protein
  misc_feature (9)..(319): NCBI GI NO: 28876011 NR Description: putative protein kinase
  misc_feature (7)..(336): NCBI GI NO: 15240070 NR Description: protein kinase ATN1-like protein
MDSLTGFRMEPKWQIDPQLLFVGPKIGEGAHAKVYEGKYKNQTVAIKIVHRGETPEEIAKRDSRFLREVEMLSRVQHKNLVKFIGACKEPVMVIVTELLQGGTLRKYLLNLRPACLETRVAIGFALDIARGMECLHSHGIIHRDLKPENLLLTADHKTVKLADFGLAREESLTEMMTAETGTYRWMAPELYSTVTLRLGEKKHYNHKVDAYSFAIVLWELLHNKLPFEGMSNLQAAYAAAFKNVRPSAESLPEELGDIVTSCWNEDPNARPNFTHIIELLLNYLSKVGSPISAIPQRILASKNTLLPPDSPGTSSLMAKLDECGETPKAKSEDKRKGLFFCFNQCY

SEQ ID NO: 2370 - protein, 338 aa, Arabidopsis thaliana
  peptide (1)..(338): Ceres Seq. ID no. 12394546
  misc_feature (1)..(338): NCBI GI NO: 15240630 NR Description: protein kinase ATN1-like protein
  misc_feature (1)..(334): NCBI GI NO: 15237443 NR Description: protein kinase - like protein
  misc_feature (1)..(338): NCBI GI NO: 32815816 NR Description: protein kinase [Cucumis sativus]
  misc_feature (1)..(332): NCBI GI NO: 2129698 NR Description: protein kinase ATN1 (EC 2
  misc_feature (1)..(332): NCBI GI NO: 15232197 NR Description: putative protein kinase, ATN1
  misc_feature (1)..(282): NCBI GI NO: 30679428 NR Description: protein kinase, putative [Arabidopsis thaliana]
  misc_feature (74)..(282): NCBI GI NO: 11259780 NR Description: protein kinase ATN1-like protein
  misc_feature (1)..(74): NCBI GI NO: 11259780 NR Description: protein kinase ATN1-like protein
  misc_feature (1)..(311): NCBI GI NO: 28876011 NR Description: putative protein kinase
  misc_feature (1)..(328): NCBI GI NO: 15240070 NR Description: protein kinase ATN1-like protein
MEPKWQIDPQLLFVGPKIGEGAHAKVYEGKYKNQTVAIKIVHRGETPEEIAKRDSRFLREVEMLSRVQHKNLVKFIGACKEPVMVIVTELLQGGTLRKYLLNLRPACLETRVAIGFALDIARGMECLHSHGIIHRDLKPENLLLTADHKTVKLADFGLAREESLTEMMTAETGTYRWMAPELYSTVTLRLGEKKHYNHKVDAYSFAIVLWELLHNKLPFEGMSNLQAAYAAAFKNVRPSAESLPEELGDIVTSCWNEDPNARPNFTHIIELLLNYLSKVGSPISAIPQRILASKNTLLPPDSPGTSSLMAKLDECGETPKAKSEDKRKGLFFCFNQCY

SEQ ID NO: 2371 - protein, 276 aa, Arabidopsis thaliana
  peptide (1)..(276): Ceres Seq. ID no. 12394547
  misc_feature (1)..(276): NCBI GI NO: 15240630 NR Description: protein kinase ATN1-like protein
  misc_feature (1)..(272): NCBI GI NO: 15237443 NR Description: protein kinase - like protein
  misc_feature (1)..(276): NCBI GI NO: 32815816 NR Description: protein kinase [Cucumis sativus]
  misc_feature (1)..(270): NCBI GI NO: 2129698 NR Description: protein kinase ATN1 (EC 2
  misc_feature (1)..(270): NCBI GI NO: 15232197 NR Description: putative protein kinase, ATN1
  misc_feature (1)..(220): NCBI GI NO: 30679428 NR Description: protein kinase, putative [Arabidopsis thaliana]
  misc_feature (12)..(220): NCBI GI NO: 11259780 NR Description: protein kinase ATN1-like protein
  misc_feature (1)..(12): NCBI GI NO: 11259780 NR Description: protein kinase ATN1-like protein
  misc_feature (1)..(249): NCBI GI NO: 28876011 NR Description: putative protein kinase
  misc_feature (1)..(266): NCBI GI NO: 15240070 NR Description: protein kinase ATN1-like protein
MLSRVQHKNLVKFIGACKEPVMVIVTELLQGGTLRKYLLNLRPACLETRVAIGFALDIARGMECLHSHGIIHRDLKPENLLLTADHKTVKLADFGLAREESLTEMMTAETGTYRWMAPELYSTVTLRLGEKKHYNHKVDAYSFAIVLWELLHNKLPFEGMSNLQAAYAAAFKNVRPSAESLPEELGDIVTSCWNEDPNARPNFTHIIELLLNYLSKVGSPISAIPQRILASKNTLLPPDSPGTSSLMAKLDECGETPKAKSEDKRKGLFFCFNQCY

SEQ ID NO: 2372 - DNA, 889 bp, Arabidopsis thaliana
  misc_feature (1)..(889): Ceres Seq. ID no. 13575783
gtttcacgaacaaagaggcctgagtataaaaaaacaaatcggacgcttcgagtttttcttgaggaagaatccacacacacacagaagaagaatctcatcacgaattttagctatgggttggatctggattgacgattcatccgcctctaaagccggtgctgatctcaccgataaaccgctcggagattctgccgccgccgccgaaaattgctccacgaccacggtggtaagatctcagtgcaagacggaggaggtcgagcctggaaagttcgtcaggaaatgcgacaaaacagaagaaatcctccgccactgttttgggaagccctctgaagtcgttcaatccaacacagagcacacagaagaggatgtgacagaccagatggtgggaagatccgctcttccgaatcagtttgaggataaaaacccgctaaacttcccgggactccgcagagatgtagacgcgatcgaacgccatttcttgagcggaatgaagagtttctttgatgcggctgaagagatgacaagcagcttatttgatatcatgggagaccatcacccaagcaccaggagaggagggatacccattgaaaaccatcccaaggtagaggagcaccgcaatgacgaaactgcccctacacgaccacactcctctggcgagattgatctctcgggcttggccaaggacgtttgagaaaggtcgtctgcttcttcttcttcttctttttttttttcacaaaggtcgtcttgttctagcttttggcatatataatcttaaaaatgtaatgtgactttctaagaagcgtggggattgtagtctaatgttagcggcttgcacgtttttccgagtgggtgctactactatctatcaatatcatcatactactatatt

SEQ ID NO: 2373 - protein, 229 aa, Arabidopsis thaliana
  peptide (1)..(229): Ceres Seq. ID no. 13575784
  misc_feature (38)..(229): NCBI GI NO: 15227527 NR Description: expressed protein [Arabidopsis thaliana]
  misc_feature (38)..(113): NCBI GI NO: 34909928 NR Description: P0665A11.24
FHEQRGLSIKKQIGRFEFFLRKNPHTHRRRISSRILAMGWIWIDDSSASKAGADLTDKPLGDSAAAAENCSTTTVVRSQCKTEEVEPGKFVRKCDKTEEILRHCFGKPSEVVQSNTEHTEEDVTDQMVGRSALPNQFEDKNPLNFPGLRRDVDAIERHFLSGMKSFFDAAEEMTSSLFDIMGDHHPSTRRGGIPIENHPKVEEHRNDETAPTRPHSSGEIDLSGLAKDV

SEQ ID NO: 2374 - protein, 192 aa, Arabidopsis thaliana
  peptide (1)..(192): Ceres Seq. ID no. 13575785
  misc_feature (1)..(192): NCBI GI NO: 15227527 NR Description: expressed protein [Arabidopsis thaliana]
  misc_feature (1)..(76): NCBI GI NO: 34909928 NR Description: P0665A11.24
MGWIWIDDSSASKAGADLTDKPLGDSAAAAENCSTTTVVRSQCKTEEVEPGKFVRKCDKTEEILRHCFGKPSEVVQSNTEHTEEDVTDQMVGRSALPNQFEDKNPLNFPGLRRDVDAIERHFLSGMKSFFDAAEEMTSSLFDIMGDHHPSTRRGGIPIENHPKVEEHRNDETAPTRPHSSGEIDLSGLAKDV

SEQ ID NO: 2375 - DNA, 845 bp, Arabidopsis thaliana
  misc_feature (1)..(845): Ceres Seq. ID no. 12560096
aaatggcgatcatgcgataatcgtgtagccgaagaagaagaagaagaagaagaaagaagatggtgttttgggagataactctaggaacagcttacttcttgggactgagacggacttataggctcgctctgaagatccagcgtcggcttgttactccgaaacatcccaaaatccgtcaatttcttcatcggaggactcgtaaaatcttcgatgtggcgatttcggttcacaagaacatacaagaaagagacatagaagttggtaggaatctcggaaattggattcttcgttggctcgataagatgaaaccagcagctcagatccgtactcggccagaactaccacacaacagcaattccaacatggacaaggcaaagagactaacggaattgtcccgtcccaaatcgcacacgaacacgacgcagactccacaaaaccgtgaatccgataggcatttgtttacctcgttgaaagacttccggcacaagccattcccgtctgtctctatgatgatccaaccgccgagacccaatggaactacgactcagtacagacattactacagtggcggtctagcagcaagtctgattcaacccgagctatgttacaggtggcgggttcaatggtgtagtcaggaaagacattttgcagtggatggcacaaagatgaaagatgatgcagctaagtcccatctttctctgacataattgagcctctctcttttctttttttaacttttaattgcagaaattaatgtgattgttgatagatcctgaagcaactatgtagtaaacatgacaatgtctttttctttctaacgcttgaataaagtttcatatactttg

SEQ ID NO: 2376 - protein, 215 aa, Arabidopsis thaliana
  peptide (1)..(215): Ceres Seq. ID no. 12560097
  misc_feature (1)..(179): NCBI GI NO: 15222623 NR Description: hypothetical protein; protein id: At1g32260.1
  misc_feature (1)..(179): NCBI GI NO: 30686423 NR Description: expressed protein [Arabidopsis thaliana]
  misc_feature (45)..(179): NCBI GI NO: 25370789 NR Description: hypothetical protein At2g35480
MVFWEITLGTAYFLGLRRTYRLALKIQRRLVTPKHPKIRQFLHRRTRKIFDVAISVHKNIQERDIEVGRNLGNWILRWLDKMKPAAQIRTRPELPHNSNSNMDKAKRLTELSRPKSHTNTTQTPQNRESDRHLFTSLKDFRHKPFPSVSMMIQPPRPNGTTTQYRHYYSGGLAASLIQPELCYRWRVQWCSQERHFAVDGTKMKDDAAKSHLSLT

SEQ ID NO: 2377 - protein, 134 aa, Arabidopsis thaliana
  peptide (1)..(134): Ceres Seq. ID no. 12560098
  misc_feature (1)..(98): NCBI GI NO: 15222623 NR Description: hypothetical protein; protein id: At1g32260.1
  misc_feature (1)..(98): NCBI GI NO: 30686423 NR Description: expressed protein [Arabidopsis thaliana]
  misc_feature (1)..(98): NCBI GI NO: 25370789 NR Description: hypothetical protein At2g35480
MKPAAQIRTRPELPHNSNSNMDKAKRLTELSRPKSHTNTTQTPQNRESDRHLFTSLKDFRHKPFPSVSMMIQPPRPNGTTTQYRHYYSGGLAASLIQPELCYRWRVQWCSQERHFAVDGTKMKDDAAKSHLSLT

SEQ ID NO: 2378 - protein, 114 aa, Arabidopsis thaliana
  peptide (1)..(114): Ceres Seq. ID no. 12560099
  misc_feature (1)..(78): NCBI GI NO: 15222623 NR Description: hypothetical protein; protein id: At1g32260.1
  misc_feature (1)..(78): NCBI GI NO: 30686423 NR Description: expressed protein [Arabidopsis thaliana]
  misc_feature (1)..(78): NCBI GI NO: 25370789 NR Description: hypothetical protein At2g35480
MDKAKRLTELSRPKSHTNTTQTPQNRESDRHLFTSLKDFRHKPFPSVSMMIQPPRPNGTTTQYRHYYSGGLAASLIQPELCYRWRVQWCSQERHFAVDGTKMKDDAAKSHLSLT

SEQ ID NO: 2379 - DNA, 831 bp, Arabidopsis thaliana
  misc_feature (1)..(831): Ceres Seq. ID no. 13576640
aaaaatcgatcgaaacggttagcgaatcgaagcagagagagcttcaatggctgtcacttcttcctctatgctgctgcttcggaacttctctacggtgggaagagttgctcaatctgttcgtgtgacttcgaggatcttcttctccaccggagaattgattagggttcttccttatactcgttctaaaagattgatctgttctactcgtgctgctcataatgaagaagccgccgcgaaagctgcggcttctgttgctgacaccggagctccgaccatatttgacaagattatagcaaaagagattccctcagatattgtctatgaagatgaaaacgttttggcattcagagacattaaccctcaggctcctgttcatgttttggtcattcccaagttgagagatggcttgacctcgcttggcaaggctgaaccaagacacgtagaggttcttggccaacttctacatgcatcgaagattgttgctgagaaagaaggaatccttgatgggttccgtgtggttatcaacaacggtgttgaagcctgccaatctgtttaccatcttcatctgcacgtcctcggaggccgacagatgaaatggccacccggttaagaagaaagattcatgtcaacccaaagccaacgtgctccaaaattgtcaactacaatcctttcttatatggtttatgagtttttaccactatcggattttatccagttgtgaattcctagagattagatagcttccatttccaattgttatcgaattctttttcttttttcattgttagaaataaatactaacaatttatatgatatgagtagtttctctcc

SEQ ID NO: 2380 - protein, 187 aa, Arabidopsis thaliana
  peptide (1)..(187): Ceres Seq. ID no. 13576641
  misc_feature (1)..(187): NCBI GI NO: 15221629 NR Description: protein kinase C inhibitor
  misc_feature (1)..(168): NCBI GI NO: 25518144 NR Description: F28K20.9 protein - Arabidopsis thaliana
  misc_feature (167)..(187): NCBI GI NO: 25518144 NR Description: F28K20.9 protein - Arabidopsis thaliana
  misc_feature (58)..(187): NCBI GI NO: 629858 NR Description: protein kinase C inhibitor - maize
  misc_feature (61)..(187): NCBI GI NO: 1177047 NR Description: 14 KD ZINC-BINDING PROTEIN
  misc_feature (64)..(187): NCBI GI NO: 11260559 NR Description: protein kinase C inhibitor-like protein
  misc_feature (64)..(187): NCBI GI NO: 18410510 NR Description: protein kinase C inhibitor-related protein
  misc_feature (76)..(187): NCBI GI NO: 1177046 NR Description: 14 KD ZINC-BINDING PROTEIN
  misc_feature (80)..(187): NCBI GI NO: 23480654 NR Description: putative protein kinase C interacting protein 1
  misc_feature (56)..(187): NCBI GI NO: 23612841 NR Description: protein kinase c inhibitor-like protein, putative
MAVTSSSMLLLRNFSTVGRVAQSVRVTSRIFFSTGELIRVLPYTRSKRLICSTRAAHNEEAAAKAAASVADTGAPTIFDKIIAKEIPSDIVYEDENVLAFRDINPQAPVHVLVIPKLRDGLTSLGKAEPRHVEVLGQLLHASKIVAEKEGILDGFRVVINNGVEACQSVYHLHLHVLGGRQMKWPPG

SEQ ID NO: 2381 - protein, 180 aa, Arabidopsis thaliana
  peptide (1)..(180): Ceres Seq. ID no. 13576642
  misc_feature (1)..(180): NCBI GI NO: 15221629 NR Description: protein kinase C inhibitor
  misc_feature (1)..(161): NCBI GI NO: 25518144 NR Description: F28K20.9 protein - Arabidopsis thaliana
  misc_feature (160)..(180): NCBI GI NO: 25518144 NR Description: F28K20.9 protein - Arabidopsis thaliana
  misc_feature (51)..(180): NCBI GI NO: 629858 NR Description: protein kinase C inhibitor - maize
  misc_feature (54)..(180): NCBI GI NO: 1177047 NR Description: 14 KD ZINC-BINDING PROTEIN
  misc_feature (57)..(180): NCBI GI NO: 11260559 NR Description: protein kinase C inhibitor-like protein
  misc_feature (57)..(180): NCBI GI NO: 18410510 NR Description: protein kinase C inhibitor-related protein
  misc_feature (69)..(180): NCBI GI NO: 1177046 NR Description: 14 KD ZINC-BINDING PROTEIN
  misc_feature (73)..(180): NCBI GI NO: 23480654 NR Description: putative protein kinase C interacting protein 1
  misc_feature (49)..(180): NCBI GI NO: 23612841 NR Description: protein kinase c inhibitor-like protein, putative
MLLLRNFSTVGRVAQSVRVTSRIFFSTGELIRVLPYTRSKRLICSTRAAHNEEAAAKAAASVADTGAPTIFDKIIAKEIPSDIVYEDENVLAFRDINPQAPVHVLVIPKLRDGLTSLGKAEPRHVEVLGQLLHASKIVAEKEGILDGFRVVINNGVEACQSVYHLHLHVLGGRQMKWPPG

SEQ ID NO: 2382 - DNA, 845 bp, Arabidopsis thaliana
  misc_feature (1)..(845): Ceres Seq. ID no. 12357707
acaagtcaccaccatttctctctagaaaaaatctgaaaaacaaaaccatctcaaagtttcttgagaagaaaaaaagggtcaagaaagatgcctaaagacaggaatatcggaatcgccatggatttctcagagagcagcaagaacgctctgaaatgggcgatcgagaacttagcagacaaaggagacacgatttacatcatccacactctaccactctctggcgatgaatctcgtaactccctctggttcaaatccggttctcctctcataccgttggcagagtttagggaaccggagattatggagaaatacggtgtcaaaaccgacatcgcatgtcttgatatgctcgacactggttcgaggcagaaagaggtttttatccgaatcaacaatacatttttgttcaaagactctttggcaaagacaataactaatggtggttttgttgaaataaaaaggtgcatgtagtgaccaagttatactggggagatgcaagagagaagcttgttgatgctgttaaagatcttaaactcgattctattgtcatgggaagcagaggactcagtgctcttcaaaggataataatgggaagcgtgagcagctttgtgatccaacacgcgccttgccctgtcaccgttgtcaaggataacgaataaacgattctcactacaaaaaaaaaaaaaaaactgtctttatcttataagtcctaccaaataatcatcgcaatttatgctttttattttttattaataaaagaatctttatgttggttttatttgtaatttgactacaacaaaaaaagaacccagagtgttttcatcttctagttttgagagtttcttgct

SEQ ID NO: 2383 - protein, 126 aa, Arabidopsis thaliana
  peptide (1)..(126): Ceres Seq. ID no. 12357708
  misc_feature (4)..(98): Pfam Name: Pfam Description:  Universal stress protein family
  misc_feature (1)..(98): NCBI GI NO: 30693971 NR Description: expressed protein [Arabidopsis thaliana]
  misc_feature (1)..(126): NCBI GI NO: 21555070 NR Description: unknown [Arabidopsis thaliana]
  misc_feature (3)..(98): NCBI GI NO: 11602751 NR Description: ENOD18 protein [Vicia faba]
  misc_feature (1)..(98): NCBI GI NO: 11602747 NR Description: early nodulin ENOD18 [Vicia faba]
  misc_feature (1)..(98): NCBI GI NO: 11602749 NR Description: early nodulin ENOD18 [Vicia faba]
  misc_feature (1)..(96): NCBI GI NO: 30678807 NR Description: expressed protein [Arabidopsis thaliana]
  misc_feature (4)..(98): NCBI GI NO: 20160561 NR Description: P0414E03.3
  misc_feature (1)..(96): NCBI GI NO: 18396497 NR Description: expressed protein; protein id: At3g03270
  misc_feature (5)..(98): NCBI GI NO: 18401345 NR Description: expressed protein; protein id: At3g17020
  misc_feature (5)..(100): NCBI GI NO: 15528707 NR Description: P0583G08.8
MPKDRNIGIAMDFSESSKNALKWAIENLADKGDTIYIIHTLPLSGDESRNSLWFKSGSPLIPLAEFREPEIMEKYGVKTDIACLDMLDTGSRQKEVFIRINNTFLFKDSLAKTITNGGFVEIKRCM

SEQ ID NO: 2384 - protein, 116 aa, Arabidopsis thaliana
  peptide (1)..(116): Ceres Seq. ID no. 12357709
  misc_feature (1)..(88): Pfam Name: Pfam Description:  Universal stress protein family
  misc_feature (1)..(88): NCBI GI NO: 30693971 NR Description: expressed protein [Arabidopsis thaliana]
  misc_feature (1)..(116): NCBI GI NO: 21555070 NR Description: unknown [Arabidopsis thaliana]
  misc_feature (1)..(88): NCBI GI NO: 11602751 NR Description: ENOD18 protein [Vicia faba]
  misc_feature (1)..(88): NCBI GI NO: 11602747 NR Description: early nodulin ENOD18 [Vicia faba]
  misc_feature (1)..(88): NCBI GI NO: 11602749 NR Description: early nodulin ENOD18 [Vicia faba]
  misc_feature (1)..(86): NCBI GI NO: 30678807 NR Description: expressed protein [Arabidopsis thaliana]
  misc_feature (1)..(88): NCBI GI NO: 20160561 NR Description: P0414E03.3
  misc_feature (1)..(86): NCBI GI NO: 18396497 NR Description: expressed protein; protein id: At3g03270
  misc_feature (1)..(88): NCBI GI NO: 18401345 NR Description: expressed protein; protein id: At3g17020
  misc_feature (1)..(90): NCBI GI NO: 15528707 NR Description: P0583G08.8
MDFSESSKNALKWAIENLADKGDTIYIIHTLPLSGDESRNSLWFKSGSPLIPLAEFREPEIMEKYGVKTDIACLDMLDTGSRQKEVFIRINNTFLFKDSLAKTITNGGFVEIKRCM

SEQ ID NO: 2385 - protein, 68 aa, Arabidopsis thaliana
  peptide (1)..(68): Ceres Seq. ID no. 12357710
MNLVTPSGSNPVLLSYRWQSLGNRRLWRNTVSKPTSHVLICSTLVRGRKRFLSESTIHFCSKTLWQRQ

SEQ ID NO: 2386 - DNA, 1885 bp, Arabidopsis thaliana
  misc_feature (1)..(1885): Ceres Seq. ID no. 12394454
cacacattcttgcagaaggttttagaatcacaaagcataactcacctacccctaaaccaactccaatttctctcctcctctattaaatctttctcaatcatctttctttgagtcttttgccttggaatcctgatcatggcgtcttctctcacttccaaatccattctcggatgcaccaaacccgcttcttcttcttttcttccgtcggagctccgtcgtctctcttctcccgccgttcagatatctctccattcacaaaccaggaagaacttccggcagtcgtggggattgaagaagagtgatctgatgctaaatggttctgagattcgtcctgtgaaggttagggcttctgtttccacggcggagaaagcttcggagattgtgcttcaacccattagagaaatctcgggtctcattaagcttcctggctccaagtctctctctaatcgaattctgcttctcgctgctctatctgagggaactactgtagtggacaacttgttgaacagtgatgacatcaattacatgcttgatgcgttgaagatattgggacttaatgtggaaactcacagtgaaaacaatcgtgctgtagttgaaggatgtggcggggtatttccagcttccattgattccaagagtgatatcgaactttacctcggcaatgcaggaacagcaatgcgtccacttaccgccgcagttactgctgcaggtggcaacgcaagttatgtccttgatggggtgcctcggatgagagagagacctataggggatttggttgttggtcttaagcagcttggtgctgatgttgaatgtactcttggcactaactgccctcctgttcgtgtcaacgctaatggtggccttcctggtggaaaggtgaagctttctggatctattagtagtcagtacttgaccgctctgctcatggcagctcccttagctcttggagacgtcgaaattgaaattgtcgataaattgatttctgttccgtatgttgaaatgacattgaagttgatggaacgttttggggtaagtgctgagcatagtgaaagctgggatcgtttctttgttaagggtgggcaaaaatacaagtcgccgggtaatgcttacgtagaaggtgatgcttctagtgctagttatttcctggctggtgctgccattaccggtgaaactgtcactgttgaaggttgtggaacgaccagtttgcagggagatgtgaaatttgccgaggttcttgagaaaatgggatgtaaagtgtcctggacagagaacagtgtgactgtgacagggccgtctagagatgcttttggaatgagacacttgcgggctattgatgtcaacatgaacaaaatgcctgatgtagcaatgactcttgccgtcgttgctctctttgccgatggtccaaccaccattagagatgtggctagctggagagtaaaggagacggaaaggatgattgccatttgcacagagcttagaaaactgggagctacagtggaagaaggttcagattattgtgtgattactccgccgaaaaaggtgaaaccggcagagattgatacatatgatgatcatagaatggcaatggcattctctcttgcagcttgtgctgatgttccaatcaccatcaatgaccccggttgcaccaggaaaaccttccccgactacttccaagtccttgaaagaatcacaaagcattaaacaaaaaaactctaaaatctccactgttttttcttctgatccaagcttatctgtttccatttttcttgtctctgtaacattattagaaagcaagagtagtgtttgtttgtgtgtacctgaactgagtgagatttgagatgcaatcattgaatcggctttggtatatcattttactctgttttcc

SEQ ID NO: 2387 - protein, 521 aa, Arabidopsis thaliana
  peptide (1)..(521): Ceres Seq. ID no. 12394455
  misc_feature (1)..(521): NCBI GI NO: 15221986 NR Description: 5-enolpyruvylshikimate-3-phosphate
  misc_feature (1)..(521): NCBI GI NO: 21555078 NR Description: 5-enolpyruvylshikimate-3-phosphate
  misc_feature (19)..(521): NCBI GI NO: 18251236 NR Description: 5-enolpyruvylshikimate-3-phosphate synthase
  misc_feature (12)..(521): NCBI GI NO: 15225450 NR Description: 5-enolpyruvylshikimate-3-phosphate
  misc_feature (12)..(521): NCBI GI NO: 66618 NR Description: 3-phosphoshikimate 1-carboxyvinyltransferase (EC 2
  misc_feature (24)..(521): NCBI GI NO: 114171 NR Description: 3-phosphoshikimate 1-carboxyvinyltransferase
  misc_feature (12)..(521): NCBI GI NO: 1351978 NR Description: 3-phosphoshikimate 1-carboxyvinyltransferase
  misc_feature (12)..(521): NCBI GI NO: 114165 NR Description: 3-phosphoshikimate 1-carboxyvinyltransferase 1
  misc_feature (32)..(521): NCBI GI NO: 66619 NR Description: 3-phosphoshikimate 1-carboxyvinyltransferase (EC 2
  misc_feature (40)..(521): NCBI GI NO: 114176 NR Description: 3-phosphoshikimate 1-carboxyvinyltransferase
MASSLTSKSILGCTKPASSSFLPSELRRLSSPAVQISLHSQTRKNFRQSWGLKKSDLMLNGSEIRPVKVRASVSTAEKASEIVLQPIREISGLIKLPGSKSLSNRILLLAALSEGTTVVDNLLNSDDINYMLDALKILGLNVETHSENNRAVVEGCGGVFPASIDSKSDIELYLGNAGTAMRPLTAAVTAAGGNASYVLDGVPRMRERPIGDLVVGLKQLGADVECTLGTNCPPVRVNANGGLPGGKVKLSGSISSQYLTALLMAAPLALGDVEIEIVDKLISVPYVEMTLKLMERFGVSAEHSESWDRFFVKGGQKYKSPGNAYVEGDASSASYFLAGAAITGETVTVEGCGTTSLQGDVKFAEVLEKMGCKVSWTENSVTVTGPSRDAFGMRHLRAIDVNMNKMPDVAMTLAVVALFADGPTTIRDVASWRVKETERMIAICTELRKLGATVEEGSDYCVITPPKKVKPAEIDTYDDHRMAMAFSLAACADVPITINDPGCTRKTFPDYFQVLERITKH

SEQ ID NO: 2388 - protein, 464 aa, Arabidopsis thaliana
  peptide (1)..(464): Ceres Seq. ID no. 12394456
  misc_feature (1)..(464): NCBI GI NO: 15221986 NR Description: 5-enolpyruvylshikimate-3-phosphate
  misc_feature (1)..(464): NCBI GI NO: 21555078 NR Description: 5-enolpyruvylshikimate-3-phosphate
  misc_feature (1)..(464): NCBI GI NO: 18251236 NR Description: 5-enolpyruvylshikimate-3-phosphate synthase
  misc_feature (1)..(464): NCBI GI NO: 15225450 NR Description: 5-enolpyruvylshikimate-3-phosphate
  misc_feature (1)..(464): NCBI GI NO: 66618 NR Description: 3-phosphoshikimate 1-carboxyvinyltransferase (EC 2
  misc_feature (1)..(464): NCBI GI NO: 114171 NR Description: 3-phosphoshikimate 1-carboxyvinyltransferase
  misc_feature (1)..(464): NCBI GI NO: 1351978 NR Description: 3-phosphoshikimate 1-carboxyvinyltransferase
  misc_feature (1)..(464): NCBI GI NO: 114165 NR Description: 3-phosphoshikimate 1-carboxyvinyltransferase 1
  misc_feature (1)..(464): NCBI GI NO: 66619 NR Description: 3-phosphoshikimate 1-carboxyvinyltransferase (EC 2
  misc_feature (1)..(464): NCBI GI NO: 114176 NR Description: 3-phosphoshikimate 1-carboxyvinyltransferase
MLNGSEIRPVKVRASVSTAEKASEIVLQPIREISGLIKLPGSKSLSNRILLLAALSEGTTVVDNLLNSDDINYMLDALKILGLNVETHSENNRAVVEGCGGVFPASIDSKSDIELYLGNAGTAMRPLTAAVTAAGGNASYVLDGVPRMRERPIGDLVVGLKQLGADVECTLGTNCPPVRVNANGGLPGGKVKLSGSISSQYLTALLMAAPLALGDVEIEIVDKLISVPYVEMTLKLMERFGVSAEHSESWDRFFVKGGQKYKSPGNAYVEGDASSASYFLAGAAITGETVTVEGCGTTSLQGDVKFAEVLEKMGCKVSWTENSVTVTGPSRDAFGMRHLRAIDVNMNKMPDVAMTLAVVALFADGPTTIRDVASWRVKETERMIAICTELRKLGATVEEGSDYCVITPPKKVKPAEIDTYDDHRMAMAFSLAACADVPITINDPGCTRKTFPDYFQVLERITKH

SEQ ID NO: 2389 - protein, 391 aa, Arabidopsis thaliana
  peptide (1)..(391): Ceres Seq. ID no. 12394457
  misc_feature (1)..(391): NCBI GI NO: 15221986 NR Description: 5-enolpyruvylshikimate-3-phosphate
  misc_feature (1)..(391): NCBI GI NO: 21555078 NR Description: 5-enolpyruvylshikimate-3-phosphate
  misc_feature (1)..(391): NCBI GI NO: 18251236 NR Description: 5-enolpyruvylshikimate-3-phosphate synthase
  misc_feature (1)..(391): NCBI GI NO: 15225450 NR Description: 5-enolpyruvylshikimate-3-phosphate
  misc_feature (1)..(391): NCBI GI NO: 66618 NR Description: 3-phosphoshikimate 1-carboxyvinyltransferase (EC 2
  misc_feature (1)..(391): NCBI GI NO: 114171 NR Description: 3-phosphoshikimate 1-carboxyvinyltransferase
  misc_feature (1)..(391): NCBI GI NO: 1351978 NR Description: 3-phosphoshikimate 1-carboxyvinyltransferase
  misc_feature (1)..(391): NCBI GI NO: 114165 NR Description: 3-phosphoshikimate 1-carboxyvinyltransferase 1
  misc_feature (1)..(391): NCBI GI NO: 66619 NR Description: 3-phosphoshikimate 1-carboxyvinyltransferase (EC 2
  misc_feature (1)..(391): NCBI GI NO: 114176 NR Description: 3-phosphoshikimate 1-carboxyvinyltransferase
MLDALKILGLNVETHSENNRAVVEGCGGVFPASIDSKSDIELYLGNAGTAMRPLTAAVTAAGGNASYVLDGVPRMRERPIGDLVVGLKQLGADVECTLGTNCPPVRVNANGGLPGGKVKLSGSISSQYLTALLMAAPLALGDVEIEIVDKLISVPYVEMTLKLMERFGVSAEHSESWDRFFVKGGQKYKSPGNAYVEGDASSASYFLAGAAITGETVTVEGCGTTSLQGDVKFAEVLEKMGCKVSWTENSVTVTGPSRDAFGMRHLRAIDVNMNKMPDVAMTLAVVALFADGPTTIRDVASWRVKETERMIAICTELRKLGATVEEGSDYCVITPPKKVKPAEIDTYDDHRMAMAFSLAACADVPITINDPGCTRKTFPDYFQVLERITKH

SEQ ID NO: 2390 - DNA, 1533 bp, Arabidopsis thaliana
  misc_feature (1)..(1533): Ceres Seq. ID no. 13647140
ccgatcaagaactcataattattgtaacagataaaatcaaatttgagagatctactactaaatctaacttaaagcattgtactttcttttatctcattctcctttgctctgctttcttctggtcaacccccacgagattccttcttatgtgattgtaaagagaagatttttcagagatgggtctcttcgaatcggtgaaatcaatcgattgggaacaagaatcgttcccaacttatcaagatttagggtttttgcctctctttgcagtgttcttccctacaattcgatttctacttgacagattcgtcttcgagaaattggcaagtcttgtgatctatggaaggatgagtacgaataagagtgacaacataaaagacaggaagaaaaatagtccaaaagttcgaaaatttaaagaatcagcttggaagtgtatttactatctatcagctgagctacttgctttatctgtcacatataatgaaccttggttttcaaatactctctacttttggattggtcctggagatcagatttggcctgatcaaccaatgaagatgaagttgaagtttttatatatgtttgctgctggattctacacgtactctatattcgcgttggtgttttgggaaacaagacggtctgatttcggagtttccatgggtcatcatatcacaacgcttgttctcattgtcctctcctatatctgcagattaactcgtgctggttctgttattcttgcacttcatgatgcgagcgatgtgttccttgaaattgggaaaatgtctaaatattgcggagcggaaagtctcgcgagcatttcgtttgttcttttcgcgctgtcttgggtcgttctacgtctcatttactatcctttttggatcctgtggagcacgagctatcaaatcattatgactgtggacaaagaaaagcatcctaatggaccaatcttgtactatatgttcaacacacttttgtatttcttgcttgttcttcacatattctggtgggttttgatttaccggatgcttgtgaaacaagtgcaagatcgaggcaagcttagcgaagatgttagatccgattctgaaagcgatgatgaacacgaggattaatcgcatgttgggaatattagtagtgcacacgctctatatctcatgaatctgaaccacacggagactaggaatttcaacatcaagtaggatgcattgcagtatttgaacagttggttcatcatcttccagaggatcgtaaccggatcaaaccgttttgaatgaatcggtttctcaatctgaatttttgagtttattgttttctctaaagtttgagcaaattcaagattttgatcaaactgctccacgttctattgttttttcttctataatttttaatttacgcttttgcaataacacaattccttgtatcattatactaatgtcatctcaaaattagctcccttcaacatctatgcaacagactaacaactaaatgaattttcttggggttttttttggttcattgcataatttgataaaatcc

SEQ ID NO: 2391 - protein, 310 aa, Arabidopsis thaliana
  peptide (1)..(310): Ceres Seq. ID no. 13647141
  misc_feature (96)..(307): Pfam Name: LAG1 Pfam Description: Longevity-assurance protein
  misc_feature (1)..(310): NCBI GI NO: 18404559 NR Description: LAG1 homolog 1 [Arabidopsis thaliana]
  misc_feature (1)..(310): NCBI GI NO: 25518747 NR Description: hypothetical protein F13B4
  misc_feature (1)..(310): NCBI GI NO: 16974114 NR Description: putative resistance protein
  misc_feature (1)..(241): NCBI GI NO: 30683361 NR Description: longevity assurance protein -related
  misc_feature (9)..(310): NCBI GI NO: 7688742 NR Description: ASC1 [Lycopersicon esculentum]
  misc_feature (25)..(306): NCBI GI NO: 34901974 NR Description: unknown protein
  misc_feature (29)..(307): NCBI GI NO: 15230323 NR Description: longevity factor-related protein
  misc_feature (29)..(307): NCBI GI NO: 7658241 NR Description: LAG1 homolog 2 [Arabidopsis thaliana]
  misc_feature (1)..(126): NCBI GI NO: 8920562 NR Description: Contains similarity to LAG1 homolog 1 from Arabidopsisthaliana gb|AF198179
  misc_feature (68)..(306): NCBI GI NO: 21358551 NR Description: Longevity assurance gene 1 CG3576-PB
MGLFESVKSIDWEQESFPTYQDLGFLPLFAVFFPTIRFLLDRFVFEKLASLVIYGRMSTNKSDNIKDRKKNSPKVRKFKESAWKCIYYLSAELLALSVTYNEPWFSNTLYFWIGPGDQIWPDQPMKMKLKFLYMFAAGFYTYSIFALVFWETRRSDFGVSMGHHITTLVLIVLSYICRLTRAGSVILALHDASDVFLEIGKMSKYCGAESLASISFVLFALSWVVLRLIYYPFWILWSTSYQIIMTVDKEKHPNGPILYYMFNTLLYFLLVLHIFWWVLIYRMLVKQVQDRGKLSEDVRSDSESDDEHED

SEQ ID NO: 2392 - protein, 254 aa, Arabidopsis thaliana
  peptide (1)..(254): Ceres Seq. ID no. 13647142
  misc_feature (40)..(251): Pfam Name: LAG1 Pfam Description: Longevity-assurance protein
  misc_feature (1)..(254): NCBI GI NO: 18404559 NR Description: LAG1 homolog 1 [Arabidopsis thaliana]
  misc_feature (1)..(254): NCBI GI NO: 25518747 NR Description: hypothetical protein F13B4
  misc_feature (1)..(254): NCBI GI NO: 16974114 NR Description: putative resistance protein
  misc_feature (1)..(185): NCBI GI NO: 30683361 NR Description: longevity assurance protein -related
  misc_feature (1)..(254): NCBI GI NO: 7688742 NR Description: ASC1 [Lycopersicon esculentum]
  misc_feature (1)..(250): NCBI GI NO: 34901974 NR Description: unknown protein
  misc_feature (1)..(251): NCBI GI NO: 15230323 NR Description: longevity factor-related protein
  misc_feature (1)..(251): NCBI GI NO: 7658241 NR Description: LAG1 homolog 2 [Arabidopsis thaliana]
  misc_feature (1)..(70): NCBI GI NO: 8920562 NR Description: Contains similarity to LAG1 homolog 1 from Arabidopsisthaliana gb|AF198179
  misc_feature (12)..(250): NCBI GI NO: 21358551 NR Description: Longevity assurance gene 1 CG3576-PB
MSTNKSDNIKDRKKNSPKVRKFKESAWKCIYYLSAELLALSVTYNEPWFSNTLYFWIGPGDQIWPDQPMKMKLKFLYMFAAGFYTYSIFALVFWETRRSDFGVSMGHHITTLVLIVLSYICRLTRAGSVILALHDASDVFLEIGKMSKYCGAESLASISFVLFALSWVVLRLIYYPFWILWSTSYQIIMTVDKEKHPNGPILYYMFNTLLYFLLVLHIFWWVLIYRMLVKQVQDRGKLSEDVRSDSESDDEHED

SEQ ID NO: 2393 - protein, 186 aa, Arabidopsis thaliana
  peptide (1)..(186): Ceres Seq. ID no. 13647143
  misc_feature (1)..(183): Pfam Name: LAG1 Pfam Description: Longevity-assurance protein
  misc_feature (1)..(186): NCBI GI NO: 18404559 NR Description: LAG1 homolog 1 [Arabidopsis thaliana]
  misc_feature (1)..(186): NCBI GI NO: 25518747 NR Description: hypothetical protein F13B4
  misc_feature (1)..(186): NCBI GI NO: 16974114 NR Description: putative resistance protein
  misc_feature (1)..(117): NCBI GI NO: 30683361 NR Description: longevity assurance protein -related
  misc_feature (1)..(186): NCBI GI NO: 7688742 NR Description: ASC1 [Lycopersicon esculentum]
  misc_feature (1)..(182): NCBI GI NO: 34901974 NR Description: unknown protein
  misc_feature (1)..(183): NCBI GI NO: 15230323 NR Description: longevity factor-related protein
  misc_feature (1)..(183): NCBI GI NO: 7658241 NR Description: LAG1 homolog 2 [Arabidopsis thaliana]
  misc_feature (1)..(182): NCBI GI NO: 21358551 NR Description: Longevity assurance gene 1 CG3576-PB
  misc_feature (1)..(186): NCBI GI NO: 31241781 NR Description: ENSANGP00000012836 [Anopheles gambiae]
MKMKLKFLYMFAAGFYTYSIFALVFWETRRSDFGVSMGHHITTLVLIVLSYICRLTRAGSVILALHDASDVFLEIGKMSKYCGAESLASISFVLFALSWVVLRLIYYPFWILWSTSYQIIMTVDKEKHPNGPILYYMFNTLLYFLLVLHIFWWVLIYRMLVKQVQDRGKLSEDVRSDSESDDEHED

SEQ ID NO: 2394 - DNA, 1089 bp, Arabidopsis thaliana
  misc_feature (1)..(1089): Ceres Seq. ID no. 12339248
aaaagctagtcaattgtttaactcacactctctcgccctctctctctccctctctcaaattctcaaaaattggctttgagcagatgaaaagaatctccatcttcttctctatctcttggctatctctctctctaaactattcactcacacagtcattcttcgtcttcttctgtttcatgcaagattcaaaggcctcacctgcaagaaaaccttggtaccagagagctatggcggtcgccagattcgcaacgaattggagaacaatccctaaatcatcgtcacaacaaccagagaattttcgtccgtctcgaaaccctagcgtcaacagcaagtcatccaatcataaccaaatttatcaccagctgagaaaatgctcgtctctaaaggtagctgcgaattcgttcactagggtttgcctctgcgctccgattggtccatacgacgacgtttttcggaatcacgtcccgccgagaagaagttcaagctatcctccgtcgaagcctcttcctatggagacggcggtggcggtggcgacggccaggatgagtgtggattcagggaggaggatatttagagggaagtcgttgagggaaaacgcgttgatgaggagattcgtggtggcagaagaagaagcgataatggagaatagaaagagagatcaaatggagattgtgaggaagagaaatcagatgaggaggaagaagaagcttggacctagtcctcttagtcgtatggttatcgctgaagatcaagaagtttgtcttctttgaaactttttcatcaagaacagagaaacaaaaaaaaaaagttttttttggttattgtaattgtgtttttatttttcaattggattcagagataattaagcaaaatacgctgccgtttaatacctctttgtaaacggtgccccttttgtttatttagttgtttttgggagttttgaatgaaggatggagctaaagagaattaatatggtttactaattctctttttggtttctttactatgcataccggtgattaaattattcaactgattaactttgttgatagtttaatattcatatctattaatggattcttaagattg

SEQ ID NO: 2395 - protein, 255 aa, Arabidopsis thaliana
  peptide (1)..(255): Ceres Seq. ID no. 12339249
  misc_feature (28)..(255): NCBI GI NO: 30695040 NR Description: expressed protein [Arabidopsis thaliana]
  misc_feature (57)..(255): NCBI GI NO: 11288883 NR Description: hypothetical protein T16L24
  misc_feature (65)..(250): NCBI GI NO: 21740779 NR Description: OSJNBa0067K08.20
  misc_feature (160)..(250): NCBI GI NO: 34905624 NR Description: hypothetical protein
KLVNCLTHTLSPSLSPSLKFSKIGFEQMKRISIFFSISWLSLSLNYSLTQSFFVFFCFMQDSKASPARKPWYQRAMAVARFATNWRTIPKSSSQQPENFRPSRNPSVNSKSSNHNQIYHQLRKCSSLKVAANSFTRVCLCAPIGPYDDVFRNHVPPRRSSSYPPSKPLPMETAVAVATARMSVDSGRRIFRGKSLRENALMRRFVVAEEEAIMENRKRDQMEIVRKRNQMRRKKKLGPSPLSRMVIAEDQEVCLL

SEQ ID NO: 2396 - protein, 228 aa, Arabidopsis thaliana
  peptide (1)..(228): Ceres Seq. ID no. 12339250
  misc_feature (1)..(228): NCBI GI NO: 30695040 NR Description: expressed protein [Arabidopsis thaliana]
  misc_feature (30)..(228): NCBI GI NO: 11288883 NR Description: hypothetical protein T16L24
  misc_feature (38)..(223): NCBI GI NO: 21740779 NR Description: OSJNBa0067K08.20
  misc_feature (133)..(223): NCBI GI NO: 34905624 NR Description: hypothetical protein
MKRISIFFSISWLSLSLNYSLTQSFFVFFCFMQDSKASPARKPWYQRAMAVARFATNWRTIPKSSSQQPENFRPSRNPSVNSKSSNHNQIYHQLRKCSSLKVAANSFTRVCLCAPIGPYDDVFRNHVPPRRSSSYPPSKPLPMETAVAVATARMSVDSGRRIFRGKSLRENALMRRFVVAEEEAIMENRKRDQMEIVRKRNQMRRKKKLGPSPLSRMVIAEDQEVCLL

SEQ ID NO: 2397 - protein, 197 aa, Arabidopsis thaliana
  peptide (1)..(197): Ceres Seq. ID no. 12339251
  misc_feature (1)..(197): NCBI GI NO: 30695040 NR Description: expressed protein [Arabidopsis thaliana]
  misc_feature (1)..(197): NCBI GI NO: 11288883 NR Description: hypothetical protein T16L24
  misc_feature (7)..(192): NCBI GI NO: 21740779 NR Description: OSJNBa0067K08.20
  misc_feature (102)..(192): NCBI GI NO: 34905624 NR Description: hypothetical protein
MQDSKASPARKPWYQRAMAVARFATNWRTIPKSSSQQPENFRPSRNPSVNSKSSNHNQIYHQLRKCSSLKVAANSFTRVCLCAPIGPYDDVFRNHVPPRRSSSYPPSKPLPMETAVAVATARMSVDSGRRIFRGKSLRENALMRRFVVAEEEAIMENRKRDQMEIVRKRNQMRRKKKLGPSPLSRMVIAEDQEVCLL

SEQ ID NO: 2398 - DNA, 2263 bp, Arabidopsis thaliana; identical to SEQ ID NO: 1671
  misc_feature (1)..(2263): Ceres Seq. ID no. 13591438

SEQ ID NO: 2399 - protein, 683 aa, Arabidopsis thaliana; identical to SEQ ID NO: 1672
  peptide (1)..(683): Ceres Seq. ID no. 13591439
  misc_feature (1)..(683): NCBI GI NO: 37531832 NR Description: putative protein kinase
  misc_feature (427)..(683): NCBI GI NO: 15220862 NR Description: protein kinase family [Arabidopsis thaliana]
  misc_feature (12)..(250): NCBI GI NO: 15220862 NR Description: protein kinase family [Arabidopsis thaliana]
  misc_feature (254)..(681): NCBI GI NO: 15242183 NR Description: protein kinase family [Arabidopsis thaliana]
  misc_feature (292)..(680): NCBI GI NO: 15235063 NR Description: protein kinase family [Arabidopsis thaliana]
  misc_feature (1)..(457): NCBI GI NO: 30686865 NR Description: protein kinase family [Arabidopsis thaliana]
  misc_feature (647)..(680): NCBI GI NO: 30686865 NR Description: protein kinase family [Arabidopsis thaliana]
  misc_feature (1)..(514): NCBI GI NO: 15235063 NR Description: protein kinase family [Arabidopsis thaliana]
  misc_feature (1)..(499): NCBI GI NO: 15242183 NR Description: protein kinase family [Arabidopsis thaliana]
  misc_feature (1)..(251): NCBI GI NO: 22328878 NR Description: expressed protein [Arabidopsis thaliana]

SEQ ID NO: 2400 - protein, 561 aa, Arabidopsis thaliana; identical to SEQ ID NO: 1673
  peptide (1)..(561): Ceres Seq. ID no. 13591440
  misc_feature (1)..(561): NCBI GI NO: 37531832 NR Description: putative protein kinase
  misc_feature (305)..(561): NCBI GI NO: 15220862 NR Description: protein kinase family [Arabidopsis thaliana]
  misc_feature (1)..(128): NCBI GI NO: 15220862 NR Description: protein kinase family [Arabidopsis thaliana]
  misc_feature (132)..(559): NCBI GI NO: 15242183 NR Description: protein kinase family [Arabidopsis thaliana]
  misc_feature (170)..(558): NCBI GI NO: 15235063 NR Description: protein kinase family [Arabidopsis thaliana]
  misc_feature (1)..(335): NCBI GI NO: 30686865 NR Description: protein kinase family [Arabidopsis thaliana]
  misc_feature (525)..(558): NCBI GI NO: 30686865 NR Description: protein kinase family [Arabidopsis thaliana]
  misc_feature (1)..(392): NCBI GI NO: 15235063 NR Description: protein kinase family [Arabidopsis thaliana]
  misc_feature (1)..(377): NCBI GI NO: 15242183 NR Description: protein kinase family [Arabidopsis thaliana]
  misc_feature (1)..(129): NCBI GI NO: 22328878 NR Description: expressed protein [Arabidopsis thaliana]

SEQ ID NO: 2401 - protein, 510 aa, Arabidopsis thaliana; identical to SEQ ID NO: 1674
  peptide (1)..(510): Ceres Seq. ID no. 13591441
  misc_feature (1)..(510): NCBI GI NO: 37531832 NR Description: putative protein kinase
  misc_feature (254)..(510): NCBI GI NO: 15220862 NR Description: protein kinase family [Arabidopsis thaliana]
  misc_feature (1)..(77): NCBI GI NO: 15220862 NR Description: protein kinase family [Arabidopsis thaliana]
  misc_feature (81)..(508): NCBI GI NO: 15242183 NR Description: protein kinase family [Arabidopsis thaliana]
  misc_feature (119)..(507): NCBI GI NO: 15235063 NR Description: protein kinase family [Arabidopsis thaliana]
  misc_feature (1)..(284): NCBI GI NO: 30686865 NR Description: protein kinase family [Arabidopsis thaliana]
  misc_feature (474)..(507): NCBI GI NO: 30686865 NR Description: protein kinase family [Arabidopsis thaliana]
  misc_feature (1)..(341): NCBI GI NO: 15235063 NR Description: protein kinase family [Arabidopsis thaliana]
  misc_feature (1)..(326): NCBI GI NO: 15242183 NR Description: protein kinase family [Arabidopsis thaliana]
  misc_feature (1)..(78): NCBI GI NO: 22328878 NR Description: expressed protein [Arabidopsis thaliana]

SEQ ID NO: 2402 - DNA, 1671 bp, Arabidopsis thaliana
  misc_feature (1)..(1671): Ceres Seq. ID no. 12394614
  misc_feature (1013)..(1013): n is a, c, t, g, unknown, or other
aacgaggctgtggagaaaagaaccaaaggtgactgttgttagagatgaggaatgcagagctcatcttcatcccaacaccaactgttggtcatcttgttccgtttcttgaatttgctaggcgtctcattgagcaggatgataaaatccgtatcaccttcctcttgatgaagcaacaaggtcagtctcatctggattcctatgttaagacaatttcctcgtctctgccgtttgttagatttattgatgtccctgagttagaggagaaaccaacacttggtacacagtctgtggaagcctatgtgtacgattttattgaaacaaatgtccctcttgtgcaaaatataatcatgggtatcctatcttctcctgcatttgatggagttacggtcaagggattcgttgctgattttttctgtctcccgatgattgatgttgcaaaagatgcaagtcttcctttttatgtgttcttgacttcaaattccggattcctagctatgatgcagtatctggcatatggacataagaaagatacctcagtttttgcaagaaactctgaagaaatgttgtcaattcctggatttgtaaaccctgtcccagccaaagtactgccgtcagctctgtttattgaggatggttatgatgctgacgttaaactggctatattgtttacaaaggctaatggaatcctagtgaatacctcctttgatattgagcctacctctctgaatcattttcttgaagaagagaattacccttctgtttatgctgttggccccatatttaacccgaaggcccatcctcatccagatcaagacctcgcctgttgtgacgagtcgatgaaatggcttgatgctcaacccgaggcatcagttgtattcctttgttttgggagtatgggtagcttaagaggtcctctagtgaaggaaatagcacatggacttgagctatgtcagtatagattcctctggtcactccgcacagaagaagtgacaaatgatgatcttttgccaganggattcatggaccgtgtcagtggacggggaatgatatgcggttggtctcctcaggtggaaatactggcccataaagcagtgggaggttttgtttctcattgtggatggaactcaatagtagagagtttatggtttggtgtgccaattgtgacatggccaatgtatgcagagcaacagctcaatgcgtttctgatggtgaaggaactgaagctcgcagtggagctgaaactcgattatagtgtacatagtggtgagattgtaagtgcaaacgagatagagacagcgatttcttgtgtaatgaacaaggataataatgttgtgaggaaacgagtgatggatatctcgcagatgatccagagagctacgaagaatggtggatcttcgtttgccgcaattgagaaattcatacatgacgtgataggaaccaggacttagcctttcttatcggattctccataaactgtaacctgattatgcaacagtcctttgaatctgctttgtttctaatatttttttctattcttttgtcatcagctttgcttttaactttgtctgtgttgattcctttatctaccaagctgtgagtttctttgttagccaatgctgcatttcttctgttatggattttgttcaaaattgggtacatctcttattcttt

SEQ ID NO: 2403 - protein, 467 aa, Arabidopsis thaliana
  peptide (1)..(467): Ceres Seq. ID no. 12394615
  misc_feature (4)..(466): Pfam Name: Pfam Description:  UDP-glucoronosyl and UDP-glucosyl transferase
  misc_feature (1)..(467): NCBI GI NO: 21555082 NR Description: putative flavonol 3-O-glucosyltransferase
  misc_feature (1)..(467): NCBI GI NO: 15227606 NR Description: putative flavonol 3-O-glucosyltransferase
  misc_feature (1)..(466): NCBI GI NO: 15227610 NR Description: putative flavonol 3-O-glucosyltransferase
  misc_feature (1)..(464): NCBI GI NO: 15222344 NR Description: UDP-glucose glucosyltransferase, putative
  misc_feature (4)..(464): NCBI GI NO: 15222348 NR Description: UDP-glucose glucosyltransferase, putative
  misc_feature (1)..(462): NCBI GI NO: 30680040 NR Description: glycosyltransferase family [Arabidopsis thaliana]
  misc_feature (1)..(459): NCBI GI NO: 15227613 NR Description: putative flavonol 3-O-glucosyltransferase
  misc_feature (1)..(463): NCBI GI NO: 15227616 NR Description: UDP-glycosyltransferase family
  misc_feature (21)..(462): NCBI GI NO: 21954072 NR Description: putative UDP-glucose glucosyltransferase
  misc_feature (1)..(463): NCBI GI NO: 20146091 NR Description: glucosyltransferase NTGT3 [Nicotiana tabacum]
  misc_feature (323)..(323): Xaa is any aa, unknown or other
MRNAELIFIPTPTVGHLVPFLEFARRLIEQDDKIRITFLLMKQQGQSHLDSYVKTISSSLPFVRFIDVPELEEKPTLGTQSVEAYVYDFIETNVPLVQNIIMGILSSPAFDGVTVKGFVADFFCLPMIDVAKDASLPFYVFLTSNSGFLAMMQYLAYGHKKDTSVFARNSEEMLSIPGFVNPVPAKVLPSALFIEDGYDADVKLAILFTKANGILVNTSFDIEPTSLNHFLEEENYPSVYAVGPIFNPKAHPHPDQDLACCDESMKWLDAQPEASVVFLCFGSMGSLRGPLVKEIAHGLELCQYRFLWSLRTEEVTNDDLLPXGFMDRVSGRGMICGWSPQVEILAHKAVGGFVSHCGWNSIVESLWFGVPIVTWPMYAEQQLNAFLMVKELKLAVELKLDYSVHSGEIVSANEIETAISCVMNKDNNVVRKRVMDISQMIQRATKNGGSSFAAIEKFIHDVIGTRT

SEQ ID NO: 2404 - protein, 427 aa, Arabidopsis thaliana
  peptide (1)..(427): Ceres Seq. ID no. 12394616
  misc_feature (1)..(426): Pfam Name: Pfam Description:  UDP-glucoronosyl and UDP-glucosyl transferase
  misc_feature (1)..(427): NCBI GI NO: 21555082 NR Description: putative flavonol 3-O-glucosyltransferase
  misc_feature (1)..(427): NCBI GI NO: 15227606 NR Description: putative flavonol 3-O-glucosyltransferase
  misc_feature (1)..(426): NCBI GI NO: 15227610 NR Description: putative flavonol 3-O-glucosyltransferase
  misc_feature (1)..(424): NCBI GI NO: 15222344 NR Description: UDP-glucose glucosyltransferase, putative
  misc_feature (1)..(424): NCBI GI NO: 15222348 NR Description: UDP-glucose glucosyltransferase, putative
  misc_feature (1)..(422): NCBI GI NO: 30680040 NR Description: glycosyltransferase family [Arabidopsis thaliana]
  misc_feature (1)..(419): NCBI GI NO: 15227613 NR Description: putative flavonol 3-O-glucosyltransferase
  misc_feature (1)..(423): NCBI GI NO: 15227616 NR Description: UDP-glycosyltransferase family
  misc_feature (1)..(422): NCBI GI NO: 21954072 NR Description: putative UDP-glucose glucosyltransferase
  misc_feature (1)..(423): NCBI GI NO: 20146091 NR Description: glucosyltransferase NTGT3 [Nicotiana tabacum]
  misc_feature (283)..(283): Xaa is any aa, unknown or other
MKQQGQSHLDSYVKTISSSLPFVRFIDVPELEEKPTLGTQSVEAYVYDFIETNVPLVQNIIMGILSSPAFDGVTVKGFVADFFCLPMIDVAKDASLPFYVFLTSNSGFLAMMQYLAYGHKKDTSVFARNSEEMLSIPGFVNPVPAKVLPSALFIEDGYDADVKLAILFTKANGILVNTSFDIEPTSLNHFLEEENYPSVYAVGPIFNPKAHPHPDQDLACCDESMKWLDAQPEASVVFLCFGSMGSLRGPLVKEIAHGLELCQYRFLWSLRTEEVTNDDLLPXGFMDRVSGRGMICGWSPQVEILAHKAVGGFVSHCGWNSIVESLWFGVPIVTWPMYAEQQLNAFLMVKELKLAVELKLDYSVHSGEIVSANEIETAISCVMNKDNNVVRKRVMDISQMIQRATKNGGSSFAAIEKFIHDVIGTRT

SEQ ID NO: 2405 - protein, 366 aa, Arabidopsis thaliana
  peptide (1)..(366): Ceres Seq. ID no. 12394617
  misc_feature (1)..(365): Pfam Name: Pfam Description:  UDP-glucoronosyl and UDP-glucosyl transferase
  misc_feature (1)..(366): NCBI GI NO: 21555082 NR Description: putative flavonol 3-O-glucosyltransferase
  misc_feature (1)..(366): NCBI GI NO: 15227606 NR Description: putative flavonol 3-O-glucosyltransferase
  misc_feature (1)..(365): NCBI GI NO: 15227610 NR Description: putative flavonol 3-O-glucosyltransferase
  misc_feature (1)..(363): NCBI GI NO: 15222344 NR Description: UDP-glucose glucosyltransferase, putative
  misc_feature (1)..(363): NCBI GI NO: 15222348 NR Description: UDP-glucose glucosyltransferase, putative
  misc_feature (1)..(361): NCBI GI NO: 30680040 NR Description: glycosyltransferase family [Arabidopsis thaliana]
  misc_feature (1)..(358): NCBI GI NO: 15227613 NR Description: putative flavonol 3-O-glucosyltransferase
  misc_feature (1)..(362): NCBI GI NO: 15227616 NR Description: UDP-glycosyltransferase family
  misc_feature (1)..(361): NCBI GI NO: 21954072 NR Description: putative UDP-glucose glucosyltransferase
  misc_feature (1)..(362): NCBI GI NO: 20146091 NR Description: glucosyltransferase NTGT3 [Nicotiana tabacum]
  misc_feature (222)..(222): Xaa is any aa, unknown or other
MGILSSPAFDGVTVKGFVADFFCLPMIDVAKDASLPFYVFLTSNSGFLAMMQYLAYGHKKDTSVFARNSEEMLSIPGFVNPVPAKVLPSALFIEDGYDADVKLAILFTKANGILVNTSFDIEPTSLNHFLEEENYPSVYAVGPIFNPKAHPHPDQDLACCDESMKWLDAQPEASVVFLCFGSMGSLRGPLVKEIAHGLELCQYRFLWSLRTEEVTNDDLLPXGFMDRVSGRGMICGWSPQVEILAHKAVGGFVSHCGWNSIVESLWFGVPIVTWPMYAEQQLNAFLMVKELKLAVELKLDYSVHSGEIVSANEIETAISCVMNKDNNVVRKRVMDISQMIQRATKNGGSSFAAIEKFIHDVIGTRT

SEQ ID NO: 2406 - DNA, 537 bp, Arabidopsis thaliana
  misc_feature (1)..(537): Ceres Seq. ID no. 12393893
atcaaaacatcacatacactatttttctcctctccttattgtctatatatttttcctctttagctttttcatttcgaaatggccaccgttgaggttgaacaagtcactccagtagcagtagagaacgttgaggtaccaacaaagacagtggaggagacagtggtggagacagagaagaaagatgaagaaaccgagaagaaaacagaggagaaagacgagaagacagaagtgatcacggaaactccggtagttgaggaggaggagaagaaagctgaggaagtgaccgaaactccggcggttgtggaggaggagaagaagacagaggtggttgaggagaaacagactgaggttgcggctgctgaggaagtcgccgttgagaaggccgaggagtaaagaggaaggaagaagctatatatgaccttttttggtctcatatcgttttctgtttattttattttatcaacatttcataagtattttctatgtttgttgggtttgttatgatgaaatcagatgtttggatcttttaatggttgc

SEQ ID NO: 2407 - protein, 104 aa, Arabidopsis thaliana
  peptide (1)..(104): Ceres Seq. ID no. 12393894
  misc_feature (22)..(104): Pfam Name: Pfam Description:  CRAL/TRIO, N-terminus
  misc_feature (1)..(104): NCBI GI NO: 18391349 NR Description: expressed protein; protein id: At1g12080
  misc_feature (7)..(104): NCBI GI NO: 30682601 NR Description: expressed protein [Arabidopsis thaliana]
  misc_feature (1)..(104): NCBI GI NO: 15231671 NR Description: putative protein; protein id: At3g59370.1
  misc_feature (1)..(104): NCBI GI NO: 30682601 NR Description: expressed protein [Arabidopsis thaliana]
  misc_feature (1)..(104): NCBI GI NO: 9049359 NR Description: vacuolar calcium binding protein
  misc_feature (1)..(104): NCBI GI NO: 9049359 NR Description: vacuolar calcium binding protein
  misc_feature (1)..(104): NCBI GI NO: 21555836 NR Description: unknown [Arabidopsis thaliana]
  misc_feature (1)..(104): NCBI GI NO: 18407594 NR Description: expressed protein; protein id: At1g62480
  misc_feature (1)..(104): NCBI GI NO: 9049359 NR Description: vacuolar calcium binding protein
  misc_feature (2)..(104): NCBI GI NO: 18407594 NR Description: expressed protein; protein id: At1g62480
MATVEVEQVTPVAVENVEVPTKTVEETVVETEKKDEETEKKTEEKDEKTEVITETPVVEEEEKKAEEVTETPAVVEEEKKTEVVEEKQTEVAAAEEVAVEKAEE

SEQ ID NO: 2408 - DNA, 1834 bp, Arabidopsis thaliana
  misc_feature (1)..(1834): Ceres Seq. ID no. 12603486
atggagtcgataacgttagatatagagctgttgcagttaccagagacatcgccaatgtcgatgaaatctaatcaagattttgttaagaagctctttgatcaatggcttgctcttcctgaaaccaatcgtttggttacatctttggtaaatgatgcaaaggcaggagtggctttgaatgttatgtgtggaggaggctcttctggcacgaattcagggtcgaatagtccattagcttcaatgtttccggcacgcaatgggcctcctctttctccaaggaattcaactggttctcctcggatcgccagacaaagaactggactatcaaatcttagttctcctctcaaagtagtttctgatcatgttaaagaactcattcctcagttttactttgaagatggtcggccaccaccaaatgatctaaaagagcagtgcatagctaagatcaatagtcttttctatggccacgaggatggtttgcaactccaagaatttaaattagtcactactgaaatatgcaaagttccatcatttttttccacctccattttcaagaaagttgataccaataacactggttttgtgaaaagagaagacttcattgattattgggttaagggaaatatgttaacaaaggagataacaagtcaagtatttacaatattgaagcagccagatcacaactaccttgtccaggatgatttcaagccagtgcttcaagaattattggcaacacaccctggtcttgaattcttgcaaggcacaccggaatttcaggatagatatgctgaaactgtaatatacagaatatattactacataaataggagtggaaatgggcatcttaccttgagagagcttaagcgaggaaatttagttgacgcaatgcagcatgccgatgaagaagaggacatcaataaggtgttgaggtacttctcgtatgaacatttctatgtcatatactgcaagttctgggagttggatacagatcatgatttcttaatcgacaaagagaatctcatccgatatagtaaccatgcgctcacctataggattgtcgatcgaatcttttcacaggtaccgaggaagtttactagtaaaaccgaaggaaagatgggttatgaggattttgtttacttcatattggctgaagaagacaagtcatcagaacctagtcttgagtattggttcaagtgcattgatttggatgcaaatggagttttgacgcggaacgagctgcaattcttttacgaggagcagctacatagaatggaatgcatggcgcaagaggcggtgttgtttgaggatattttgtgccaattattcgacatggtcaaaccagaggacgaagggttcatttgtctaaatgatttgaagggttctaaactttctggaaatgtcttcaacatactttttaacctcaacaagtttatggcgtttgaaacgcgtgatcccttcctcatccgccaggagcgcgcaaatccgacatggacagagtgggatcgttttgctcatagagaatatattaggctatcaatggaagaagatgtcgaagatgcttctaatggaagtgctgaagcatgggacgactcacttgaggtccccttttgagaattttatggtaagctctcactataaaaagcggaccaataatgagtaatataatcaaaaaaaaaaaggaagctagggtatggggcccttgattttcggataacattatttggtttattaatttgttcggtttatgatatataagggtgaatggaaactaaacaccattcggatttgtttgatacagttttgaactttgatttggattttatataaaaaacatatg

SEQ ID NO: 2409 - protein, 535 aa, Arabidopsis thaliana
  peptide (1)..(535): Ceres Seq. ID no. 12603487
  misc_feature (391)..(419): Pfam Name: Pfam Description:  EF hand
  misc_feature (1)..(535): NCBI GI NO: 15221817 NR Description: protein phosphatase 2A 72 kDa regulatory subunit
  misc_feature (6)..(535): NCBI GI NO: 18421273 NR Description: protein phosphatase 2A regulatory subunit B-like protein
  misc_feature (6)..(535): NCBI GI NO: 15241978 NR Description: protein phosphatase 2A regulatory subunit B-like protein
  misc_feature (196)..(535): NCBI GI NO: 37535364 NR Description: putative protein phosphatase 2A regulatory subunit
  misc_feature (2)..(196): NCBI GI NO: 37535364 NR Description: putative protein phosphatase 2A regulatory subunit
  misc_feature (6)..(535): NCBI GI NO: 15240089 NR Description: protein phosphatase 2A 62 kDa B regulatory subunit
  misc_feature (196)..(489): NCBI GI NO: 16905168 NR Description: putative phosphatase subunit, 3'-partial
  misc_feature (2)..(196): NCBI GI NO: 16905168 NR Description: putative phosphatase subunit, 3'-partial
  misc_feature (6)..(535): NCBI GI NO: 28393301 NR Description: putative protein phosphatase 2A
  misc_feature (6)..(535): NCBI GI NO: 15219596 NR Description: putative protein phosphatase 2A
MESITLDIELLQLPETSPMSMKSNQDFVKKLFDQWLALPETNRLVTSLVNDAKAGVALNVMCGGGSSGTNSGSNSPLASMFPARNGPPLSPRNSTGSPRIARQRTGLSNLSSPLKVVSDHVKELIPQFYFEDGRPPPNDLKEQCIAKINSLFYGHEDGLQLQEFKLVTTEICKVPSFFSTSIFKKVDTNNTGFVKREDFIDYWVKGNMLTKEITSQVFTILKQPDHNYLVQDDFKPVLQELLATHPGLEFLQGTPEFQDRYAETVIYRIYYYINRSGNGHLTLRELKRGNLVDAMQHADEEEDINKVLRYFSYEHFYVIYCKFWELDTDHDFLIDKENLIRYSNHALTYRIVDRIFSQVPRKFTSKTEGKMGYEDFVYFILAEEDKSSEPSLEYWFKCIDLDANGVLTRNELQFFYEEQLHRMECMAQEAVLFEDILCQLFDMVKPEDEGFICLNDLKGSKLSGNVFNILFNLNKFMAFETRDPFLIRQERANPTWTEWDRFAHREYIRLSMEEDVEDASNGSAEAWDDSLEVPF

SEQ ID NO: 2410 - protein, 517 aa, Arabidopsis thaliana
  peptide (1)..(517): Ceres Seq. ID no. 12603488
  misc_feature (373)..(401): Pfam Name: Pfam Description:  EF hand
  misc_feature (1)..(517): NCBI GI NO: 15221817 NR Description: protein phosphatase 2A 72 kDa regulatory subunit
  misc_feature (1)..(517): NCBI GI NO: 18421273 NR Description: protein phosphatase 2A regulatory subunit B-like protein
  misc_feature (1)..(517): NCBI GI NO: 15241978 NR Description: protein phosphatase 2A regulatory subunit B-like protein
  misc_feature (178)..(517): NCBI GI NO: 37535364 NR Description: putative protein phosphatase 2A regulatory subunit
  misc_feature (1)..(178): NCBI GI NO: 37535364 NR Description: putative protein phosphatase 2A regulatory subunit
  misc_feature (1)..(517): NCBI GI NO: 15240089 NR Description: protein phosphatase 2A 62 kDa B regulatory subunit
  misc_feature (178)..(471): NCBI GI NO: 16905168 NR Description: putative phosphatase subunit, 3'-partial
  misc_feature (1)..(178): NCBI GI NO: 16905168 NR Description: putative phosphatase subunit, 3'-partial
  misc_feature (1)..(517): NCBI GI NO: 28393301 NR Description: putative protein phosphatase 2A
  misc_feature (1)..(517): NCBI GI NO: 15219596 NR Description: putative protein phosphatase 2A
MSMKSNQDFVKKLFDQWLALPETNRLVTSLVNDAKAGVALNVMCGGGSSGTNSGSNSPLASMFPARNGPPLSPRNSTGSPRIARQRTGLSNLSSPLKVVSDHVKELIPQFYFEDGRPPPNDLKEQCIAKINSLFYGHEDGLQLQEFKLVTTEICKVPSFFSTSIFKKVDTNNTGFVKREDFIDYWVKGNMLTKEITSQVFTILKQPDHNYLVQDDFKPVLQELLATHPGLEFLQGTPEFQDRYAETVIYRIYYYINRSGNGHLTLRELKRGNLVDAMQHADEEEDINKVLRYFSYEHFYVIYCKFWELDTDHDFLIDKENLIRYSNHALTYRIVDRIFSQVPRKFTSKTEGKMGYEDFVYFILAEEDKSSEPSLEYWFKCIDLDANGVLTRNELQFFYEEQLHRMECMAQEAVLFEDILCQLFDMVKPEDEGFICLNDLKGSKLSGNVFNILFNLNKFMAFETRDPFLIRQERANPTWTEWDRFAHREYIRLSMEEDVEDASNGSAEAWDDSLEVPF

SEQ ID NO: 2411 - protein, 515 aa, Arabidopsis thaliana
  peptide (1)..(515): Ceres Seq. ID no. 12603489
  misc_feature (371)..(399): Pfam Name: Pfam Description:  EF hand
  misc_feature (1)..(515): NCBI GI NO: 15221817 NR Description: protein phosphatase 2A 72 kDa regulatory subunit
  misc_feature (1)..(515): NCBI GI NO: 18421273 NR Description: protein phosphatase 2A regulatory subunit B-like protein
  misc_feature (1)..(515): NCBI GI NO: 15241978 NR Description: protein phosphatase 2A regulatory subunit B-like protein
  misc_feature (176)..(515): NCBI GI NO: 37535364 NR Description: putative protein phosphatase 2A regulatory subunit
  misc_feature (1)..(176): NCBI GI NO: 37535364 NR Description: putative protein phosphatase 2A regulatory subunit
  misc_feature (1)..(515): NCBI GI NO: 15240089 NR Description: protein phosphatase 2A 62 kDa B regulatory subunit
  misc_feature (176)..(469): NCBI GI NO: 16905168 NR Description: putative phosphatase subunit, 3'-partial
  misc_feature (1)..(176): NCBI GI NO: 16905168 NR Description: putative phosphatase subunit, 3'-partial
  misc_feature (1)..(515): NCBI GI NO: 28393301 NR Description: putative protein phosphatase 2A
  misc_feature (1)..(515): NCBI GI NO: 15219596 NR Description: putative protein phosphatase 2A
MKSNQDFVKKLFDQWLALPETNRLVTSLVNDAKAGVALNVMCGGGSSGTNSGSNSPLASMFPARNGPPLSPRNSTGSPRIARQRTGLSNLSSPLKVVSDHVKELIPQFYFEDGRPPPNDLKEQCIAKINSLFYGHEDGLQLQEFKLVTTEICKVPSFFSTSIFKKVDTNNTGFVKREDFIDYWVKGNMLTKEITSQVFTILKQPDHNYLVQDDFKPVLQELLATHPGLEFLQGTPEFQDRYAETVIYRIYYYINRSGNGHLTLRELKRGNLVDAMQHADEEEDINKVLRYFSYEHFYVIYCKFWELDTDHDFLIDKENLIRYSNHALTYRIVDRIFSQVPRKFTSKTEGKMGYEDFVYFILAEEDKSSEPSLEYWFKCIDLDANGVLTRNELQFFYEEQLHRMECMAQEAVLFEDILCQLFDMVKPEDEGFICLNDLKGSKLSGNVFNILFNLNKFMAFETRDPFLIRQERANPTWTEWDRFAHREYIRLSMEEDVEDASNGSAEAWDDSLEVPF

SEQ ID NO: 2412 - DNA, 621 bp, Arabidopsis thaliana
  misc_feature (1)..(621): Ceres Seq. ID no. 12397236
ataaaaataaaaaagtaggagcatatcacacaaacaaacaacgtagaaagggttcgaatgacgagtaatggagaagggggagaggtggtggcgaagaggaggaggaagggaattaaggagctagtgcaggtggctctcaggggaggttgtttggctgcttcagccacggccatggcggtgatgctgaccgctactgaggagggagtggcagacatctacggcttcaagctcactctctcctccaactggtctttctctccctcctaccagtatgtggtgggggcatgcgcagggaccgtgctctactccctgttacagctctgcctcggtgtttacagactcgtcaccggatctcccatcacgccttcccgcttccaagcttggctttgcttcacctccgatcagctcttttgttatttgatgatgagcgctggatcagccggttccggagttaccaacctcaacaaaaccggcatcaggcacactcctctccccgacttctgcaagaccctttcttctttctgcaatcatgtcgccctgtctctcctcttagtcttcctctccttcatcttcctcgcttcctcttccttctttactgtccttgtgctctccactccctag

SEQ ID NO: 2413 - protein, 187 aa, Arabidopsis thaliana
  peptide (1)..(187): Ceres Seq. ID no. 12397237
  misc_feature (17)..(172): Pfam Name: DUF588 Pfam Description: Domain of unknown function
  misc_feature (1)..(187): NCBI GI NO: 7715593 NR Description: F20B17.20 [Arabidopsis thaliana]
  misc_feature (1)..(71): NCBI GI NO: 15219983 NR Description: hypothetical protein; protein id: At1g79780.1
  misc_feature (127)..(187): NCBI GI NO: 15219983 NR Description: hypothetical protein; protein id: At1g79780.1
  misc_feature (21)..(185): NCBI GI NO: 15228175 NR Description: hypothetical protein; protein id: At3g16300.1
  misc_feature (22)..(117): NCBI GI NO: 34910750 NR Description: P0022F10.21
  misc_feature (61)..(180): NCBI GI NO: 15233256 NR Description: putative protein; protein id: At3g55390
  misc_feature (19)..(169): NCBI GI NO: 29420795 NR Description: hypothetical protein
MTSNGEGGEVVAKRRRKGIKELVQVALRGGCLAASATAMAVMLTATEEGVADIYGFKLTLSSNWSFSPSYQYVVGACAGTVLYSLLQLCLGVYRLVTGSPITPSRFQAWLCFTSDQLFCYLMMSAGSAGSGVTNLNKTGIRHTPLPDFCKTLSSFCNHVALSLLLVFLSFIFLASSSFFTVLVLSTP

SEQ ID NO: 2414 - protein, 149 aa, Arabidopsis thaliana
  peptide (1)..(149): Ceres Seq. ID no. 12397238
  misc_feature (1)..(134): Pfam Name: DUF588 Pfam Description: Domain of unknown function
  misc_feature (1)..(149): NCBI GI NO: 7715593 NR Description: F20B17.20 [Arabidopsis thaliana]
  misc_feature (1)..(33): NCBI GI NO: 15219983 NR Description: hypothetical protein; protein id: At1g79780.1
  misc_feature (89)..(149): NCBI GI NO: 15219983 NR Description: hypothetical protein; protein id: At1g79780.1
  misc_feature (1)..(147): NCBI GI NO: 15228175 NR Description: hypothetical protein; protein id: At3g16300.1
  misc_feature (1)..(79): NCBI GI NO: 34910750 NR Description: P0022F10.21
  misc_feature (23)..(142): NCBI GI NO: 15233256 NR Description: putative protein; protein id: At3g55390
  misc_feature (1)..(131): NCBI GI NO: 29420795 NR Description: hypothetical protein
MAVMLTATEEGVADIYGFKLTLSSNWSFSPSYQYVVGACAGTVLYSLLQLCLGVYRLVTGSPITPSRFQAWLCFTSDQLFCYLMMSAGSAGSGVTNLNKTGIRHTPLPDFCKTLSSFCNHVALSLLLVFLSFIFLASSSFFTVLVLSTP

SEQ ID NO: 2415 - protein, 146 aa, Arabidopsis thaliana
  peptide (1)..(146): Ceres Seq. ID no. 12397239
  misc_feature (1)..(131): Pfam Name: DUF588 Pfam Description: Domain of unknown function
  misc_feature (1)..(146): NCBI GI NO: 7715593 NR Description: F20B17.20 [Arabidopsis thaliana]
  misc_feature (1)..(30): NCBI GI NO: 15219983 NR Description: hypothetical protein; protein id: At1g79780.1
  misc_feature (86)..(146): NCBI GI NO: 15219983 NR Description: hypothetical protein; protein id: At1g79780.1
  misc_feature (1)..(144): NCBI GI NO: 15228175 NR Description: hypothetical protein; protein id: At3g16300.1
  misc_feature (1)..(76): NCBI GI NO: 34910750 NR Description: P0022F10.21
  misc_feature (20)..(139): NCBI GI NO: 15233256 NR Description: putative protein; protein id: At3g55390
  misc_feature (1)..(128): NCBI GI NO: 29420795 NR Description: hypothetical protein
MLTATEEGVADIYGFKLTLSSNWSFSPSYQYVVGACAGTVLYSLLQLCLGVYRLVTGSPITPSRFQAWLCFTSDQLFCYLMMSAGSAGSGVTNLNKTGIRHTPLPDFCKTLSSFCNHVALSLLLVFLSFIFLASSSFFTVLVLSTP

SEQ ID NO: 2416 - DNA, 875 bp, Arabidopsis thaliana
  misc_feature (1)..(875): Ceres Seq. ID no. 14306853
acatcacataccaaaaaaaggcaaaacactcacgaaagaagaaacggagaggatgaagcattatgtgctagttcacggaggctgccacggtgcgtggtgttggtacaaggtgaagccgatgcttgaacattccggccaccgtgtcacggtttttgatcttacggcgcatggtgtgaacatgagcagagtagaagatattcagactttggaggatttcgctaagccgttgcttgaggttcttgagtcttttggctcggatgataaagtagtcctcgtcgcgcatagcctcggtggaataccggctgctcttgcagccgacatgtttcctagtaaaatctctgttgctgtcttcgttacttcttttatgcccgacacaacgaatccaccttcttacgtgttcgaaaagtttctcggaagcattacagaagaagaacgtatggacttcgagttagggagctatggaacagatgaccatccactaaagactgcttttcttggacctaactacttgaagaatatgtatctactttctcctatcgaagattatgaattggccaaaatgttgatgagagtcacaccggctattactagtaatctgacggggactaaaagcttaacggcacaaggatatggatcgattagtcgtgtgtatatcgtatgcggagaagataaaggtatacgtgtagatttccaacgatggatgattgagaactctccggttaaagaagtgatggagatcaaagatgcagatcatatgcctatgttttccaagcctcatgaactctgtgatcgtcttctaaagattgctgataaatatccctaagcaagaatatctatgacaatatcaataattttcatgggaataagtttttttg

SEQ ID NO: 2417 - protein, 273 aa, Arabidopsis thaliana
  peptide (1)..(273): Ceres Seq. ID no. 14306854
  misc_feature (46)..(267): Pfam Name: Pfam Description:  alpha/beta hydrolase fold
  misc_feature (18)..(273): NCBI GI NO: 15235445 NR Description: hydrolase, alpha/beta fold family
  misc_feature (14)..(272): NCBI GI NO: 15227859 NR Description: hydrolase, alpha/beta fold family
  misc_feature (14)..(272): NCBI GI NO: 15227851 NR Description: hydrolase, alpha/beta fold family
  misc_feature (14)..(272): NCBI GI NO: 15227850 NR Description: hydrolase, alpha/beta fold family
  misc_feature (14)..(272): NCBI GI NO: 28393451 NR Description: putative acetone-cyanohydrin lyase
  misc_feature (14)..(272): NCBI GI NO: 15227865 NR Description: esterase, putative [Arabidopsis thaliana]
  misc_feature (14)..(272): NCBI GI NO: 15227867 NR Description: esterase, putative [Arabidopsis thaliana]
  misc_feature (14)..(272): NCBI GI NO: 27754457 NR Description: putative acetone-cyanohydrin lyase
  misc_feature (14)..(272): NCBI GI NO: 21554666 NR Description: putative acetone-cyanohydrin lyase
  misc_feature (14)..(272): NCBI GI NO: 15227863 NR Description: hydrolase, alpha/beta fold family
HHIPKKGKTLTKEETERMKHYVLVHGGCHGAWCWYKVKPMLEHSGHRVTVFDLTAHGVNMSRVEDIQTLEDFAKPLLEVLESFGSDDKVVLVAHSLGGIPAALAADMFPSKISVAVFVTSFMPDTTNPPSYVFEKFLGSITEEERMDFELGSYGTDDHPLKTAFLGPNYLKNMYLLSPIEDYELAKMLMRVTPAITSNLTGTKSLTAQGYGSISRVYIVCGEDKGIRVDFQRWMIENSPVKEVMEIKDADHMPMFSKPHELCDRLLKIADKYP

SEQ ID NO: 2418 - protein, 256 aa, Arabidopsis thaliana
  peptide (1)..(256): Ceres Seq. ID no. 14306855
  misc_feature (29)..(250): Pfam Name: Pfam Description:  alpha/beta hydrolase fold
  misc_feature (1)..(256): NCBI GI NO: 15235445 NR Description: hydrolase, alpha/beta fold family
  misc_feature (1)..(255): NCBI GI NO: 15227859 NR Description: hydrolase, alpha/beta fold family
  misc_feature (1)..(255): NCBI GI NO: 15227851 NR Description: hydrolase, alpha/beta fold family
  misc_feature (1)..(255): NCBI GI NO: 15227850 NR Description: hydrolase, alpha/beta fold family
  misc_feature (1)..(255): NCBI GI NO: 28393451 NR Description: putative acetone-cyanohydrin lyase
  misc_feature (1)..(255): NCBI GI NO: 15227865 NR Description: esterase, putative [Arabidopsis thaliana]
  misc_feature (1)..(255): NCBI GI NO: 15227867 NR Description: esterase, putative [Arabidopsis thaliana]
  misc_feature (1)..(255): NCBI GI NO: 27754457 NR Description: putative acetone-cyanohydrin lyase
  misc_feature (1)..(255): NCBI GI NO: 21554666 NR Description: putative acetone-cyanohydrin lyase
  misc_feature (1)..(255): NCBI GI NO: 15227863 NR Description: hydrolase, alpha/beta fold family
MKHYVLVHGGCHGAWCWYKVKPMLEHSGHRVTVFDLTAHGVNMSRVEDIQTLEDFAKPLLEVLESFGSDDKVVLVAHSLGGIPAALAADMFPSKISVAVFVTSFMPDTTNPPSYVFEKFLGSITEEERMDFELGSYGTDDHPLKTAFLGPNYLKNMYLLSPIEDYELAKMLMRVTPAITSNLTGTKSLTAQGYGSISRVYIVCGEDKGIRVDFQRWMIENSPVKEVMEIKDADHMPMFSKPHELCDRLLKIADKYP

SEQ ID NO: 2419 - protein, 234 aa, Arabidopsis thaliana
  peptide (1)..(234): Ceres Seq. ID no. 14306856
  misc_feature (7)..(228): Pfam Name: Pfam Description:  alpha/beta hydrolase fold
  misc_feature (1)..(234): NCBI GI NO: 15235445 NR Description: hydrolase, alpha/beta fold family
  misc_feature (1)..(233): NCBI GI NO: 15227859 NR Description: hydrolase, alpha/beta fold family
  misc_feature (1)..(233): NCBI GI NO: 15227851 NR Description: hydrolase, alpha/beta fold family
  misc_feature (1)..(233): NCBI GI NO: 15227850 NR Description: hydrolase, alpha/beta fold family
  misc_feature (1)..(233): NCBI GI NO: 28393451 NR Description: putative acetone-cyanohydrin lyase
  misc_feature (1)..(233): NCBI GI NO: 15227865 NR Description: esterase, putative [Arabidopsis thaliana]
  misc_feature (1)..(233): NCBI GI NO: 15227867 NR Description: esterase, putative [Arabidopsis thaliana]
  misc_feature (1)..(233): NCBI GI NO: 27754457 NR Description: putative acetone-cyanohydrin lyase
  misc_feature (1)..(233): NCBI GI NO: 21554666 NR Description: putative acetone-cyanohydrin lyase
  misc_feature (1)..(233): NCBI GI NO: 15227863 NR Description: hydrolase, alpha/beta fold family
MLEHSGHRVTVFDLTAHGVNMSRVEDIQTLEDFAKPLLEVLESFGSDDKVVLVAHSLGGIPAALAADMFPSKISVAVFVTSFMPDTTNPPSYVFEKFLGSITEEERMDFELGSYGTDDHPLKTAFLGPNYLKNMYLLSPIEDYELAKMLMRVTPAITSNLTGTKSLTAQGYGSISRVYIVCGEDKGIRVDFQRWMIENSPVKEVMEIKDADHMPMFSKPHELCDRLLKIADKYP

SEQ ID NO: 2420 - DNA, 1055 bp, Arabidopsis thaliana
  misc_feature (1)..(1055): Ceres Seq. ID no. 12393926
aaaaaacgataagggatctctctctaattggcgctcctttactaattgccctttaattccatccatcttcggattcttttcaaatcaacaaaaaaagtacaaatcggatacaaatcggatccctacaatatcctctccactcttcacaaatccttctccgagatctacaaacgctgtttcattcttccgattacaatggcgacgagaagacgtactttgctcaaggtcattgtcctcggtgacagtggggttggaaaaacctccttgatgaatcaatatgtgcataagaagtttagtatgcagtataaagcaacgattggtgctgattttgtaaccaaggagcttcagattggggaaaagcttgttactttacagatttgggatactgctggacaagagagattccagagtcttggtgctgctttttatagaggagctgattgttgtgctttggtttatgatgttaatgtgttgaggtcttttgataatctcgaaacttggcatgaggagtttcttaaacaggcaagtccatcagatccaaagacatttccgtttatagtgcttggaaacaagattgacgtagatggagggagcagtagagtggtctctgataagaaagcagctgactggtgtgcttcaaatggtaacataccctatttcgagacatcagcaaaagatgacttcaatgtcgatgaggcattcttaaccattgccaaaaccgcccttgctaacgaacatgaacaggatatatacttccaaggcataccagatgcagtgactgaaaacgagccaaaaggcggtggttgcgcttgctgaaccacagatttgaggattcaatgacattcgtttttttgatgcattcatttgaaggttggtgtactcttgagttgcagaacgataagcttgtagaagcaattttttgtcattccatcatatattaattgattggagaagtctgtgtatgatcaatcgattctgctggatacaaattttatttttgtaagaagaaccattattgctcttaatccctatggcgatataaagttgcatgctac

SEQ ID NO: 2421 - protein, 206 aa, Arabidopsis thaliana
  peptide (1)..(206): Ceres Seq. ID no. 12393927
  misc_feature (10)..(178): Pfam Name: Pfam Description:  Ras family
  misc_feature (1)..(206): NCBI GI NO: 15234026 NR Description: GTP-binding protein, putative
  misc_feature (1)..(206): NCBI GI NO: 7438424 NR Description: rab7 protein homolog F17A8
  misc_feature (1)..(206): NCBI GI NO: 1370182 NR Description: RAB7A [Lotus japonicus]
  misc_feature (1)..(206): NCBI GI NO: 3914559 NR Description: RAS-RELATED PROTEIN RAB7
  misc_feature (35)..(206): NCBI GI NO: 30681167 NR Description: GTP-binding protein, putative
  misc_feature (1)..(206): NCBI GI NO: 3914558 NR Description: RAS-RELATED PROTEIN RAB7
  misc_feature (1)..(206): NCBI GI NO: 541949 NR Description: rab7 protein - Soybean
  misc_feature (1)..(206): NCBI GI NO: 7438410 NR Description: GTP-binding protein Rab7c - common tobacco
  misc_feature (1)..(205): NCBI GI NO: 1370184 NR Description: RAB7B [Lotus japonicus]
  misc_feature (1)..(206): NCBI GI NO: 15219943 NR Description: Ras-related GTP-binding protein
MATRRRTLLKVIVLGDSGVGKTSLMNQYVHKKFSMQYKATIGADFVTKELQIGEKLVTLQIWDTAGQERFQSLGAAFYRGADCCALVYDVNVLRSFDNLETWHEEFLKQASPSDPKTFPFIVLGNKIDVDGGSSRVVSDKKAADWCASNGNIPYFETSAKDDFNVDEAFLTIAKTALANEHEQDIYFQGIPDAVTENEPKGGGCAC

SEQ ID NO: 2422 - protein, 182 aa, Arabidopsis thaliana
  peptide (1)..(182): Ceres Seq. ID no. 12393928
  misc_feature (1)..(154): Pfam Name: Pfam Description:  Ras family
  misc_feature (1)..(182): NCBI GI NO: 15234026 NR Description: GTP-binding protein, putative
  misc_feature (1)..(182): NCBI GI NO: 7438424 NR Description: rab7 protein homolog F17A8
  misc_feature (1)..(182): NCBI GI NO: 1370182 NR Description: RAB7A [Lotus japonicus]
  misc_feature (1)..(182): NCBI GI NO: 3914559 NR Description: RAS-RELATED PROTEIN RAB7
  misc_feature (11)..(182): NCBI GI NO: 30681167 NR Description: GTP-binding protein, putative
  misc_feature (1)..(182): NCBI GI NO: 3914558 NR Description: RAS-RELATED PROTEIN RAB7
  misc_feature (1)..(182): NCBI GI NO: 541949 NR Description: rab7 protein - Soybean
  misc_feature (1)..(182): NCBI GI NO: 7438410 NR Description: GTP-binding protein Rab7c - common tobacco
  misc_feature (1)..(181): NCBI GI NO: 1370184 NR Description: RAB7B [Lotus japonicus]
  misc_feature (1)..(182): NCBI GI NO: 15219943 NR Description: Ras-related GTP-binding protein
MNQYVHKKFSMQYKATIGADFVTKELQIGEKLVTLQIWDTAGQERFQSLGAAFYRGADCCALVYDVNVLRSFDNLETWHEEFLKQASPSDPKTFPFIVLGNKIDVDGGSSRVVSDKKAADWCASNGNIPYFETSAKDDFNVDEAFLTIAKTALANEHEQDIYFQGIPDAVTENEPKGGGCAC

SEQ ID NO: 2423 - protein, 172 aa, Arabidopsis thaliana
  peptide (1)..(172): Ceres Seq. ID no. 12393929
  misc_feature (1)..(144): Pfam Name: Pfam Description:  Ras family
  misc_feature (1)..(172): NCBI GI NO: 15234026 NR Description: GTP-binding protein, putative
  misc_feature (1)..(172): NCBI GI NO: 7438424 NR Description: rab7 protein homolog F17A8
  misc_feature (1)..(172): NCBI GI NO: 1370182 NR Description: RAB7A [Lotus japonicus]
  misc_feature (1)..(172): NCBI GI NO: 3914559 NR Description: RAS-RELATED PROTEIN RAB7
  misc_feature (1)..(172): NCBI GI NO: 30681167 NR Description: GTP-binding protein, putative
  misc_feature (1)..(172): NCBI GI NO: 3914558 NR Description: RAS-RELATED PROTEIN RAB7
  misc_feature (1)..(172): NCBI GI NO: 541949 NR Description: rab7 protein - Soybean
  misc_feature (1)..(172): NCBI GI NO: 7438410 NR Description: GTP-binding protein Rab7c - common tobacco
  misc_feature (1)..(171): NCBI GI NO: 1370184 NR Description: RAB7B [Lotus japonicus]
  misc_feature (1)..(172): NCBI GI NO: 15219943 NR Description: Ras-related GTP-binding protein
MQYKATIGADFVTKELQIGEKLVTLQIWDTAGQERFQSLGAAFYRGADCCALVYDVNVLRSFDNLETWHEEFLKQASPSDPKTFPFIVLGNKIDVDGGSSRVVSDKKAADWCASNGNIPYFETSAKDDFNVDEAFLTIAKTALANEHEQDIYFQGIPDAVTENEPKGGGCAC

SEQ ID NO: 2424 - DNA, 1559 bp, Arabidopsis thaliana
  misc_feature (1)..(1559): Ceres Seq. ID no. 12693600
aaagactcgacggtctaccggaaaaaatggctgccaatttctggaattcatctcactataaacagcttttggatccagaagaagtcgacgtagttcatgatctcgataaagaacgtggaatctcaattgatgattttaagctcatcaagttccatatgtctaatcatattatgaaattggctcagcacattaaagtgaggcaaagggttgtagctactgcaattacgtatatgagacgggtttatatcagaaagagtatggtagagtttgagcctcgacttgttgctcttacgtgcttgtacctggcatctaaagctgaagaaagcatagtgcaggccaggaatcttgttttttacatcaaaagattgtatcctgatgagtacaacaaatatgaactaaaggatatattaggaatggagatgaaggtgttagaagcactagattattatctggttgtgtttcacccttaccggtcattatcggagtttttgcaagatgctgcattaaacgatgtaaatatgaaccagattacatggggaattgttaatgatacttataagatggacctcattcttgtacaccctccctaccgcatagcgctagcatgcatatacatagcaagtgtccacagagagaaagatatcactgcatggtttgaagatcttcatgaggacatgaacttggtaaagaatattgccatggagatactggacttctatgagaactacagaacaatcacagaggaaaaagtgaattctgccttcagcaaattggctttgaagctgatcaaagaagctatggcttccaatttctggacttcgacgcactacaaagagcttaaggacccagaagaggttaatgttgttcatcctcttgatgctcagagaggaatctctgttgaagatttcagactcattaagcttcatatgtctaattatatatcgaaactggcacaacacattaagattaggcaaagagttgttgcaactgcagtaacctatatgcgtcgtgtttacacaagaaagagtttgacggaatatgagcctcggcttgttgctcctacatgcttgtatttggcttgcaaagcagaagagagtgtggtgcatgccaaacttcttgtcttctacatgaaaaaactttatgcggatgaaaagtttcgatatgagattaaagatattctggaaatggagatgaaggtcttggaagcattgaacttctatcttgttgtattccacccatatcgatctctgcctgagttcttgcaggattctggaatcaatgacactagtatgacccatctaacttggggtcttgtcaacgacacatatagaatggacctcatccttatacatccgccgtttctcataacactcgcttgcatttacattgcttctgtacacaaagagaaagacataaagacatggtttgaagagctttctgtcgacatgaacattgtgaagaatattgcaatggagatattagatttctatgaaaaccatagactgttcacggaagagagagttcacgccgccttcaacaaacttgctacaaacccataa

SEQ ID NO: 2425 - protein, 518 aa, Arabidopsis thaliana
  peptide (1)..(518): Ceres Seq. ID no. 12693601
  misc_feature (274)..(408): Pfam Name: Pfam Description:  Cyclin, N-terminal domain
  misc_feature (266)..(518): NCBI GI NO: 15239664 NR Description: cyclin C-like protein; protein id: At5g48630
  misc_feature (9)..(261): NCBI GI NO: 15239665 NR Description: cyclin C-like protein; protein id: At5g48640.1
  misc_feature (9)..(258): NCBI GI NO: 15239664 NR Description: cyclin C-like protein; protein id: At5g48630
  misc_feature (266)..(515): NCBI GI NO: 15239665 NR Description: cyclin C-like protein; protein id: At5g48640.1
  misc_feature (266)..(514): NCBI GI NO: 3334144 NR Description: G1/S-SPECIFIC CYCLIN C-TYPE
  misc_feature (9)..(260): NCBI GI NO: 3334144 NR Description: G1/S-SPECIFIC CYCLIN C-TYPE
  misc_feature (266)..(514): NCBI GI NO: 28828497 NR Description: similar to Mus musculus (Mouse)
  misc_feature (265)..(506): NCBI GI NO: 38382739 NR Description: Unknown (protein for IMAGE:6391891) [Mus musculus]
  misc_feature (9)..(260): NCBI GI NO: 28828497 NR Description: similar to Mus musculus (Mouse)
  misc_feature (265)..(506): NCBI GI NO: 4885119 NR Description: cyclin C [Homo sapiens]
RLDGLPEKMAANFWNSSHYKQLLDPEEVDVVHDLDKERGISIDDFKLIKFHMSNHIMKLAQHIKVRQRVVATAITYMRRVYIRKSMVEFEPRLVALTCLYLASKAEESIVQARNLVFYIKRLYPDEYNKYELKDILGMEMKVLEALDYYLVVFHPYRSLSEFLQDAALNDVNMNQITWGIVNDTYKMDLILVHPPYRIALACIYIASVHREKDITAWFEDLHEDMNLVKNIAMEILDFYENYRTITEEKVNSAFSKLALKLIKEAMASNFWTSTHYKELKDPEEVNVVHPLDAQRGISVEDFRLIKLHMSNYISKLAQHIKIRQRVVATAVTYMRRVYTRKSLTEYEPRLVAPTCLYLACKAEESVVHAKLLVFYMKKLYADEKFRYEIKDILEMEMKVLEALNFYLVVFHPYRSLPEFLQDSGINDTSMTHLTWGLVNDTYRMDLILIHPPFLITLACIYIASVHKEKDIKTWFEELSVDMNIVKNIAMEILDFYENHRLFTEERVHAAFNKLATNP

SEQ ID NO: 2426 - protein, 510 aa, Arabidopsis thaliana
  peptide (1)..(510): Ceres Seq. ID no. 12693602
  misc_feature (266)..(400): Pfam Name: Pfam Description:  Cyclin, N-terminal domain
  misc_feature (258)..(510): NCBI GI NO: 15239664 NR Description: cyclin C-like protein; protein id: At5g48630
  misc_feature (1)..(253): NCBI GI NO: 15239665 NR Description: cyclin C-like protein; protein id: At5g48640.1
  misc_feature (1)..(250): NCBI GI NO: 15239664 NR Description: cyclin C-like protein; protein id: At5g48630
  misc_feature (258)..(507): NCBI GI NO: 15239665 NR Description: cyclin C-like protein; protein id: At5g48640.1
  misc_feature (258)..(506): NCBI GI NO: 3334144 NR Description: G1/S-SPECIFIC CYCLIN C-TYPE
  misc_feature (1)..(252): NCBI GI NO: 3334144 NR Description: G1/S-SPECIFIC CYCLIN C-TYPE
  misc_feature (258)..(506): NCBI GI NO: 28828497 NR Description: similar to Mus musculus (Mouse)
  misc_feature (257)..(498): NCBI GI NO: 38382739 NR Description: Unknown (protein for IMAGE:6391891) [Mus musculus]
  misc_feature (1)..(252): NCBI GI NO: 28828497 NR Description: similar to Mus musculus (Mouse)
  misc_feature (257)..(498): NCBI GI NO: 4885119 NR Description: cyclin C [Homo sapiens]
MAANFWNSSHYKQLLDPEEVDVVHDLDKERGISIDDFKLIKFHMSNHIMKLAQHIKVRQRVVATAITYMRRVYIRKSMVEFEPRLVALTCLYLASKAEESIVQARNLVFYIKRLYPDEYNKYELKDILGMEMKVLEALDYYLVVFHPYRSLSEFLQDAALNDVNMNQITWGIVNDTYKMDLILVHPPYRIALACIYIASVHREKDITAWFEDLHEDMNLVKNIAMEILDFYENYRTITEEKVNSAFSKLALKLIKEAMASNFWTSTHYKELKDPEEVNVVHPLDAQRGISVEDFRLIKLHMSNYISKLAQHIKIRQRVVATAVTYMRRVYTRKSLTEYEPRLVAPTCLYLACKAEESVVHAKLLVFYMKKLYADEKFRYEIKDILEMEMKVLEALNFYLVVFHPYRSLPEFLQDSGINDTSMTHLTWGLVNDTYRMDLILIHPPFLITLACIYIASVHKEKDIKTWFEELSVDMNIVKNIAMEILDFYENHRLFTEERVHAAFNKLATNP

SEQ ID NO: 2427 - protein, 467 aa, Arabidopsis thaliana
  peptide (1)..(467): Ceres Seq. ID no. 12693603
  misc_feature (223)..(357): Pfam Name: Pfam Description:  Cyclin, N-terminal domain
  misc_feature (215)..(467): NCBI GI NO: 15239664 NR Description: cyclin C-like protein; protein id: At5g48630
  misc_feature (1)..(210): NCBI GI NO: 15239665 NR Description: cyclin C-like protein; protein id: At5g48640.1
  misc_feature (1)..(207): NCBI GI NO: 15239664 NR Description: cyclin C-like protein; protein id: At5g48630
  misc_feature (215)..(464): NCBI GI NO: 15239665 NR Description: cyclin C-like protein; protein id: At5g48640.1
  misc_feature (215)..(463): NCBI GI NO: 3334144 NR Description: G1/S-SPECIFIC CYCLIN C-TYPE
  misc_feature (1)..(209): NCBI GI NO: 3334144 NR Description: G1/S-SPECIFIC CYCLIN C-TYPE
  misc_feature (215)..(463): NCBI GI NO: 28828497 NR Description: similar to Mus musculus (Mouse)
  misc_feature (214)..(455): NCBI GI NO: 38382739 NR Description: Unknown (protein for IMAGE:6391891) [Mus musculus]
  misc_feature (1)..(209): NCBI GI NO: 28828497 NR Description: similar to Mus musculus (Mouse)
  misc_feature (214)..(455): NCBI GI NO: 4885119 NR Description: cyclin C [Homo sapiens]
MSNHIMKLAQHIKVRQRVVATAITYMRRVYIRKSMVEFEPRLVALTCLYLASKAEESIVQARNLVFYIKRLYPDEYNKYELKDILGMEMKVLEALDYYLVVFHPYRSLSEFLQDAALNDVNMNQITWGIVNDTYKMDLILVHPPYRIALACIYIASVHREKDITAWFEDLHEDMNLVKNIAMEILDFYENYRTITEEKVNSAFSKLALKLIKEAMASNFWTSTHYKELKDPEEVNVVHPLDAQRGISVEDFRLIKLHMSNYISKLAQHIKIRQRVVATAVTYMRRVYTRKSLTEYEPRLVAPTCLYLACKAEESVVHAKLLVFYMKKLYADEKFRYEIKDILEMEMKVLEALNFYLVVFHPYRSLPEFLQDSGINDTSMTHLTWGLVNDTYRMDLILIHPPFLITLACIYIASVHKEKDIKTWFEELSVDMNIVKNIAMEILDFYENHRLFTEERVHAAFNKLATNP

SEQ ID NO: 2428 - DNA, 606 bp, Arabidopsis thaliana
  misc_feature (1)..(606): Ceres Seq. ID no. 12329583
agaaaatcctaactccagtcttgcattctgggaatagtttagagatggggagattgttcttggtgaatttggaaggcaagtcttacagttgtaagcactgcaagaccaatcttgctctctgtgatgatgtcgtctctaagtcttttcagtcccgacatgggaaagcttacctcttcagtaaggtagtgaatgtgtatgctggcaagaaagaagataggatgatgatgacgggaatgcatacggtggtcgatatttactgtgtcaaatgcggctcttatgttggatggaaatatgagtttgcttttgagaagaatcaaaagtacaaggaaggaaaatctgttctcgaaaggtacaaggtctggggtccagatgggaacaattattgggtggctcaagaagttgaagccggagacagcgatactgatgatgcttgattctcatcattcatatctgatttgtacattccctccaactctttcatttttctttattcttttttcctcattttgtaaaccatctatcttacattagaacagcttccgagaccaattgtttggtcattgctgcaactaccttggacacataagttaaagatctcattatctc

SEQ ID NO: 2429 - protein, 143 aa, Arabidopsis thaliana
  peptide (1)..(143): Ceres Seq. ID no. 12329584
  misc_feature (15)..(122): Pfam Name: Pfam Description:  Yippee putative zinc-binding protein
  misc_feature (15)..(143): NCBI GI NO: 18399156 NR Description: expressed protein; protein id: At3g11230
  misc_feature (15)..(143): NCBI GI NO: 21617953 NR Description: yippee-like protein [Arabidopsis thaliana]
  misc_feature (15)..(143): NCBI GI NO: 15225631 NR Description: unknown protein; protein id: At2g40110
  misc_feature (15)..(142): NCBI GI NO: 27923880 NR Description: Yippee-like protein
  misc_feature (15)..(142): NCBI GI NO: 28273361 NR Description: putative zinc binding protein
  misc_feature (15)..(135): NCBI GI NO: 15228759 NR Description: Yippee-like protein; protein id: At3g55890
  misc_feature (15)..(117): NCBI GI NO: 15232001 NR Description: Yippee-like protein; protein id: At3g08990.1
  misc_feature (15)..(143): NCBI GI NO: 15238881 NR Description: zinc-binding protein-like; protein id: At5g53940
  misc_feature (15)..(117): NCBI GI NO: 34393694 NR Description: Yippee-like protein
  misc_feature (26)..(115): NCBI GI NO: 20840809 NR Description: similar to hypothetical protein FLJ30213
KILTPVLHSGNSLEMGRLFLVNLEGKSYSCKHCKTNLALCDDVVSKSFQSRHGKAYLFSKVVNVYAGKKEDRMMMTGMHTVVDIYCVKCGSYVGWKYEFAFEKNQKYKEGKSVLERYKVWGPDGNNYWVAQEVEAGDSDTDDA

SEQ ID NO: 2430 - protein, 129 aa, Arabidopsis thaliana
  peptide (1)..(129): Ceres Seq. ID no. 12329585
  misc_feature (1)..(108): Pfam Name: Pfam Description:  Yippee putative zinc-binding protein
  misc_feature (1)..(129): NCBI GI NO: 18399156 NR Description: expressed protein; protein id: At3g11230
  misc_feature (1)..(129): NCBI GI NO: 21617953 NR Description: yippee-like protein [Arabidopsis thaliana]
  misc_feature (1)..(129): NCBI GI NO: 15225631 NR Description: unknown protein; protein id: At2g40110
  misc_feature (1)..(128): NCBI GI NO: 27923880 NR Description: Yippee-like protein
  misc_feature (1)..(128): NCBI GI NO: 28273361 NR Description: putative zinc binding protein
  misc_feature (1)..(121): NCBI GI NO: 15228759 NR Description: Yippee-like protein; protein id: At3g55890
  misc_feature (1)..(103): NCBI GI NO: 15232001 NR Description: Yippee-like protein; protein id: At3g08990.1
  misc_feature (1)..(129): NCBI GI NO: 15238881 NR Description: zinc-binding protein-like; protein id: At5g53940
  misc_feature (1)..(103): NCBI GI NO: 34393694 NR Description: Yippee-like protein
  misc_feature (12)..(101): NCBI GI NO: 20840809 NR Description: similar to hypothetical protein FLJ30213
MGRLFLVNLEGKSYSCKHCKTNLALCDDVVSKSFQSRHGKAYLFSKVVNVYAGKKEDRMMMTGMHTVVDIYCVKCGSYVGWKYEFAFEKNQKYKEGKSVLERYKVWGPDGNNYWVAQEVEAGDSDTDDA

SEQ ID NO: 2431 - protein, 84 aa, Arabidopsis thaliana
  peptide (1)..(84): Ceres Seq. ID no. 12329586
MLDGNMSLLLRRIKSTRKENLFSKGTRSGVQMGTIIGWLKKLKPETAILMMLDSHHSYLICTFPPTLSFFFILFSSFCKPSILH

SEQ ID NO: 2432 - DNA, 1525 bp, Arabidopsis thaliana
  misc_feature (1)..(1525): Ceres Seq. ID no. 12329587
aaagaacacaaaagtacagtttctttattcccttttttgaacactttaaacatcatcactcttgaaacacttcaaatctccggtcaacaaaaaccatgacttcaatttcttaaacaaaaagtttcaatctttttccaaacaaaacccatttcagattttgttctttgagaaaccaacatgagaaagacttctgtttcatctaatagctttggtgggtttttaagtcccggagctccgagttacgctgacaacaaaggttggagctccgagagagttcctcatccttcctccactacttcctcctctgcaattaacggtggtcgtcgtcacatcggctcttcttccgctttaacgacgccgttttacagcggcagagcaattccttcgaaatgggaagatgctgagcggtggatttgtagccctgtgtcgacttacccacaaggtgtttgtttaaattcctcagtgagttctgaacagagaaggcagaaatctaaaagtggtccgattgttcctcctacgttgcctcatccgcatcctacgtcttcttcgtcggcgactgggtgttatcactattctccgaggatgatgatgcggtctatggatgctcctcctaagggtttaatggttgctggttctccgttttctactggagttttggaggcggatagggtttttagaggaagtgtcggtggtggtggttgtgatggctatggtcgtggacctggccatggacatagccggagctgggttgatttgatgagtgaagaaacttcttcacttagctccaaaactgatacagaggagaaagcagagatgacgacggcgatgcaatctccggtggtatcaagaagagatatggctactcagatgagtccagaagagacgagtcctaataacaataaccagtctccaccattggttgtttctgtgattgagccacctccttgtagaggtgaagtgagagaagtgaaaatggataaaggagcaagaatgattaagcgtccaaagagacgagtcatgtcttctaggattattaggagagagcaacctgaggttgaagacaattctgaagcttctgcttcttcttcttcttgggatatctcagaaccagccatgactctttctaagttgcaaagagaggaagcgaagattgcagcttgggaaaatctgcagaaggcgaaagcagaagccgctattagaaaacttgaggtgaagctggagaagaagaaatcagcatcaatggataagatcttgaacaagcttcaaacagctaagatcaaagcacaagagatgaggagaagttcagtatccagtgaacatgaacaacaacaagggaatcatcaaatctccagaaactcggtgaagatcacgcatcttgttcgaagacatactttcatgactcctttcatgacttgctttgctcctcgtgttgattgcagaaaatcttcttctgctctctgaatttttttattgaaaagacaatttgatcaaaagaaaaaaaaatgtacactgcgaatttttcttg

SEQ ID NO: 2433 - protein, 427 aa, Arabidopsis thaliana
  peptide (1)..(427): Ceres Seq. ID no. 12329588
  misc_feature (294)..(413): Pfam Name: Pfam Description:  Remorin, C-terminal region
  misc_feature (1)..(427): NCBI GI NO: 18419945 NR Description: expressed protein; protein id: At4g36970.1
  misc_feature (1)..(427): NCBI GI NO: 15028061 NR Description: unknown protein [Arabidopsis thaliana]
  misc_feature (1)..(375): NCBI GI NO: 30693941 NR Description: conserved hypothetical protein
  misc_feature (194)..(400): NCBI GI NO: 34902218 NR Description: Unknown protein
  misc_feature (23)..(84): NCBI GI NO: 34902218 NR Description: Unknown protein
  misc_feature (178)..(401): NCBI GI NO: 18395321 NR Description: expressed protein; protein id: At2g02170
  misc_feature (4)..(88): NCBI GI NO: 18395321 NR Description: expressed protein; protein id: At2g02170
  misc_feature (214)..(383): NCBI GI NO: 28393368 NR Description: unknown protein [Arabidopsis thaliana]
  misc_feature (208)..(383): NCBI GI NO: 18408804 NR Description: expressed protein; protein id: At1g67590
  misc_feature (208)..(383): NCBI GI NO: 21536537 NR Description: unknown [Arabidopsis thaliana]
MRKTSVSSNSFGGFLSPGAPSYADNKGWSSERVPHPSSTTSSSAINGGRRHIGSSSALTTPFYSGRAIPSKWEDAERWICSPVSTYPQGVCLNSSVSSEQRRQKSKSGPIVPPTLPHPHPTSSSSATGCYHYSPRMMMRSMDAPPKGLMVAGSPFSTGVLEADRVFRGSVGGGGCDGYGRGPGHGHSRSWVDLMSEETSSLSSKTDTEEKAEMTTAMQSPVVSRRDMATQMSPEETSPNNNNQSPPLVVSVIEPPPCRGEVREVKMDKGARMIKRPKRRVMSSRIIRREQPEVEDNSEASASSSSWDISEPAMTLSKLQREEAKIAAWENLQKAKAEAAIRKLEVKLEKKKSASMDKILNKLQTAKIKAQEMRRSSVSSEHEQQQGNHQISRNSVKITHLVRRHTFMTPFMTCFAPRVDCRKSSSAL

SEQ ID NO: 2434 - protein, 292 aa, Arabidopsis thaliana
  peptide (1)..(292): Ceres Seq. ID no. 12329589
  misc_feature (159)..(278): Pfam Name: Pfam Description:  Remorin, C-terminal region
  misc_feature (1)..(292): NCBI GI NO: 18419945 NR Description: expressed protein; protein id: At4g36970.1
  misc_feature (1)..(292): NCBI GI NO: 15028061 NR Description: unknown protein [Arabidopsis thaliana]
  misc_feature (1)..(240): NCBI GI NO: 30693941 NR Description: conserved hypothetical protein
  misc_feature (59)..(265): NCBI GI NO: 34902218 NR Description: Unknown protein
  misc_feature (43)..(266): NCBI GI NO: 18395321 NR Description: expressed protein; protein id: At2g02170
  misc_feature (79)..(248): NCBI GI NO: 28393368 NR Description: unknown protein [Arabidopsis thaliana]
  misc_feature (73)..(248): NCBI GI NO: 18408804 NR Description: expressed protein; protein id: At1g67590
  misc_feature (73)..(248): NCBI GI NO: 21536537 NR Description: unknown [Arabidopsis thaliana]
  misc_feature (171)..(249): NCBI GI NO: 23928441 NR Description: hypothetical protein [Zea mays]
  misc_feature (79)..(238): NCBI GI NO: 15220725 NR Description: hypothetical protein; protein id: At1g30320.1
MMMRSMDAPPKGLMVAGSPFSTGVLEADRVFRGSVGGGGCDGYGRGPGHGHSRSWVDLMSEETSSLSSKTDTEEKAEMTTAMQSPVVSRRDMATQMSPEETSPNNNNQSPPLVVSVIEPPPCRGEVREVKMDKGARMIKRPKRRVMSSRIIRREQPEVEDNSEASASSSSWDISEPAMTLSKLQREEAKIAAWENLQKAKAEAAIRKLEVKLEKKKSASMDKILNKLQTAKIKAQEMRRSSVSSEHEQQQGNHQISRNSVKITHLVRRHTFMTPFMTCFAPRVDCRKSSSAL

SEQ ID NO: 2435 - protein, 291 aa, Arabidopsis thaliana
  peptide (1)..(291): Ceres Seq. ID no. 12329590
  misc_feature (158)..(277): Pfam Name: Pfam Description:  Remorin, C-terminal region
  misc_feature (1)..(291): NCBI GI NO: 18419945 NR Description: expressed protein; protein id: At4g36970.1
  misc_feature (1)..(291): NCBI GI NO: 15028061 NR Description: unknown protein [Arabidopsis thaliana]
  misc_feature (1)..(239): NCBI GI NO: 30693941 NR Description: conserved hypothetical protein
  misc_feature (58)..(264): NCBI GI NO: 34902218 NR Description: Unknown protein
  misc_feature (42)..(265): NCBI GI NO: 18395321 NR Description: expressed protein; protein id: At2g02170
  misc_feature (78)..(247): NCBI GI NO: 28393368 NR Description: unknown protein [Arabidopsis thaliana]
  misc_feature (72)..(247): NCBI GI NO: 18408804 NR Description: expressed protein; protein id: At1g67590
  misc_feature (72)..(247): NCBI GI NO: 21536537 NR Description: unknown [Arabidopsis thaliana]
  misc_feature (170)..(248): NCBI GI NO: 23928441 NR Description: hypothetical protein [Zea mays]
  misc_feature (78)..(237): NCBI GI NO: 15220725 NR Description: hypothetical protein; protein id: At1g30320.1
MMRSMDAPPKGLMVAGSPFSTGVLEADRVFRGSVGGGGCDGYGRGPGHGHSRSWVDLMSEETSSLSSKTDTEEKAEMTTAMQSPVVSRRDMATQMSPEETSPNNNNQSPPLVVSVIEPPPCRGEVREVKMDKGARMIKRPKRRVMSSRIIRREQPEVEDNSEASASSSSWDISEPAMTLSKLQREEAKIAAWENLQKAKAEAAIRKLEVKLEKKKSASMDKILNKLQTAKIKAQEMRRSSVSSEHEQQQGNHQISRNSVKITHLVRRHTFMTPFMTCFAPRVDCRKSSSAL

SEQ ID NO: 2436 - DNA, 1002 bp, Arabidopsis thaliana
  misc_feature (1)..(1002): Ceres Seq. ID no. 12603466
atacacaacccctcttcttctccaccttctctccattttctctttctctcatatctctctgtctacttctactcctctttctccatctgcaactcatatatttccaaaaagtgatcaagatcaacaaaatatccgaatcttgatccgaactttctttcttcgcttaacttcttgtaaatatatataactatagtctatactctatagagcatatatataaacatgaagcgaggtctagatatggcgagaagctacaatgatcatgaaagtagtcaagaaaccggacccgaatcaccaaattcttcaacctttaacggcatgaaagctcttatctcttctcattcgcctaaaagaagcaggagatccgtagagaagagagtagtgaacgtaccgatgaaagaaatggaaggatctcggcacaaaggggacacaactccgccctcagattcatgggcttggcgtaagtacggccaaaagcccattaagggatctccataccctagaggttattaccgttgtagtagcacaaaaggttgtccggcgaggaagcaagtcgagagaagcagagatgatccaacgatgattctcatcacttacacttctgagcataaccatccttggcctctcacttcttccacaagaaacgggcctaaacctaaacccgagcccaaacccgaacctgagcctgaggtagagccagaggcggaggaggaggataataagtttatggttcttggaagggggattgaaacgacgccatcatgtgtcgacgagttcgcatggtttacggagatggagacaacatcttcgacgattcttgagagcccgattttctcgtcggagaaaaagacggctgtctcgggggctgatgacgtggcggtgttctttccgatgggagaagaggatgagtctttgttcgccgatctcggcgagttgccggagtgttctgtggtgtttcgtcaccggagtagcgtagtggggtcacaagttgagatcttttga

SEQ ID NO: 2437 - protein, 259 aa, Arabidopsis thaliana
  peptide (1)..(259): Ceres Seq. ID no. 12603467
  misc_feature (73)..(133): Pfam Name: Pfam Description:  WRKY DNA -binding domain
  misc_feature (1)..(259): NCBI GI NO: 22329838 NR Description: WRKY family transcription factor
  misc_feature (13)..(251): NCBI GI NO: 30694863 NR Description: WRKY family transcription factor
  misc_feature (13)..(251): NCBI GI NO: 22331854 NR Description: WRKY family transcription factor
  misc_feature (95)..(251): NCBI GI NO: 11357269 NR Description: DNA-binding WRKY-like protein
  misc_feature (13)..(95): NCBI GI NO: 11357269 NR Description: DNA-binding WRKY-like protein
  misc_feature (1)..(197): NCBI GI NO: 34910854 NR Description: P0435H01.23
  misc_feature (224)..(249): NCBI GI NO: 34910854 NR Description: P0435H01.23
  misc_feature (8)..(166): NCBI GI NO: 34909540 NR Description: P0481E12.40
  misc_feature (26)..(149): NCBI GI NO: 15226838 NR Description: WRKY family transcription factor
  misc_feature (26)..(151): NCBI GI NO: 18397606 NR Description: WRKY family transcription factor
MKRGLDMARSYNDHESSQETGPESPNSSTFNGMKALISSHSPKRSRRSVEKRVVNVPMKEMEGSRHKGDTTPPSDSWAWRKYGQKPIKGSPYPRGYYRCSSTKGCPARKQVERSRDDPTMILITYTSEHNHPWPLTSSTRNGPKPKPEPKPEPEPEVEPEAEEEDNKFMVLGRGIETTPSCVDEFAWFTEMETTSSTILESPIFSSEKKTAVSGADDVAVFFPMGEEDESLFADLGELPECSVVFRHRSSVVGSQVEIF

SEQ ID NO: 2438 - protein, 253 aa, Arabidopsis thaliana
  peptide (1)..(253): Ceres Seq. ID no. 12603468
  misc_feature (67)..(127): Pfam Name: Pfam Description:  WRKY DNA -binding domain
  misc_feature (1)..(253): NCBI GI NO: 22329838 NR Description: WRKY family transcription factor
  misc_feature (7)..(245): NCBI GI NO: 30694863 NR Description: WRKY family transcription factor
  misc_feature (7)..(245): NCBI GI NO: 22331854 NR Description: WRKY family transcription factor
  misc_feature (89)..(245): NCBI GI NO: 11357269 NR Description: DNA-binding WRKY-like protein
  misc_feature (7)..(89): NCBI GI NO: 11357269 NR Description: DNA-binding WRKY-like protein
  misc_feature (1)..(191): NCBI GI NO: 34910854 NR Description: P0435H01.23
  misc_feature (218)..(243): NCBI GI NO: 34910854 NR Description: P0435H01.23
  misc_feature (2)..(160): NCBI GI NO: 34909540 NR Description: P0481E12.40
  misc_feature (20)..(143): NCBI GI NO: 15226838 NR Description: WRKY family transcription factor
  misc_feature (20)..(145): NCBI GI NO: 18397606 NR Description: WRKY family transcription factor
MARSYNDHESSQETGPESPNSSTFNGMKALISSHSPKRSRRSVEKRVVNVPMKEMEGSRHKGDTTPPSDSWAWRKYGQKPIKGSPYPRGYYRCSSTKGCPARKQVERSRDDPTMILITYTSEHNHPWPLTSSTRNGPKPKPEPKPEPEPEVEPEAEEEDNKFMVLGRGIETTPSCVDEFAWFTEMETTSSTILESPIFSSEKKTAVSGADDVAVFFPMGEEDESLFADLGELPECSVVFRHRSSVVGSQVEIF

SEQ ID NO: 2439 - protein, 227 aa, Arabidopsis thaliana
  peptide (1)..(227): Ceres Seq. ID no. 12603469
  misc_feature (41)..(101): Pfam Name: Pfam Description:  WRKY DNA -binding domain
  misc_feature (1)..(227): NCBI GI NO: 22329838 NR Description: WRKY family transcription factor
  misc_feature (1)..(219): NCBI GI NO: 30694863 NR Description: WRKY family transcription factor
  misc_feature (1)..(219): NCBI GI NO: 22331854 NR Description: WRKY family transcription factor
  misc_feature (63)..(219): NCBI GI NO: 11357269 NR Description: DNA-binding WRKY-like protein
  misc_feature (1)..(63): NCBI GI NO: 11357269 NR Description: DNA-binding WRKY-like protein
  misc_feature (1)..(165): NCBI GI NO: 34910854 NR Description: P0435H01.23
  misc_feature (192)..(217): NCBI GI NO: 34910854 NR Description: P0435H01.23
  misc_feature (1)..(134): NCBI GI NO: 34909540 NR Description: P0481E12.40
  misc_feature (1)..(117): NCBI GI NO: 15226838 NR Description: WRKY family transcription factor
  misc_feature (1)..(119): NCBI GI NO: 18397606 NR Description: WRKY family transcription factor
MKALISSHSPKRSRRSVEKRVVNVPMKEMEGSRHKGDTTPPSDSWAWRKYGQKPIKGSPYPRGYYRCSSTKGCPARKQVERSRDDPTMILITYTSEHNHPWPLTSSTRNGPKPKPEPKPEPEPEVEPEAEEEDNKFMVLGRGIETTPSCVDEFAWFTEMETTSSTILESPIFSSEKKTAVSGADDVAVFFPMGEEDESLFADLGELPECSVVFRHRSSVVGSQVEIF

SEQ ID NO: 2440 - DNA, 1211 bp, Arabidopsis thaliana
  misc_feature (1)..(1211): Ceres Seq. ID no. 12420820
agtgaaagagtgaatcaaagaggtgcggcggtcgccggcgaagacgtgtgctcgtcgaagaaacttctccaacctaaaattttccgaagaagtaagagttgagcaagttatcaatggaaatcgatgaagaagagccaatggtgttcttggaccgtacaacaagagcaacacggggtaaacggatgaccaagttgcttgatgacgaagtagaagaagatgaacagttttggaatcaagaagctcttaaagaggaagaacatgatgatgaatatgaagcagaacgtgaggttgctgatgagtttgacagtgacttcaatgacgatgagcctgagcctgatgcagtcgctgtaaatgaaaaagaattgagggatctgccaaagaagcggctgatttaccctgggaaaactgcttcaaagaaaaagaaaaagaagacgaaggtagtttcacaactagaatatattcctggagatgagaagccaggtgaagaattgggaaacaaggaacaagaagaaaaagaagagaatgaagcacaagaagatatggaaggtgagaaagtcattaggaaatcaacacggacttcagtggttgtacggcaagcagaaagagatgcattgcgtgctgctatacaagcaacaacaaagccaatacaaaggaaaaaagtaggggaggaaaaacggatgacccaagaagaaatgctgctggaagctgctcaaacagaaatcatgaacttgaggaatttagaacgtgtcttggcaagggaagaagaagtaaaaaagaaagcgattgtgcataaagcagtctacaagggtcctcagattcggtatcattcaaaagatggatgtaactatttagaattctgtaatggtgcgtcattcaattcagagttgtcgacgaagtctgttccctatccagaaaaagctgtatgtgtgattacgggattacctgccaagtaccgggatccaaaaacgggtcttccttatgcaactagagacgccttcaaagcaatacgtgaaaggttcatggacgaacatgatggtttgagaaagaaaatggagatgggagatttgtttgatacactagtggcgaaaggttttgcaacaaaacaaaagagaacgaagattccaaagagtaacaaatcattttccctcagaagctcagctcgtttccttagctccgagtctgaagaagagagtgaagaagattcagattaa

SEQ ID NO: 2441 - protein, 365 aa, Arabidopsis thaliana
  peptide (1)..(365): Ceres Seq. ID no. 12420821
  misc_feature (26)..(167): Pfam Name: Pfam Description:  Krr1 family
  misc_feature (1)..(365): NCBI GI NO: 15228030 NR Description: hypothetical protein; protein id: At2g36740.1
  misc_feature (2)..(363): NCBI GI NO: 40253658 NR Description: putative stress responsive gene 6 protein, Srg6
  misc_feature (4)..(363): NCBI GI NO: 12054305 NR Description: stress responsive gene 6 protein, Srg6
  misc_feature (70)..(363): NCBI GI NO: 12054303 NR Description: stress responsive gene 6 protein, Srg6
  misc_feature (14)..(302): NCBI GI NO: 20129451 NR Description: CG4621-PA [Drosophila melanogaster]
  misc_feature (14)..(239): NCBI GI NO: 13436005 NR Description: transcription factor-like 1 [Mus musculus]
  misc_feature (245)..(302): NCBI GI NO: 13436005 NR Description: transcription factor-like 1 [Mus musculus]
  misc_feature (14)..(239): NCBI GI NO: 6678255 NR Description: transcription factor-like 1 [Mus musculus]
  misc_feature (245)..(302): NCBI GI NO: 6678255 NR Description: transcription factor-like 1 [Mus musculus]
  misc_feature (14)..(239): NCBI GI NO: 37572298 NR Description: Transcription factor-like 1 [Mus musculus]
MEIDEEEPMVFLDRTTRATRGKRMTKLLDDEVEEDEQFWNQEALKEEEHDDEYEAEREVADEFDSDFNDDEPEPDAVAVNEKELRDLPKKRLIYPGKTASKKKKKKTKVVSQLEYIPGDEKPGEELGNKEQEEKEENEAQEDMEGEKVIRKSTRTSVVVRQAERDALRAAIQATTKPIQRKKVGEEKRMTQEEMLLEAAQTEIMNLRNLERVLAREEEVKKKAIVHKAVYKGPQIRYHSKDGCNYLEFCNGASFNSELSTKSVPYPEKAVCVITGLPAKYRDPKTGLPYATRDAFKAIRERFMDEHDGLRKKMEMGDLFDTLVAKGFATKQKRTKIPKSNKSFSLRSSARFLSSESEEESEEDSD

SEQ ID NO: 2442 - protein, 357 aa, Arabidopsis thaliana
  peptide (1)..(357): Ceres Seq. ID no. 12420822
  misc_feature (18)..(159): Pfam Name: Pfam Description:  Krr1 family
  misc_feature (1)..(357): NCBI GI NO: 15228030 NR Description: hypothetical protein; protein id: At2g36740.1
  misc_feature (1)..(355): NCBI GI NO: 40253658 NR Description: putative stress responsive gene 6 protein, Srg6
  misc_feature (1)..(355): NCBI GI NO: 12054305 NR Description: stress responsive gene 6 protein, Srg6
  misc_feature (62)..(355): NCBI GI NO: 12054303 NR Description: stress responsive gene 6 protein, Srg6
  misc_feature (6)..(294): NCBI GI NO: 20129451 NR Description: CG4621-PA [Drosophila melanogaster]
  misc_feature (6)..(231): NCBI GI NO: 13436005 NR Description: transcription factor-like 1 [Mus musculus]
  misc_feature (237)..(294): NCBI GI NO: 13436005 NR Description: transcription factor-like 1 [Mus musculus]
  misc_feature (6)..(231): NCBI GI NO: 6678255 NR Description: transcription factor-like 1 [Mus musculus]
  misc_feature (237)..(294): NCBI GI NO: 6678255 NR Description: transcription factor-like 1 [Mus musculus]
  misc_feature (6)..(231): NCBI GI NO: 37572298 NR Description: Transcription factor-like 1 [Mus musculus]
MVFLDRTTRATRGKRMTKLLDDEVEEDEQFWNQEALKEEEHDDEYEAEREVADEFDSDFNDDEPEPDAVAVNEKELRDLPKKRLIYPGKTASKKKKKKTKVVSQLEYIPGDEKPGEELGNKEQEEKEENEAQEDMEGEKVIRKSTRTSVVVRQAERDALRAAIQATTKPIQRKKVGEEKRMTQEEMLLEAAQTEIMNLRNLERVLAREEEVKKKAIVHKAVYKGPQIRYHSKDGCNYLEFCNGASFNSELSTKSVPYPEKAVCVITGLPAKYRDPKTGLPYATRDAFKAIRERFMDEHDGLRKKMEMGDLFDTLVAKGFATKQKRTKIPKSNKSFSLRSSARFLSSESEEESEEDSD

SEQ ID NO: 2443 - protein, 342 aa, Arabidopsis thaliana
  peptide (1)..(342): Ceres Seq. ID no. 12420823
  misc_feature (3)..(144): Pfam Name: Pfam Description:  Krr1 family
  misc_feature (1)..(342): NCBI GI NO: 15228030 NR Description: hypothetical protein; protein id: At2g36740.1
  misc_feature (1)..(340): NCBI GI NO: 40253658 NR Description: putative stress responsive gene 6 protein, Srg6
  misc_feature (1)..(340): NCBI GI NO: 12054305 NR Description: stress responsive gene 6 protein, Srg6
  misc_feature (47)..(340): NCBI GI NO: 12054303 NR Description: stress responsive gene 6 protein, Srg6
  misc_feature (1)..(279): NCBI GI NO: 20129451 NR Description: CG4621-PA [Drosophila melanogaster]
  misc_feature (1)..(216): NCBI GI NO: 13436005 NR Description: transcription factor-like 1 [Mus musculus]
  misc_feature (222)..(279): NCBI GI NO: 13436005 NR Description: transcription factor-like 1 [Mus musculus]
  misc_feature (1)..(216): NCBI GI NO: 6678255 NR Description: transcription factor-like 1 [Mus musculus]
  misc_feature (222)..(279): NCBI GI NO: 6678255 NR Description: transcription factor-like 1 [Mus musculus]
  misc_feature (1)..(216): NCBI GI NO: 37572298 NR Description: Transcription factor-like 1 [Mus musculus]
MTKLLDDEVEEDEQFWNQEALKEEEHDDEYEAEREVADEFDSDFNDDEPEPDAVAVNEKELRDLPKKRLIYPGKTASKKKKKKTKVVSQLEYIPGDEKPGEELGNKEQEEKEENEAQEDMEGEKVIRKSTRTSVVVRQAERDALRAAIQATTKPIQRKKVGEEKRMTQEEMLLEAAQTEIMNLRNLERVLAREEEVKKKAIVHKAVYKGPQIRYHSKDGCNYLEFCNGASFNSELSTKSVPYPEKAVCVITGLPAKYRDPKTGLPYATRDAFKAIRERFMDEHDGLRKKMEMGDLFDTLVAKGFATKQKRTKIPKSNKSFSLRSSARFLSSESEEESEEDSD

SEQ ID NO: 2444 - DNA, 694 bp, Arabidopsis thaliana
  misc_feature (1)..(694): Ceres Seq. ID no. 13576731
cccccgaccacttatgtaaacaaaccaaccatagtaaccaaaaccacaacaaaacacatggctaagctcattttcttcctcgccgtccaaatcctctttctcgccgtggtttcttccgccggagacggtgaagacttcgctagaaccatggaccggaaacttcttggtctccacaaaaaggagaaacttacccatttcaaagtctattggcacgatatcttaagcggtccgaacccaacctccatcatgatacaaccaccggttacaaacagttcctattttggagccatctccatgatcgacaacgctttgacggccaaagttccgatgaactccacggtgttgggtcaggcccaaggattttacgccggagcggcccaaaaggagttgggtttcctgatggcgatgaactttgctttcaagacagggaaatataacggaagcacgatcacgattcttggcaggaacacggcgttgtcggaagtcagagaaatgccgatcgtcggaggaagtgggcttttccgatttgctagaggctatgtggaggctaggacaaagtggattaatctcaagaacggtgatgctactgttgagtatagttgttacgtgttgcattattgaggttaattaatgatatttttgtctttctctatatttaatttgactacgcaataattaataaaacagatttcaa

SEQ ID NO: 2445 - protein, 206 aa, Arabidopsis thaliana
  peptide (1)..(206): Ceres Seq. ID no. 13576732
  misc_feature (33)..(205): Pfam Name: Pfam Description:  Dirigent-like protein
  misc_feature (20)..(206): NCBI GI NO: 15222673 NR Description: disease resistance response protein-related/ dirigentprotein-related
  misc_feature (20)..(206): NCBI GI NO: 22135914 NR Description: unknown protein [Arabidopsis thaliana]
  misc_feature (20)..(206): NCBI GI NO: 15239779 NR Description: disease resistance response protein-related/ dirigentprotein-related
  misc_feature (20)..(206): NCBI GI NO: 15231302 NR Description: disease resistance response protein-related/ dirigentprotein-related
  misc_feature (20)..(197): NCBI GI NO: 15231318 NR Description: disease resistance response protein-related/ dirigentprotein-related
  misc_feature (23)..(206): NCBI GI NO: 15217886 NR Description: disease resistance response protein-related/ dirigentprotein-related
  misc_feature (84)..(206): NCBI GI NO: 15231315 NR Description: disease resistance response protein-related/ dirigentprotein-related
  misc_feature (20)..(205): NCBI GI NO: 15218836 NR Description: disease resistance response protein-related/ dirigentprotein-related
  misc_feature (20)..(205): NCBI GI NO: 30681257 NR Description: disease resistance response protein-related/ dirigentprotein-related
  misc_feature (20)..(200): NCBI GI NO: 25412014 NR Description: probable disease resistance response protein
PPTTYVNKPTIVTKTTTKHMAKLIFFLAVQILFLAVVSSAGDGEDFARTMDRKLLGLHKKEKLTHFKVYWHDILSGPNPTSIMIQPPVTNSSYFGAISMIDNALTAKVPMNSTVLGQAQGFYAGAAQKELGFLMAMNFAFKTGKYNGSTITILGRNTALSEVREMPIVGGSGLFRFARGYVEARTKWINLKNGDATVEYSCYVLHY

SEQ ID NO: 2446 - protein, 187 aa, Arabidopsis thaliana
  peptide (1)..(187): Ceres Seq. ID no. 13576733
  misc_feature (14)..(186): Pfam Name: Pfam Description:  Dirigent-like protein
  misc_feature (1)..(187): NCBI GI NO: 15222673 NR Description: disease resistance response protein-related/ dirigentprotein-related
  misc_feature (1)..(187): NCBI GI NO: 22135914 NR Description: unknown protein [Arabidopsis thaliana]
  misc_feature (1)..(187): NCBI GI NO: 15239779 NR Description: disease resistance response protein-related/ dirigentprotein-related
  misc_feature (1)..(187): NCBI GI NO: 15231302 NR Description: disease resistance response protein-related/ dirigentprotein-related
  misc_feature (1)..(178): NCBI GI NO: 15231318 NR Description: disease resistance response protein-related/ dirigentprotein-related
  misc_feature (4)..(187): NCBI GI NO: 15217886 NR Description: disease resistance response protein-related/ dirigentprotein-related
  misc_feature (65)..(187): NCBI GI NO: 15231315 NR Description: disease resistance response protein-related/ dirigentprotein-related
  misc_feature (1)..(186): NCBI GI NO: 15218836 NR Description: disease resistance response protein-related/ dirigentprotein-related
  misc_feature (1)..(186): NCBI GI NO: 30681257 NR Description: disease resistance response protein-related/ dirigentprotein-related
  misc_feature (1)..(181): NCBI GI NO: 25412014 NR Description: probable disease resistance response protein
MAKLIFFLAVQILFLAVVSSAGDGEDFARTMDRKLLGLHKKEKLTHFKVYWHDILSGPNPTSIMIQPPVTNSSYFGAISMIDNALTAKVPMNSTVLGQAQGFYAGAAQKELGFLMAMNFAFKTGKYNGSTITILGRNTALSEVREMPIVGGSGLFRFARGYVEARTKWINLKNGDATVEYSCYVLHY

SEQ ID NO: 2447 - protein, 157 aa, Arabidopsis thaliana
  peptide (1)..(157): Ceres Seq. ID no. 13576734
  misc_feature (1)..(156): Pfam Name: Pfam Description:  Dirigent-like protein
  misc_feature (1)..(157): NCBI GI NO: 15222673 NR Description: disease resistance response protein-related/ dirigentprotein-related
  misc_feature (1)..(157): NCBI GI NO: 22135914 NR Description: unknown protein [Arabidopsis thaliana]
  misc_feature (1)..(157): NCBI GI NO: 15239779 NR Description: disease resistance response protein-related/ dirigentprotein-related
  misc_feature (1)..(157): NCBI GI NO: 15231302 NR Description: disease resistance response protein-related/ dirigentprotein-related
  misc_feature (1)..(148): NCBI GI NO: 15231318 NR Description: disease resistance response protein-related/ dirigentprotein-related
  misc_feature (1)..(157): NCBI GI NO: 15217886 NR Description: disease resistance response protein-related/ dirigentprotein-related
  misc_feature (35)..(157): NCBI GI NO: 15231315 NR Description: disease resistance response protein-related/ dirigentprotein-related
  misc_feature (1)..(156): NCBI GI NO: 15218836 NR Description: disease resistance response protein-related/ dirigentprotein-related
  misc_feature (1)..(156): NCBI GI NO: 30681257 NR Description: disease resistance response protein-related/ dirigentprotein-related
  misc_feature (1)..(151): NCBI GI NO: 25412014 NR Description: probable disease resistance response protein
MDRKLLGLHKKEKLTHFKVYWHDILSGPNPTSIMIQPPVTNSSYFGAISMIDNALTAKVPMNSTVLGQAQGFYAGAAQKELGFLMAMNFAFKTGKYNGSTITILGRNTALSEVREMPIVGGSGLFRFARGYVEARTKWINLKNGDATVEYSCYVLHY

SEQ ID NO: 2448 - DNA, 576 bp, Arabidopsis thaliana
  misc_feature (1)..(576): Ceres Seq. ID no. 12420816
gtcggactcagtggagaagaaggaagatccaaatcgatccgttgaaaaggaatttcgaatttgctgtgcgatgtcgagtgcggtggacgctacgggaaacccgatccctacttcggcggttttaacggcgtcagcgaagcatataggtatgaggtgtatgccggagaatgttgcgttcctcaaatgcaagaagaatgatccaaacccagagaagtgtctcgacaaaggtcgtgacgtcactcgctgcgtgcttggcttgaaaaggagatgggattatgttgggtgtatgtattactacacaaacgagtttgatctgtgtaggaaagagcaagaagccttcgagaaagtgtgtcccttgaaatgagaatcacaagttcttgtcatgttttgatttgtatctcataataaagcaaaatgttcatttttgaatgagctttactctctccatctcttgtttgttgtcatcccatttatttcctctcagatgctttcgtagtgagttccaaagacaactaaatgactcagttttattgttcgatggttcactaatcagcacagaatggaacaattgttttt

SEQ ID NO: 2449 - protein, 120 aa, Arabidopsis thaliana
  peptide (1)..(120): Ceres Seq. ID no. 12420817
  misc_feature (24)..(120): NCBI GI NO: 15239564 NR Description: NADH:ubiquinone oxidoreductase - like protein
  misc_feature (25)..(120): NCBI GI NO: 18397530 NR Description: expressed protein; protein id: At3g06310
  misc_feature (37)..(119): NCBI GI NO: 37589679 NR Description: Unknown (protein for MGC:73139) [Danio rerio]
  misc_feature (37)..(119): NCBI GI NO: 7657369 NR Description: NADH dehydrogenase
SDSVEKKEDPNRSVEKEFRICCAMSSAVDATGNPIPTSAVLTASAKHIGMRCMPENVAFLKCKKNDPNPEKCLDKGRDVTRCVLGLKRRWDYVGCMYYYTNEFDLCRKEQEAFEKVCPLK

SEQ ID NO: 2450 - protein, 97 aa, Arabidopsis thaliana
  peptide (1)..(97): Ceres Seq. ID no. 12420818
  misc_feature (1)..(97): NCBI GI NO: 15239564 NR Description: NADH:ubiquinone oxidoreductase - like protein
  misc_feature (2)..(97): NCBI GI NO: 18397530 NR Description: expressed protein; protein id: At3g06310
  misc_feature (14)..(96): NCBI GI NO: 37589679 NR Description: Unknown (protein for MGC:73139) [Danio rerio]
  misc_feature (14)..(96): NCBI GI NO: 7657369 NR Description: NADH dehydrogenase
MSSAVDATGNPIPTSAVLTASAKHIGMRCMPENVAFLKCKKNDPNPEKCLDKGRDVTRCVLGLKRRWDYVGCMYYYTNEFDLCRKEQEAFEKVCPLK

SEQ ID NO: 2451 - protein, 71 aa, Arabidopsis thaliana
  peptide (1)..(71): Ceres Seq. ID no. 12420819
  misc_feature (1)..(71): NCBI GI NO: 15239564 NR Description: NADH:ubiquinone oxidoreductase - like protein
  misc_feature (1)..(71): NCBI GI NO: 18397530 NR Description: expressed protein; protein id: At3g06310
  misc_feature (1)..(70): NCBI GI NO: 37589679 NR Description: Unknown (protein for MGC:73139) [Danio rerio]
  misc_feature (1)..(70): NCBI GI NO: 7657369 NR Description: NADH dehydrogenase
MRCMPENVAFLKCKKNDPNPEKCLDKGRDVTRCVLGLKRRWDYVGCMYYYTNEFDLCRKEQEAFEKVCPLK

SEQ ID NO: 2452 - DNA, 2395 bp, Arabidopsis thaliana
  misc_feature (1)..(2395): Ceres Seq. ID no. 13497276
atctctctctttcttcttccactcgtgaaagaaagaccagagagttttctcctgatccacacaacaacaacaacacagagatcccaaatccggaagatatcttcttctctcataactcagtttactcagattcactgaaacatacaattaagtgagcagtaaccgtcagtctctcacctgcagcaaaattcactcttctgctaataatgttctccacagagattcatctattgatcattttgactttttcaggaaccagagatgaaaaattatagttaaggttagtagtagtagataggtttaataaatttgtagttaagtaacccaaaaaaataacattaaactaaaatccaacactagaaaccagagagaccctcttaacgacaacaacctctctgtacacaagacaacaaacactctctacaaaaacactactctttccttcttcttctctctactctattctaattctaaagagagagagaaaagctatggatggatatgaagctactaggattgtgctctctagaatccaaagcttagaccctgaaaacgcatcaaagatcatgggtcttctccttcttcaagatcacggtgaaaaagagatgataaggctagcttttggtccagagactcttgttcactctgttatagtgaaagccaagaaagagttaggtctcatgaactgttcaaggtctccgtggagtcatcaagatgagttgattagccctaagaacaaccgtggctcttcactcaatccagcttctttgcccttttacgctaatggaggaagatcttctagggatttaaccaacgatttcgagctcatggatgatatgaactccagaagtactgattttttgggctctgtgcatgcgagaagcggtagctgcgttttggacggtttagggtatggtggtgattctgatttagggtttggaggtgtgccctgttcttacttcgctagaggcttctgcaaaaacggagctagctgcagattcgtccacagtgatggaggagctgatttggttggctccccaagcagaatcgagcttcttaggtctaactcggtacccccaagacttgctcaccacttcatgactcgctcttctctcccttctttttcaactaaaggtgttaacttgcagcaaaacgatgttcaaagagctgctgctgctttgatgataggagatgaattgcagaagcttggaagatggagacctgaaaggattgatctttctgctatggcttgtccagcttcaagacagatctatctgacattccctgccgacagtaggttcagggaggaagatgtgtccaattacttcagtacttttggaccagttcaagatgtgaggataccatatcagcaaaagagaatgtttggttttgtgacatttgtgtaccctgagactgttaagagcattctcgccaaagggaatcctcactttgtgtgtgattccagagttcttgtcaagccttacaaggagaaaggcaaagtccctgacaaatacagaactaaccaaacaacagagcgagaactgtccccaacaggccttgattctagccctagggacgttctaggagggagagggttttataacaacactcaagatgtgttgtggaggagtaagtttgaagaagagattcttgaacttcagagcagaaggctgatgaatctgcagcttcttgacgtcaagaagcatttccaactcaattcccctaccaacattcactctccgaatcctttcagccaatcacttatatctccacgcccattgtccgtgatcaagagagagtatgatggaggagagaaagggaaaggaagttctaaagaaggatctgatgatgatacaatgaatctaccagagaggttggaggatagcttgccagatagtccgtttgcatcgcccgctcatcatttgcttctgtttgctgattctgctgacaataacggatcggatctgtggtcgccttcttctgataatgatgataattctactccttctacactctccgactccttcaactctttcaactaccaaatgccaaggttaccggcgattggaatgttacccggtaggggtggaccaacctgtcgtgttgggatataaacaggaagtgaagtaagaaaagaaaaaaactgataaaatagagagacccttaataaccaaaaagatgcagaggtgtaaaaaataaaaagcaggaaatttgatgtaagagataggagaagagaaagaaggaagattgttgtaccatttctctagttttaatgtgttatgtgatgatggaccacacaagatgatgtaatatgatatgatatgatatatataatataggacaagaagtgtaatctctctaaagatatacaaaagaaaagagagattatcatttg

SEQ ID NO: 2453 - protein, 540 aa, Arabidopsis thaliana
  peptide (1)..(540): Ceres Seq. ID no. 13497277
  misc_feature (272)..(328): Pfam Name: a.k.a. RRM, RBD, or RNP domain Pfam Description: RNA recognition motif.
  misc_feature (1)..(540): NCBI GI NO: 15231090 NR Description: RNA recognition motif (RRM)-containing protein
  misc_feature (1)..(540): NCBI GI NO: 19423979 NR Description: unknown protein [Arabidopsis thaliana]
  misc_feature (1)..(540): NCBI GI NO: 21594547 NR Description: unknown [Arabidopsis thaliana]
  misc_feature (174)..(357): NCBI GI NO: 15229435 NR Description: RNA recognition motif (RRM)-containing protein
  misc_feature (447)..(540): NCBI GI NO: 15229435 NR Description: RNA recognition motif (RRM)-containing protein
  misc_feature (1)..(61): NCBI GI NO: 15229435 NR Description: RNA recognition motif (RRM)-containing protein
  misc_feature (375)..(423): NCBI GI NO: 15229435 NR Description: RNA recognition motif (RRM)-containing protein
  misc_feature (176)..(424): NCBI GI NO: 38230504 NR Description: predicted protein [Populus alba x Populus tremula]
  misc_feature (1)..(147): NCBI GI NO: 38230504 NR Description: predicted protein [Populus alba x Populus tremula]
  misc_feature (435)..(521): NCBI GI NO: 38230504 NR Description: predicted protein [Populus alba x Populus tremula]
MDGYEATRIVLSRIQSLDPENASKIMGLLLLQDHGEKEMIRLAFGPETLVHSVIVKAKKELGLMNCSRSPWSHQDELISPKNNRGSSLNPASLPFYANGGRSSRDLTNDFELMDDMNSRSTDFLGSVHARSGSCVLDGLGYGGDSDLGFGGVPCSYFARGFCKNGASCRFVHSDGGADLVGSPSRIELLRSNSVPPRLAHHFMTRSSLPSFSTKGVNLQQNDVQRAAAALMIGDELQKLGRWRPERIDLSAMACPASRQIYLTFPADSRFREEDVSNYFSTFGPVQDVRIPYQQKRMFGFVTFVYPETVKSILAKGNPHFVCDSRVLVKPYKEKGKVPDKYRTNQTTERELSPTGLDSSPRDVLGGRGFYNNTQDVLWRSKFEEEILELQSRRLMNLQLLDVKKHFQLNSPTNIHSPNPFSQSLISPRPLSVIKREYDGGEKGKGSSKEGSDDDTMNLPERLEDSLPDSPFASPAHHLLLFADSADNNGSDLWSPSSDNDDNSTPSTLSDSFNSFNYQMPRLPAIGMLPGRGGPTCRVGI

SEQ ID NO: 2454 - protein, 515 aa, Arabidopsis thaliana
  peptide (1)..(515): Ceres Seq. ID no. 13497278
  misc_feature (247)..(303): Pfam Name: a.k.a. RRM, RBD, or RNP domain Pfam Description: RNA recognition motif.
  misc_feature (1)..(515): NCBI GI NO: 15231090 NR Description: RNA recognition motif (RRM)-containing protein
  misc_feature (1)..(515): NCBI GI NO: 19423979 NR Description: unknown protein [Arabidopsis thaliana]
  misc_feature (1)..(515): NCBI GI NO: 21594547 NR Description: unknown [Arabidopsis thaliana]
  misc_feature (149)..(332): NCBI GI NO: 15229435 NR Description: RNA recognition motif (RRM)-containing protein
  misc_feature (422)..(515): NCBI GI NO: 15229435 NR Description: RNA recognition motif (RRM)-containing protein
  misc_feature (1)..(36): NCBI GI NO: 15229435 NR Description: RNA recognition motif (RRM)-containing protein
  misc_feature (350)..(398): NCBI GI NO: 15229435 NR Description: RNA recognition motif (RRM)-containing protein
  misc_feature (151)..(399): NCBI GI NO: 38230504 NR Description: predicted protein [Populus alba x Populus tremula]
  misc_feature (1)..(122): NCBI GI NO: 38230504 NR Description: predicted protein [Populus alba x Populus tremula]
  misc_feature (410)..(496): NCBI GI NO: 38230504 NR Description: predicted protein [Populus alba x Populus tremula]
MGLLLLQDHGEKEMIRLAFGPETLVHSVIVKAKKELGLMNCSRSPWSHQDELISPKNNRGSSLNPASLPFYANGGRSSRDLTNDFELMDDMNSRSTDFLGSVHARSGSCVLDGLGYGGDSDLGFGGVPCSYFARGFCKNGASCRFVHSDGGADLVGSPSRIELLRSNSVPPRLAHHFMTRSSLPSFSTKGVNLQQNDVQRAAAALMIGDELQKLGRWRPERIDLSAMACPASRQIYLTFPADSRFREEDVSNYFSTFGPVQDVRIPYQQKRMFGFVTFVYPETVKSILAKGNPHFVCDSRVLVKPYKEKGKVPDKYRTNQTTERELSPTGLDSSPRDVLGGRGFYNNTQDVLWRSKFEEEILELQSRRLMNLQLLDVKKHFQLNSPTNIHSPNPFSQSLISPRPLSVIKREYDGGEKGKGSSKEGSDDDTMNLPERLEDSLPDSPFASPAHHLLLFADSADNNGSDLWSPSSDNDDNSTPSTLSDSFNSFNYQMPRLPAIGMLPGRGGPTCRVGI

SEQ ID NO: 2455 - protein, 502 aa, Arabidopsis thaliana
  peptide (1)..(502): Ceres Seq. ID no. 13497279
  misc_feature (234)..(290): Pfam Name: a.k.a. RRM, RBD, or RNP domain Pfam Description: RNA recognition motif.
  misc_feature (1)..(502): NCBI GI NO: 15231090 NR Description: RNA recognition motif (RRM)-containing protein
  misc_feature (1)..(502): NCBI GI NO: 19423979 NR Description: unknown protein [Arabidopsis thaliana]
  misc_feature (1)..(502): NCBI GI NO: 21594547 NR Description: unknown [Arabidopsis thaliana]
  misc_feature (136)..(319): NCBI GI NO: 15229435 NR Description: RNA recognition motif (RRM)-containing protein
  misc_feature (409)..(502): NCBI GI NO: 15229435 NR Description: RNA recognition motif (RRM)-containing protein
  misc_feature (1)..(23): NCBI GI NO: 15229435 NR Description: RNA recognition motif (RRM)-containing protein
  misc_feature (337)..(385): NCBI GI NO: 15229435 NR Description: RNA recognition motif (RRM)-containing protein
  misc_feature (138)..(386): NCBI GI NO: 38230504 NR Description: predicted protein [Populus alba x Populus tremula]
  misc_feature (1)..(109): NCBI GI NO: 38230504 NR Description: predicted protein [Populus alba x Populus tremula]
  misc_feature (397)..(483): NCBI GI NO: 38230504 NR Description: predicted protein [Populus alba x Populus tremula]
MIRLAFGPETLVHSVIVKAKKELGLMNCSRSPWSHQDELISPKNNRGSSLNPASLPFYANGGRSSRDLTNDFELMDDMNSRSTDFLGSVHARSGSCVLDGLGYGGDSDLGFGGVPCSYFARGFCKNGASCRFVHSDGGADLVGSPSRIELLRSNSVPPRLAHHFMTRSSLPSFSTKGVNLQQNDVQRAAAALMIGDELQKLGRWRPERIDLSAMACPASRQIYLTFPADSRFREEDVSNYFSTFGPVQDVRIPYQQKRMFGFVTFVYPETVKSILAKGNPHFVCDSRVLVKPYKEKGKVPDKYRTNQTTERELSPTGLDSSPRDVLGGRGFYNNTQDVLWRSKFEEEILELQSRRLMNLQLLDVKKHFQLNSPTNIHSPNPFSQSLISPRPLSVIKREYDGGEKGKGSSKEGSDDDTMNLPERLEDSLPDSPFASPAHHLLLFADSADNNGSDLWSPSSDNDDNSTPSTLSDSFNSFNYQMPRLPAIGMLPGRGGPTCRVGI

SEQ ID NO: 2456 - DNA, 416 bp, Arabidopsis thaliana
  misc_feature (1)..(416): Ceres Seq. ID no. 12580516
gctcattagggtttctcatctacgacggcgtggtgttcctccttcctgctctgaaaaatggcgaagagaacgaagaaggttggaatcgtcggcaaatacggaacacgttatggtgcgagtatcaggaagcagattaagaagatggaggtcagccagcacagcaagtacttctgtgagttctgtggcaagtacggagtgaagcgaaaggctgttggtatctggggttgcaaggattgtggcaaggtcaaggcaggtggtgcttacacaatgaacaccgccagtgcggtcactgttagaagcacgatcagaaggttgagggagcagatcgagggttaaaagtctgctggctttttatatttggtttccttgttttgacaatttaagttttgcatcaacagtgagaacatgttttgatt

SEQ ID NO: 2457 - protein, 92 aa, Arabidopsis thaliana [sequence omitted]

SEQ ID NO: 2458 - protein, 65 aa, Arabidopsis thaliana
  peptide (1)..(65): Ceres Seq. ID no. 12580518
LIRVSHLRRRGVPPSCSEKWRRERRRLESSANTEHVMVRVSGSRLRRWRSASTASTSVSSVASTE

SEQ ID NO: 2459 - protein, 64 aa, Arabidopsis thaliana
  peptide (1)..(64): Ceres Seq. ID no. 12580519
  misc_feature (1)..(64): NCBI GI NO: 18411538 NR Description: Expressed protein; protein id: At3g60245
  misc_feature (1)..(64): NCBI GI NO: 1173045 NR Description: 60S RIBOSOMAL PROTEIN L37A
  misc_feature (1)..(63): NCBI GI NO: 34911166 NR Description: putative 60S ribosomal protein L37a
  misc_feature (1)..(64): NCBI GI NO: 6831607 NR Description: 60S ribosomal protein L37a
  misc_feature (1)..(63): NCBI GI NO: 6831602 NR Description: 60S RIBOSOMAL PROTEIN L37A
  misc_feature (1)..(63): NCBI GI NO: 15228411 NR Description: putative 60S ribosomal protein L37a
  misc_feature (1)..(64): NCBI GI NO: 11358898 NR Description: translation initiation factor eIF-4 gamma homolog F27H5
  misc_feature (1)..(63): NCBI GI NO: 6093889 NR Description: 60S RIBOSOMAL PROTEIN L37A
  misc_feature (1)..(60): NCBI GI NO: 7441206 NR Description: ribosomal protein L37a
  misc_feature (1)..(61): NCBI GI NO: 33637090 NR Description: N1 [Toxoplasma gondii]
MEVSQHSKYFCEFCGKYGVKRKAVGIWGCKDCGKVKAGGAYTMNTASAVTVRSTIRRLREQIEG

SEQ ID NO: 2460 - DNA, 1290 bp, Arabidopsis thaliana
  misc_feature (1)..(1290): Ceres Seq. ID no. 12393914
atccgcatccgctgcctccgcctctcgagtctcgtccacccgtcgtcctcctagctcctctactcgccagtcgccatgggcaagattaagatcggaatcaacggcttcggaaggatcggcaggctcgtggccagggtcgccctccagagcgaggatgtcgagctcgtcgccgtcaacgaccccttcatcaccacggactacatgacctacatgttcaagtacgacaccgtccacggccactggaagcacagcgacatcacactcaagaactccaagacccttctcttcggtgacaagccggtcaccgtctttggcatcaggaaccctgaggaaatcccgtggggtgaggctggcgctgagtacgtcgtggagtccaccggcgtcttcactgacaaggacaaggctgctcacatctcaagggtggtgccaagaaggttgttatctctgccccaagcaaagacgcacccatgtttgttgttggtgtcaatgaggacaagtacacctcggatgttaacattgtttccaatgctagctgcaccacaaactgccttgctccccttgctaaggtcattcatgacaacttcggcattgttgagggtttgatgacaactgttcatgccatcactgccacccagaaaactgttgacggaccctcagccaaggactggagaggtggcagggctgccagctttaacatcattcctagcagcaccggtgctgccaaggctgttggtaaagttcttcctgatctgaatggcaagctcactggtatgtccttccgtgttcctactgtggatgtctcggttgttgacctcaccgtcagaatcgagaagggggcctcctatgaggatatcaagaaagctattaaggctgcttccgagggtccactcaagggtatcatgggttatgcggaggaggatctggtttctaccgacttccttggtgacagcaggtcgagcatcttcgacgccaaggccgggatcgctctgaacgaccacttcgtcaagctcgtctcgtggtacgacaacgagtggggctacagcaaccgcgtcgtcgacctgatccgccacatgttcaagacccagtagaggggttttttccccctgcttctcatggatggttgctgcttgtgtatgccgagaataaatgtggatggcgcgtgcctctgggtcgccaggttcatgctgagtctggacatgttttgcacttttgcttcccttcctgctaccatctgtgacagaaccgctcgctaatatgggacctgagattagctttttgctgcttgtggtg

SEQ ID NO: 2461 - protein, 206 aa, Arabidopsis thaliana
  peptide (1)..(206): Ceres Seq. ID no. 12393915
  misc_feature (24)..(185): Pfam Name: Pfam Description:  Glyceraldehyde 3-phosphate dehydrogenase
  misc_feature (1)..(206): NCBI GI NO: 120670 NR Description: Glyceraldehyde 3-phosphate dehydrogenase
  misc_feature (1)..(206): NCBI GI NO: 66009 NR Description: glyceraldehyde-3-phosphate dehydrogenase
  misc_feature (1)..(206): NCBI GI NO: 6016075 NR Description: Glyceraldehyde 3-phosphate dehydrogenase
  misc_feature (1)..(206): NCBI GI NO: 120680 NR Description: Glyceraldehyde 3-phosphate dehydrogenase
  misc_feature (1)..(206): NCBI GI NO: 3023816 NR Description: Glyceraldehyde 3-phosphate dehydrogenase
  misc_feature (1)..(206): NCBI GI NO: 29150193 NR Description: putative glyceraldehydes 3-phosphate dehydrogenase
  misc_feature (1)..(206): NCBI GI NO: 6166167 NR Description: Glyceraldehyde 3-phosphate dehydrogenase
  misc_feature (1)..(205): NCBI GI NO: 7431535 NR Description: glyceraldehyde-3-phosphate dehydrogenase
  misc_feature (1)..(206): NCBI GI NO: 120669 NR Description: Glyceraldehyde 3-phosphate dehydrogenase
  misc_feature (1)..(206): NCBI GI NO: 18076094 NR Description: glyceraldehyde-3-phosphate dehydrogenase
MFVVGVNEDKYTSDVNIVSNASCTTNCLAPLAKVIHDNFGIVEGLMTTVHAITATQKTVDGPSAKDWRGGRAASFNIIPSSTGAAKAVGKVLPDLNGKLTGMSFRVPTVDVSVVDLTVRIEKGASYEDIKKAIKAASEGPLKGIMGYAEEDLVSTDFLGDSRSSIFDAKAGIALNDHFVKLVSWYDNEWGYSNRVVDLIRHMFKTQ

SEQ ID NO: 2462 - protein, 175 aa, Arabidopsis thaliana
  peptide (1)..(175): Ceres Seq. ID no. 12393916
  misc_feature (1)..(135): NCBI GI NO: 120670 NR Description: Glyceraldehyde 3-phosphate dehydrogenase
  misc_feature (1)..(135): NCBI GI NO: 66009 NR Description: glyceraldehyde-3-phosphate dehydrogenase
  misc_feature (1)..(135): NCBI GI NO: 6016075 NR Description: Glyceraldehyde 3-phosphate dehydrogenase
  misc_feature (1)..(135): NCBI GI NO: 120680 NR Description: Glyceraldehyde 3-phosphate dehydrogenase
  misc_feature (1)..(131): NCBI GI NO: 3023816 NR Description: Glyceraldehyde 3-phosphate dehydrogenase
  misc_feature (43)..(135): NCBI GI NO: 29150193 NR Description: putative glyceraldehydes 3-phosphate dehydrogenase
  misc_feature (1)..(47): NCBI GI NO: 29150193 NR Description: putative glyceraldehydes 3-phosphate dehydrogenase
  misc_feature (1)..(135): NCBI GI NO: 6166167 NR Description: Glyceraldehyde 3-phosphate dehydrogenase
  misc_feature (1)..(135): NCBI GI NO: 7431535 NR Description: glyceraldehyde-3-phosphate dehydrogenase
  misc_feature (3)..(135): NCBI GI NO: 120669 NR Description: Glyceraldehyde 3-phosphate dehydrogenase
MGKIKIGINGFGRIGRLVARVALQSEDVELVAVNDPFITTDYMTYMFKYDTVHGHWKHSDITLKNSKTLLFGDKPVTVFGIRNPEEIPWGEAGAEYVVESTGVFTDKDKAAHISRVVPRRLLSLPQAKTHPCLLLVSMRTSTPRMLTLFPMLAAPQTALLPLLRSFMTTSALLRV

SEQ ID NO: 2463 - protein, 161 aa, Arabidopsis thaliana
  peptide (1)..(161): Ceres Seq. ID no. 12393917
  misc_feature (1)..(140): Pfam Name: Pfam Description:  Glyceraldehyde 3-phosphate dehydrogenase
  misc_feature (1)..(161): NCBI GI NO: 120670 NR Description: Glyceraldehyde 3-phosphate dehydrogenase
  misc_feature (1)..(161): NCBI GI NO: 66009 NR Description: glyceraldehyde-3-phosphate dehydrogenase
  misc_feature (1)..(161): NCBI GI NO: 6016075 NR Description: Glyceraldehyde 3-phosphate dehydrogenase
  misc_feature (1)..(161): NCBI GI NO: 120680 NR Description: Glyceraldehyde 3-phosphate dehydrogenase
  misc_feature (1)..(161): NCBI GI NO: 3023816 NR Description: Glyceraldehyde 3-phosphate dehydrogenase
  misc_feature (1)..(161): NCBI GI NO: 29150193 NR Description: putative glyceraldehydes 3-phosphate dehydrogenase
  misc_feature (1)..(161): NCBI GI NO: 6166167 NR Description: Glyceraldehyde 3-phosphate dehydrogenase
  misc_feature (1)..(160): NCBI GI NO: 7431535 NR Description: glyceraldehyde-3-phosphate dehydrogenase
  misc_feature (1)..(161): NCBI GI NO: 120669 NR Description: Glyceraldehyde 3-phosphate dehydrogenase
  misc_feature (1)..(161): NCBI GI NO: 18076094 NR Description: glyceraldehyde-3-phosphate dehydrogenase
MTTVHAITATQKTVDGPSAKDWRGGRAASFNIIPSSTGAAKAVGKVLPDLNGKLTGMSFRVPTVDVSVVDLTVRIEKGASYEDIKKAIKAASEGPLKGIMGYAEEDLVSTDFLGDSRSSIFDAKAGIALNDHFVKLVSWYDNEWGYSNRVVDLIRHMFKTQ

SEQ ID NO: 2464 - DNA, 1271 bp, Arabidopsis thaliana
  misc_feature (1)..(1271): Ceres Seq. ID no. 13496930
aaaaaaactcttaaacagcttcctaacgagaggaaactgaggaacacaacaatggagtttcgtggagatgccaaccagaggattgctaggatttcagctcatctcactcctcagatggaggccaagaactctgtaatcggacgggaaaactgcagagctaaaggtggtaatccaggattcaaagtagcaattcttggagctgcaggtggaattggacaatctttatctttgctgatgaagatgaaccctcttgtctctttacttcatctctacgatgttgtcaatgctcctggcgtcactgctgacgtcagtcatatggacactggagctgttgtccgcgggttcttgggagcgaagcagcttgaggacgcgctaacgggtatggatcttgtgatcataccagccggtataccgaggaaaccagggatgacccgcgatgatctgtttaaaatcaatgctgggattgttaaaacactatgtgaaggtgtagcaaaatgttgtcctaatgctattgtcaacttgatcagcaaccctgtgaactctactgtccccattgccgctgaggttttcaagaaagctggaacttatgatcctaagaagctccttggagttactacactcgatgttgctcgtgccaacacatttgtggcagaagttcttggccttgatccaagagaagtcgatgtgccagtagttgggggacacgccggagtcacaatcttgccactactgtcacaggttaaacctcctagcagcttcacacctcaagaaattgagtacctgacaaaccggattcaaaatggtggaactgaagttgtggaggcaaaagctggagctggttctgcaacactttcaatggcatatgctgcagccaagtttgcagatgcttgccttcgcgggttaagaggagatgcgaatgtcgtagaatgctcttttgttgcttcacaggtgacagaattagctttctttgcaacaaaagtgcgccttggccgtacaggagcagaggaagtgtatcagcttggacccttaaacgaatacgaaaggattggtctggagaaagcaaaagatgaattagccggaagtattcagaaaggtgttgaattcatcagaaaatgaaactgagagataatcagagagatacaataagttatttcctcaactatatgatcatgtactcatcatcacatcatgcctatgtctcctctgcttctgatacaactttgtataaatccttatcagtttgtgtacgatatatgtgaccttttcaacgt

SEQ ID NO: 2465 - protein, 371 aa, Arabidopsis thaliana
  peptide (1)..(371): Ceres Seq. ID no. 13496931
  misc_feature (205)..(369): Pfam Name: Pfam Description:  lactate/malate dehydrogenase
  misc_feature (18)..(371): NCBI GI NO: 15242466 NR Description: malate dehydrogenase, glyoxysomal
  misc_feature (18)..(371): NCBI GI NO: 16323157 NR Description: AT5g09660/F17I14_150 [Arabidopsis thaliana]
  misc_feature (18)..(371): NCBI GI NO: 11133654 NR Description: Malate dehydrogenase 2, glyoxysomal precursor
  misc_feature (18)..(371): NCBI GI NO: 12644436 NR Description: Malate dehydrogenase 1, glyoxysomal precursor
  misc_feature (23)..(370): NCBI GI NO: 1170897 NR Description: MALATE DEHYDROGENASE, GLYOXYSOMAL PRECURSOR
  misc_feature (23)..(370): NCBI GI NO: 126894 NR Description: MALATE DEHYDROGENASE, GLYOXYSOMAL PRECURSOR
  misc_feature (25)..(371): NCBI GI NO: 7431168 NR Description: probable malate dehydrogenase (EC 1
  misc_feature (18)..(371): NCBI GI NO: 3183079 NR Description: MALATE DEHYDROGENASE, GLYOXYSOMAL PRECURSOR
  misc_feature (18)..(371): NCBI GI NO: 1346501 NR Description: MALATE DEHYDROGENASE, GLYOXYSOMAL PRECURSOR
  misc_feature (23)..(371): NCBI GI NO: 15227752 NR Description: malate dehydrogenase, glyoxysomal, putative
KKTLKQLPNERKLRNTTMEFRGDANQRIARISAHLTPQMEAKNSVIGRENCRAKGGNPGFKVAILGAAGGIGQSLSLLMKMNPLVSLLHLYDVVNAPGVTADVSHMDTGAVVRGFLGAKQLEDALTGMDLVIIPAGIPRKPGMTRDDLFKINAGIVKTLCEGVAKCCPNAIVNLISNPVNSTVPIAAEVFKKAGTYDPKKLLGVTTLDVARANTFVAEVLGLDPREVDVPVVGGHAGVTILPLLSQVKPPSSFTPQEIEYLTNRIQNGGTEVVEAKAGAGSATLSMAYAAAKFADACLRGLRGDANVVECSFVASQVTELAFFATKVRLGRTGAEEVYQLGPLNEYERIGLEKAKDELAGSIQKGVEFIRK

SEQ ID NO: 2466 - protein, 354 aa, Arabidopsis thaliana
  peptide (1)..(354): Ceres Seq. ID no. 13496932
  misc_feature (188)..(352): Pfam Name: Pfam Description:  lactate/malate dehydrogenase
  misc_feature (1)..(354): NCBI GI NO: 15242466 NR Description: malate dehydrogenase, glyoxysomal
  misc_feature (1)..(354): NCBI GI NO: 16323157 NR Description: AT5g09660/F17I14_150 [Arabidopsis thaliana]
  misc_feature (1)..(354): NCBI GI NO: 11133654 NR Description: Malate dehydrogenase 2, glyoxysomal precursor
  misc_feature (1)..(354): NCBI GI NO: 12644436 NR Description: Malate dehydrogenase 1, glyoxysomal precursor
  misc_feature (6)..(353): NCBI GI NO: 1170897 NR Description: MALATE DEHYDROGENASE, GLYOXYSOMAL PRECURSOR
  misc_feature (6)..(353): NCBI GI NO: 126894 NR Description: MALATE DEHYDROGENASE, GLYOXYSOMAL PRECURSOR
  misc_feature (8)..(354): NCBI GI NO: 7431168 NR Description: probable malate dehydrogenase (EC 1
  misc_feature (1)..(354): NCBI GI NO: 3183079 NR Description: MALATE DEHYDROGENASE, GLYOXYSOMAL PRECURSOR
  misc_feature (1)..(354): NCBI GI NO: 1346501 NR Description: MALATE DEHYDROGENASE, GLYOXYSOMAL PRECURSOR
  misc_feature (6)..(354): NCBI GI NO: 15227752 NR Description: malate dehydrogenase, glyoxysomal, putative
MEFRGDANQRIARISAHLTPQMEAKNSVIGRENCRAKGGNPGFKVAILGAAGGIGQSLSLLMKMNPLVSLLHLYDVVNAPGVTADVSHMDTGAVVRGFLGAKQLEDALTGMDLVIIPAGIPRKPGMTRDDLFKINAGIVKTLCEGVAKCCPNAIVNLISNPVNSTVPIAAEVFKKAGTYDPKKLLGVTTLDVARANTFVAEVLGLDPREVDVPVVGGHAGVTILPLLSQVKPPSSFTPQEIEYLTNRIQNGGTEVVEAKAGAGSATLSMAYAAAKFADACLRGLRGDANVVECSFVASQVTELAFFATKVRLGRTGAEEVYQLGPLNEYERIGLEKAKDELAGSIQKGVEFIRK

SEQ ID NO: 2467 - protein, 333 aa, Arabidopsis thaliana
  peptide (1)..(333): Ceres Seq. ID no. 13496933
  misc_feature (167)..(331): Pfam Name: Pfam Description:  lactate/malate dehydrogenase
  misc_feature (1)..(333): NCBI GI NO: 15242466 NR Description: malate dehydrogenase, glyoxysomal
  misc_feature (1)..(333): NCBI GI NO: 16323157 NR Description: AT5g09660/F17I14_150 [Arabidopsis thaliana]
  misc_feature (1)..(333): NCBI GI NO: 11133654 NR Description: Malate dehydrogenase 2, glyoxysomal precursor
  misc_feature (1)..(333): NCBI GI NO: 12644436 NR Description: Malate dehydrogenase 1, glyoxysomal precursor
  misc_feature (1)..(332): NCBI GI NO: 1170897 NR Description: MALATE DEHYDROGENASE, GLYOXYSOMAL PRECURSOR
  misc_feature (1)..(332): NCBI GI NO: 126894 NR Description: MALATE DEHYDROGENASE, GLYOXYSOMAL PRECURSOR
  misc_feature (1)..(333): NCBI GI NO: 7431168 NR Description: probable malate dehydrogenase (EC 1
  misc_feature (1)..(333): NCBI GI NO: 3183079 NR Description: MALATE DEHYDROGENASE, GLYOXYSOMAL PRECURSOR
  misc_feature (1)..(333): NCBI GI NO: 1346501 NR Description: MALATE DEHYDROGENASE, GLYOXYSOMAL PRECURSOR
  misc_feature (1)..(333): NCBI GI NO: 15227752 NR Description: malate dehydrogenase, glyoxysomal, putative
MEAKNSVIGRENCRAKGGNPGFKVAILGAAGGIGQSLSLLMKMNPLVSLLHLYDVVNAPGVTADVSHMDTGAVVRGFLGAKQLEDALTGMDLVIIPAGIPRKPGMTRDDLFKINAGIVKTLCEGVAKCCPNAIVNLISNPVNSTVPIAAEVFKKAGTYDPKKLLGVTTLDVARANTFVAEVLGLDPREVDVPVVGGHAGVTILPLLSQVKPPSSFTPQEIEYLTNRIQNGGTEVVEAKAGAGSATLSMAYAAAKFADACLRGLRGDANVVECSFVASQVTELAFFATKVRLGRTGAEEVYQLGPLNEYERIGLEKAKDELAGSIQKGVEFIRK

SEQ ID NO: 2468 - DNA, 525 bp, Arabidopsis thaliana
  misc_feature (1)..(525): Ceres Seq. ID no. 12482674
atttatctgcagttgctggttattgtttgcatgtattcaataatgtttatctggttcactgaaactgttttttttctttggcagtcattgttttacaacgcgcaaacacaactcctttcaagacctgcagttgtggagaaaatagtcgaacttggaacagtctcgttggggaactcatatcaatcggttcttaaatccggcttcagcgacaaaaaatcggatcgtgcaaccagagtttccttcaagtatagcgcttcaagaggggtttatggtacaccaaccttctacgttaacgggtttgtattgtctgatgctgcttccccttcaaattttggaggatggaagaaaatcattgatcctctggttcaagcacatgagatggaagataacttcattcccttcctttgaagattttaagtgcttttgctgtgtcaattgtcatggtataatactatctgtaatgtatagactttctcaaaacctgtatgttgctcattgtaaatttgtaataaaggaaagtgatcc

SEQ ID NO: 2469 - protein, 135 aa, Arabidopsis thaliana
  peptide (1)..(135): Ceres Seq. ID no. 12482675
  misc_feature (24)..(135): NCBI GI NO: 15222928 NR Description: unknown protein; protein id: At1g76020.1
  misc_feature (25)..(135): NCBI GI NO: 22329686 NR Description: unknown protein; protein id: At1g20225
  misc_feature (24)..(99): NCBI GI NO: 8778813 NR Description: T4O12.23 [Arabidopsis thaliana]
  misc_feature (25)..(121): NCBI GI NO: 25518088 NR Description: T20H2.2 protein - Arabidopsis thaliana
  misc_feature (24)..(122): NCBI GI NO: 38346025 NR Description: OSJNBb0071D01.2
IYLQLLVIVCMYSIMFIWFTETVFFLWQSLFYNAQTQLLSRPAVVEKIVELGTVSLGNSYQSVLKSGFSDKKSDRATRVSFKYSASRGVYGTPTFYVNGFVLSDAASPSNFGGWKKIIDPLVQAHEMEDNFIPFL

SEQ ID NO: 2470 - protein, 125 aa, Arabidopsis thaliana
  peptide (1)..(125): Ceres Seq. ID no. 12482676
  misc_feature (14)..(125): NCBI GI NO: 15222928 NR Description: unknown protein; protein id: At1g76020.1
  misc_feature (15)..(125): NCBI GI NO: 22329686 NR Description: unknown protein; protein id: At1g20225
  misc_feature (14)..(89): NCBI GI NO: 8778813 NR Description: T4O12.23 [Arabidopsis thaliana]
  misc_feature (15)..(111): NCBI GI NO: 25518088 NR Description: T20H2.2 protein - Arabidopsis thaliana
  misc_feature (14)..(112): NCBI GI NO: 38346025 NR Description: OSJNBb0071D01.2
MYSIMFIWFTETVFFLWQSLFYNAQTQLLSRPAVVEKIVELGTVSLGNSYQSVLKSGFSDKKSDRATRVSFKYSASRGVYGTPTFYVNGFVLSDAASPSNFGGWKKIIDPLVQAHEMEDNFIPFL

SEQ ID NO: 2471 - protein, 121 aa, Arabidopsis thaliana
  peptide (1)..(121): Ceres Seq. ID no. 12482677
  misc_feature (10)..(121): NCBI GI NO: 15222928 NR Description: unknown protein; protein id: At1g76020.1
  misc_feature (11)..(121): NCBI GI NO: 22329686 NR Description: unknown protein; protein id: At1g20225
  misc_feature (10)..(85): NCBI GI NO: 8778813 NR Description: T4O12.23 [Arabidopsis thaliana]
  misc_feature (11)..(107): NCBI GI NO: 25518088 NR Description: T20H2.2 protein - Arabidopsis thaliana
  misc_feature (10)..(108): NCBI GI NO: 38346025 NR Description: OSJNBb0071D01.2
MFIWFTETVFFLWQSLFYNAQTQLLSRPAVVEKIVELGTVSLGNSYQSVLKSGFSDKKSDRATRVSFKYSASRGVYGTPTFYVNGFVLSDAASPSNFGGWKKIIDPLVQAHEMEDNFIPFL

SEQ ID NO: 2472 - DNA, 1159 bp, Arabidopsis thaliana
  misc_feature (1)..(1159): Ceres Seq. ID no. 12483464
gatgaaagcaaaacatttacgtaacaatgtctataaaatcagtacaggtctattcttgttcactagcttcgaaattttagtcgaagaaacaaaaaaaaatggcgacggtacaattgtccacccaatttagctgccaaaccagagtttcaatctcaccgaactctaaatctatctccaagcctccgtttctggtaccggtgacctcaattattcaccgcccgatgatctccaccggaggaatcgctgtttccccccgtagagttttcaaagtccgagccacagatacgggagagataggatcagctctattggcggcggaggaagcaattgaagacgtggaagagacggagcggctaaagagatcgctcgtggattcgttgtacggaacagatcgaggtttaagcgcatcgagcgaaaccagagctgaaatcggagatctaatcacacagctcgagtctaagaaccctactccagctccgacggaagctcttttccttctcaacggcaaatggatcctcgcctacacatcgttcgtgaatttgttcccgttgctatcacgaggaatcgtaccgttaataaaagtcgatgagatctctcaaaccattgattcagataacttcaccgtccagaactctgttcgtttcgctggtcctttaggtacaaactcgattagcaccaacgctaaattcgaaatccgaagccctaaacgcgtccagattaagtttgagcaaggcgtaattgggacgcctcagctaacggattctattgagataccggaatatgtagaggttcttggtcaaaagattgatcttaacccgatcagagggttacttacctcggtgcaagacacagcctcgtctgtggctagaaccatatcaagccaaccaccgttgaaattctctttgccggcggacaatgcgcagtcttggctactcacgacttatctagacaaagacattcggatctctagaggagacggtggaagtgtctttgtgcttatcaaagaaggaagccctctcttgaatccttgaacttggtcaaaatatatgtgtctctcttgtcgttgtgttaagtgagacaaatatatatagtgttgttgtaggtttacttcttaatcgttattatgaacttgatgataatgaatataatgtttttaact

SEQ ID NO: 2473 - protein, 310 aa, Arabidopsis thaliana
  peptide (1)..(310): Ceres Seq. ID no. 12483465
  misc_feature (84)..(301): Pfam Name: Pfam Description:  PAP_fibrillin
  misc_feature (1)..(310): NCBI GI NO: 15235575 NR Description: fibrillin precursor-like protein
  misc_feature (1)..(310): NCBI GI NO: 21618237 NR Description: fibrillin precursor-like protein
  misc_feature (1)..(310): NCBI GI NO: 18377868 NR Description: AT4g22240/T10I14_70 [Arabidopsis thaliana]
  misc_feature (1)..(310): NCBI GI NO: 14248556 NR Description: plastid-lipid associated protein PAP2
  misc_feature (1)..(310): NCBI GI NO: 14248550 NR Description: plastid-lipid associated protein PAP2
  misc_feature (1)..(310): NCBI GI NO: 15233357 NR Description: putative fibrillin; protein id: At4g04020
  misc_feature (3)..(310): NCBI GI NO: 14248554 NR Description: plastid-lipid associated protein PAP1
  misc_feature (3)..(310): NCBI GI NO: 14248548 NR Description: plastid-lipid associated protein PAP1
  misc_feature (74)..(310): NCBI GI NO: 4139097 NR Description: fibrillin [Brassica napus]
  misc_feature (1)..(310): NCBI GI NO: 3928760 NR Description: homolog to plastid-lipid-associated protein
MATVQLSTQFSCQTRVSISPNSKSISKPPFLVPVTSIIHRPMISTGGIAVSPRRVFKVRATDTGEIGSALLAAEEAIEDVEETERLKRSLVDSLYGTDRGLSASSETRAEIGDLITQLESKNPTPAPTEALFLLNGKWILAYTSFVNLFPLLSRGIVPLIKVDEISQTIDSDNFTVQNSVRFAGPLGTNSISTNAKFEIRSPKRVQIKFEQGVIGTPQLTDSIEIPEYVEVLGQKIDLNPIRGLLTSVQDTASSVARTISSQPPLKFSLPADNAQSWLLTTYLDKDIRISRGDGGSVFVLIKEGSPLLNP

SEQ ID NO: 2474 - protein, 269 aa, Arabidopsis thaliana
  peptide (1)..(269): Ceres Seq. ID no. 12483466
  misc_feature (43)..(260): Pfam Name: Pfam Description:  PAP_fibrillin
  misc_feature (1)..(269): NCBI GI NO: 15235575 NR Description: fibrillin precursor-like protein
  misc_feature (1)..(269): NCBI GI NO: 21618237 NR Description: fibrillin precursor-like protein
  misc_feature (1)..(269): NCBI GI NO: 18377868 NR Description: AT4g22240/T10I14_70 [Arabidopsis thaliana]
  misc_feature (1)..(269): NCBI GI NO: 14248556 NR Description: plastid-lipid associated protein PAP2
  misc_feature (1)..(269): NCBI GI NO: 14248550 NR Description: plastid-lipid associated protein PAP2
  misc_feature (1)..(269): NCBI GI NO: 15233357 NR Description: putative fibrillin; protein id: At4g04020
  misc_feature (1)..(269): NCBI GI NO: 14248554 NR Description: plastid-lipid associated protein PAP1
  misc_feature (1)..(269): NCBI GI NO: 14248548 NR Description: plastid-lipid associated protein PAP1
  misc_feature (33)..(269): NCBI GI NO: 4139097 NR Description: fibrillin [Brassica napus]
  misc_feature (1)..(269): NCBI GI NO: 3928760 NR Description: homolog to plastid-lipid-associated protein
MISTGGIAVSPRRVFKVRATDTGEIGSALLAAEEAIEDVEETERLKRSLVDSLYGTDRGLSASSETRAEIGDLITQLESKNPTPAPTEALFLLNGKWILAYTSFVNLFPLLSRGIVPLIKVDEISQTIDSDNFTVQNSVRFAGPLGTNSISTNAKFEIRSPKRVQIKFEQGVIGTPQLTDSIEIPEYVEVLGQKIDLNPIRGLLTSVQDTASSVARTISSQPPLKFSLPADNAQSWLLTTYLDKDIRISRGDGGSVFVLIKEGSPLLNP

SEQ ID NO: 2475 - DNA, 941 bp, Arabidopsis thaliana
  misc_feature (1)..(941): Ceres Seq. ID no. 12322149
ccaaaagttttatcgattccaccaaattagggcgaacgcgaaatctgggtattgtaatttgaagcgatggcgacgactggaactgctgcggttgcgacgggaacttcgacggtgaagagaaaaccggtgtttgtgaaggtggaacagctaaagcctggaacgactggtcacacgttgactgttaaagtcattgaggctaatatcgtggttcctgttacccggaagactcgtccagcgagttctctgagtcgtccttctcagcctagtcgaatcgttgagtgtctcatcggtgacgaaactgggtgtatcctcttcactgctcgtaacgatcaagttgatcttatgaagccgggtgctacggtgatactgcgcaattcaaggatagacatgttcaagggtacaatgaggctaggagttgataaatggggacgcatcgaagccactggagccgcgtctttcactgtcaaggaggataacaatctgtctctcgttgagtatgaactgatcaatgttggtggtgatcagtgatcttttagtatgtttatggaggttaacccctgagagtgttgggttctgatttttctaccgtgaaggtctttgatttagatgatgaagattgtatgactggtccagagttgcttgtaggaatatgcttcttcttttttaccctaaaatatgcggtcatgatcttgctctggagaactattgagcctgcggtaatggcgtaatgcaattgttccttttaatttgtgttgatgtaagttaaagaccattgagagcttgcttgtgcactatctaatacagtaaaaataagtttttctttcttaaactttactaatgtctttgttttttcattaattactatttgatgtacactattgtaccctctcggttacagagagttttgcccaactttttacatcgaaagcatctcatccttg

SEQ ID NO: 2476 - protein, 153 aa, Arabidopsis thaliana
  peptide (1)..(153): Ceres Seq. ID no. 12322150
  misc_feature (45)..(123): Pfam Name: Pfam Description:  OB-fold nucleic acid binding domain
  misc_feature (1)..(153): NCBI GI NO: 15235304 NR Description: putative protein; protein id: At4g28440
  misc_feature (10)..(149): NCBI GI NO: 34904470 NR Description: OSJNBa0086P08.14
  misc_feature (9)..(151): NCBI GI NO: 34909622 NR Description: P0435B05.31
  misc_feature (13)..(149): NCBI GI NO: 18403397 NR Description: Expressed protein; protein id: At2g33845
  misc_feature (6)..(147): NCBI GI NO: 15219562 NR Description: hypothetical protein; protein id: At1g03810.1
  misc_feature (9)..(149): NCBI GI NO: 18395285 NR Description: expressed protein; protein id: At1g23750
  misc_feature (18)..(149): NCBI GI NO: 24413970 NR Description: contains EST AU181579
  misc_feature (9)..(149): NCBI GI NO: 18391179 NR Description: expressed protein; protein id: At1g10590
  misc_feature (9)..(149): NCBI GI NO: 30681801 NR Description: expressed protein [Arabidopsis thaliana]
  misc_feature (9)..(89): NCBI GI NO: 6573753 NR Description: F20B24.1 [Arabidopsis thaliana]
MATTGTAAVATGTSTVKRKPVFVKVEQLKPGTTGHTLTVKVIEANIVVPVTRKTRPASSLSRPSQPSRIVECLIGDETGCILFTARNDQVDLMKPGATVILRNSRIDMFKGTMRLGVDKWGRIEATGAASFTVKEDNNLSLVEYELINVGGDQ

SEQ ID NO: 2477 - DNA, 738 bp, Arabidopsis thaliana
  misc_feature (1)..(738): Ceres Seq. ID no. 13592500
gatcctcattcatctctaatactaaaatctaatctcttccttgctcactcaccaatcaaactcaaaaaactcttgaatttttcaagaacaaaagaaaaagacatctttaatggcggccatgaactcgagtgttctcacttgcagctacgcaattgctggctctggctcggtagagcttaaccagaaagttggtttggtgaattcatcagttgggtttggtcagaagaaacagatgattatgcctgtgatcaaagctcaacgcgttgttggtgatgatgttgatggatctaatggaagacgatcagccatggttttcttagcagctacactcttctccactgctgctgtttctgcttctgctaatgctggcgtcattgacgaatacctcgagaggagcaaaaccaacaaagaacttaatgataagaagagattggcaacaagtggagcaaactttgcgagagcattcactgttcaattcggaagctgcaagttccctgagaatttcactggctgccaagatcttgccaagcaaaagaaagttccatttatctcagaagatattgctttggaatgcgaaggcaaggacaagtacaagtgtggttccaatgttttctggaaatggtgaagaactttgtttgttttcatctattcttatataaatccaacaatgtatctatctctctctattcatgaaagttctcgcatccatttgaatctatcaagctaaaactctattga

SEQ ID NO: 2478 - protein, 171 aa, Arabidopsis thaliana
  peptide (1)..(171): Ceres Seq. ID no. 13592501
  misc_feature (34)..(171): Pfam Name: PSAN or PSI-N Pfam Description: Photosystem I reaction centre subunit N
  misc_feature (1)..(171): NCBI GI NO: 15237593 NR Description: photosystem I reaction center subunit PSI-N precursor
  misc_feature (1)..(171): NCBI GI NO: 28629385 NR Description: photosystem I-N subunit [Phaseolus vulgaris]
  misc_feature (30)..(171): NCBI GI NO: 400879 NR Description: Photosystem I reaction centre subunit N
  misc_feature (81)..(171): NCBI GI NO: 3914466 NR Description: Photosystem I reaction centre subunit N
  misc_feature (39)..(165): NCBI GI NO: 12744797 NR Description: PsaN precursor [Chlamydomonas reinhardtii]
  misc_feature (74)..(165): NCBI GI NO: 11134150 NR Description: Photosystem I reaction centre subunit N
  misc_feature (87)..(136): NCBI GI NO: 485082 NR Description: photosystem I 9K protein - rice
MAAMNSSVLTCSYAIAGSGSVELNQKVGLVNSSVGFGQKKQMIMPVIKAQRVVGDDVDGSNGRRSAMVFLAATLFSTAAVSASANAGVIDEYLERSKTNKELNDKKRLATSGANFARAFTVQFGSCKFPENFTGCQDLAKQKKVPFISEDIALECEGKDKYKCGSNVFWKW

SEQ ID NO: 2479 - protein, 168 aa, Arabidopsis thaliana
  peptide (1)..(168): Ceres Seq. ID no. 13592502
  misc_feature (31)..(168): Pfam Name: PSAN or PSI-N Pfam Description: Photosystem I reaction centre subunit N
  misc_feature (1)..(168): NCBI GI NO: 15237593 NR Description: photosystem I reaction center subunit PSI-N precursor
  misc_feature (1)..(168): NCBI GI NO: 28629385 NR Description: photosystem I-N subunit [Phaseolus vulgaris]
  misc_feature (27)..(168): NCBI GI NO: 400879 NR Description: Photosystem I reaction centre subunit N
  misc_feature (78)..(168): NCBI GI NO: 3914466 NR Description: Photosystem I reaction centre subunit N
  misc_feature (36)..(162): NCBI GI NO: 12744797 NR Description: PsaN precursor [Chlamydomonas reinhardtii]
  misc_feature (71)..(162): NCBI GI NO: 11134150 NR Description: Photosystem I reaction centre subunit N
  misc_feature (84)..(133): NCBI GI NO: 485082 NR Description: photosystem I 9K protein - rice
MNSSVLTCSYAIAGSGSVELNQKVGLVNSSVGFGQKKQMIMPVIKAQRVVGDDVDGSNGRRSAMVFLAATLFSTAAVSASANAGVIDEYLERSKTNKELNDKKRLATSGANFARAFTVQFGSCKFPENFTGCQDLAKQKKVPFISEDIALECEGKDKYKCGSNVFWKW

SEQ ID NO: 2480 - protein, 130 aa, Arabidopsis thaliana
  peptide (1)..(130): Ceres Seq. ID no. 13592503
  misc_feature (1)..(130): Pfam Name: PSAN or PSI-N Pfam Description: Photosystem I reaction centre subunit N
  misc_feature (1)..(130): NCBI GI NO: 15237593 NR Description: photosystem I reaction center subunit PSI-N precursor
  misc_feature (1)..(130): NCBI GI NO: 28629385 NR Description: photosystem I-N subunit [Phaseolus vulgaris]
  misc_feature (1)..(130): NCBI GI NO: 400879 NR Description: Photosystem I reaction centre subunit N
  misc_feature (40)..(130): NCBI GI NO: 3914466 NR Description: Photosystem I reaction centre subunit N
  misc_feature (1)..(124): NCBI GI NO: 12744797 NR Description: PsaN precursor [Chlamydomonas reinhardtii]
  misc_feature (33)..(124): NCBI GI NO: 11134150 NR Description: Photosystem I reaction centre subunit N
  misc_feature (46)..(95): NCBI GI NO: 485082 NR Description: photosystem I 9K protein - rice
MIMPVIKAQRVVGDDVDGSNGRRSAMVFLAATLFSTAAVSASANAGVIDEYLERSKTNKELNDKKRLATSGANFARAFTVQFGSCKFPENFTGCQDLAKQKKVPFISEDIALECEGKDKYKCGSNVFWKW

SEQ ID NO: 2481 - DNA, 751 bp, Arabidopsis thaliana
  misc_feature (1)..(751): Ceres Seq. ID no. 12580067
agcagcttcttctgctttcaattactctcgccgacgattttctcaccggaaaaaaacaatatcattgcggatacacaaactataatggacctcctcttgctggagaagtctttaatcgccgtcttcgtggcggtgattcttgccacggtgatttcaaagctccgcggcaagaaattgaagctacctccaggtcctataccaattccgatcttcggaaactggcttcaagtcggagatgatctcaaccaccgtaatctcgtcgattacgctaagaaattcggcgatctcttcctcctccgtatgggtcagcgaaacctagtcgtcgtctcctcaccggatctaacaaaggaagtgctcctcactcaaggcgttgagtttggatccagaacgagaaacgtcgtgttcgacattttcaccgggaaaggtcaagatatggtgttcactgtttacggcgagcattggaggaagatgagaagaatcatgacggttcctttcttcaccaacaaagttgttcaacagaatcgtgaaggttgggagtttgaagcagctagtgttgttgaagatgttaagaagaatccagattctgctacgaaaggaatcgtgttgaggaaacgtttgcaattgatgatgtataacaatatgttccgtatcatgttcgatagaagatttgagagtgaggatgatcctcttttccttaggcttaaggctttgaatggtgagagaatcttaaggcatcatcagctttagcttc

SEQ ID NO: 2482 - protein, 248 aa, Arabidopsis thaliana
  peptide (1)..(248): Ceres Seq. ID no. 12580068
  misc_feature (62)..(241): Pfam Name: Pfam Description:  Cytochrome P450
  misc_feature (29)..(241): NCBI GI NO: 15224514 NR Description: cinnamate-4-hydroxylase; protein id: At2g30490
  misc_feature (29)..(241): NCBI GI NO: 2780738 NR Description: trans-cinnamate 4-hydroxylase
  misc_feature (29)..(241): NCBI GI NO: 1773287 NR Description: cinnamate-4-hydroxylase [Arabidopsis thaliana]
  misc_feature (29)..(241): NCBI GI NO: 4096693 NR Description: cinnamate 4-hydroxylase [Arabidopsis thaliana]
  misc_feature (29)..(241): NCBI GI NO: 16555879 NR Description: cinnamic acid 4-hydroxylase
  misc_feature (29)..(241): NCBI GI NO: 1351206 NR Description: Trans-cinnamate 4-monooxygenase
  misc_feature (29)..(241): NCBI GI NO: 12276037 NR Description: cinnamate 4-hydroxylase
  misc_feature (29)..(241): NCBI GI NO: 3915089 NR Description: Trans-cinnamate 4-monooxygenase
  misc_feature (29)..(241): NCBI GI NO: 9965897 NR Description: cinnamate-4-hydroxylase [Gossypium arboreum]
  misc_feature (29)..(241): NCBI GI NO: 9965899 NR Description: cinnamate-4-hydroxylase [Gossypium arboreum]
SSFFCFQLLSPTIFSPEKNNIIADTQTIMDLLLLEKSLIAVFVAVILATVISKLRGKKLKLPPGPIPIPIFGNWLQVGDDLNHRNLVDYAKKFGDLFLLRMGQRNLVVVSSPDLTKEVLLTQGVEFGSRTRNVVFDIFTGKGQDMVFTVYGEHWRKMRRIMTVPFFTNKVVQQNREGWEFEAASVVEDVKKNPDSATKGIVLRKRLQLMMYNNMFRIMFDRRFESEDDPLFLRLKALNGERILRHHQL

SEQ ID NO: 2483 - protein, 220 aa, Arabidopsis thaliana
  peptide (1)..(220): Ceres Seq. ID no. 12580069
  misc_feature (34)..(213): Pfam Name: Pfam Description:  Cytochrome P450
  misc_feature (1)..(213): NCBI GI NO: 15224514 NR Description: cinnamate-4-hydroxylase; protein id: At2g30490
  misc_feature (1)..(213): NCBI GI NO: 2780738 NR Description: trans-cinnamate 4-hydroxylase
  misc_feature (1)..(213): NCBI GI NO: 1773287 NR Description: cinnamate-4-hydroxylase [Arabidopsis thaliana]
  misc_feature (1)..(213): NCBI GI NO: 4096693 NR Description: cinnamate 4-hydroxylase [Arabidopsis thaliana]
  misc_feature (1)..(213): NCBI GI NO: 16555879 NR Description: cinnamic acid 4-hydroxylase
  misc_feature (1)..(213): NCBI GI NO: 1351206 NR Description: Trans-cinnamate 4-monooxygenase
  misc_feature (1)..(213): NCBI GI NO: 12276037 NR Description: cinnamate 4-hydroxylase
  misc_feature (1)..(213): NCBI GI NO: 3915089 NR Description: Trans-cinnamate 4-monooxygenase
  misc_feature (1)..(213): NCBI GI NO: 9965897 NR Description: cinnamate-4-hydroxylase [Gossypium arboreum]
  misc_feature (1)..(213): NCBI GI NO: 9965899 NR Description: cinnamate-4-hydroxylase [Gossypium arboreum]
MDLLLLEKSLIAVFVAVILATVISKLRGKKLKLPPGPIPIPIFGNWLQVGDDLNHRNLVDYAKKFGDLFLLRMGQRNLVVVSSPDLTKEVLLTQGVEFGSRTRNVVFDIFTGKGQDMVFTVYGEHWRKMRRIMTVPFFTNKVVQQNREGWEFEAASVVEDVKKNPDSATKGIVLRKRLQLMMYNNMFRIMFDRRFESEDDPLFLRLKALNGERILRHHQL

SEQ ID NO: 2484 - protein, 148 aa, Arabidopsis thaliana
  peptide (1)..(148): Ceres Seq. ID no. 12580070
  misc_feature (1)..(141): Pfam Name: Pfam Description:  Cytochrome P450
  misc_feature (1)..(141): NCBI GI NO: 15224514 NR Description: cinnamate-4-hydroxylase; protein id: At2g30490
  misc_feature (1)..(141): NCBI GI NO: 2780738 NR Description: trans-cinnamate 4-hydroxylase
  misc_feature (1)..(141): NCBI GI NO: 1773287 NR Description: cinnamate-4-hydroxylase [Arabidopsis thaliana]
  misc_feature (1)..(141): NCBI GI NO: 4096693 NR Description: cinnamate 4-hydroxylase [Arabidopsis thaliana]
  misc_feature (1)..(141): NCBI GI NO: 16555879 NR Description: cinnamic acid 4-hydroxylase
  misc_feature (1)..(141): NCBI GI NO: 1351206 NR Description: Trans-cinnamate 4-monooxygenase
  misc_feature (1)..(141): NCBI GI NO: 12276037 NR Description: cinnamate 4-hydroxylase
  misc_feature (1)..(141): NCBI GI NO: 3915089 NR Description: Trans-cinnamate 4-monooxygenase
  misc_feature (1)..(141): NCBI GI NO: 9965897 NR Description: cinnamate-4-hydroxylase [Gossypium arboreum]
  misc_feature (1)..(141): NCBI GI NO: 9965899 NR Description: cinnamate-4-hydroxylase [Gossypium arboreum]
MGQRNLVVVSSPDLTKEVLLTQGVEFGSRTRNVVFDIFTGKGQDMVFTVYGEHWRKMRRIMTVPFFTNKVVQQNREGWEFEAASVVEDVKKNPDSATKGIVLRKRLQLMMYNNMFRIMFDRRFESEDDPLFLRLKALNGERILRHHQL

SEQ ID NO: 2485 - DNA, 1062 bp, Arabidopsis thaliana
  misc_feature (1)..(1062): Ceres Seq. ID no. 12370347
aatctctctccgtccaatttccgtctctctctctttttatctcaccgtctgatcgcttagaagcaaccatgcctcagggagattacatagatttgcacaggaagaggaatggatatcgcctcgaccacttcgagagaaagcgcaagaaggaggcgcgtgaagttcacaagcactccaccatggctcaaaagtctctaggtatcaagggtaagatgattgctaagaaaaactatgctgagaaagctctcatgaagaaaacattgaaaatgcatgaagagtcatcatcaaggcgtaaggctgatgagaatgttcaggaaggagctgttcctgcttatcttcttgatcgtgaagacaccactcgtgccaaggttcttagcaacaccattaaacaaaagaggaaagagaaagctggcaaatgggaggtccctcttccaaaggtccgtccagttgctgaagatgaaatgtttagagtgatacgatctggaaaaaggaaaactaaacaatggaagcggatggttacaaaagctacatttgttggacctgctttcacaaggaagcctccaaagtacgagcgtttcatccgcccatctggtcttcgtttcaccaaggcccacgtcactcaccctgaactaaaatgcactttctgtctcgagatcatcgggattaagaagaatcctaacggtcccatgtatacatcactcggtgtgatgaccaggggaacaatcatcgaggtcaatgtgagtgagcttggtcttgttacaccagctggaaaggttgtctggggaaaatacgctcaagtgacaaacaatccagagaacgacggatgtataaatgctgttttacttgtgtaaccaaatgtccggcactgtcgtagaagtatggatagagacgagaggaaggcgagaatcatgttggctagttttattttgttttctcctgaaacaattttgtgttatttcaagtttttttatgaatgtgtggttggtcttctcatcacattaactagctgctatgttagctttataagtatcccacattatgaaatttgttgcttctaatgtt

SEQ ID NO: 2486 - protein, 282 aa, Arabidopsis thaliana
  peptide (1)..(282): Ceres Seq. ID no. 12370348
  misc_feature (23)..(259): Pfam Name: Pfam Description:  Ribosomal protein S8e
  misc_feature (23)..(282): NCBI GI NO: 15240023 NR Description: putative protein; protein id: At5g06360
  misc_feature (23)..(282): NCBI GI NO: 21553587 NR Description: unknown [Arabidopsis thaliana]
  misc_feature (23)..(282): NCBI GI NO: 33146852 NR Description: putative TGF
  misc_feature (23)..(282): NCBI GI NO: 7662677 NR Description: hypothetical protein YR-29
  misc_feature (23)..(282): NCBI GI NO: 34925411 NR Description: TGF beta-inducible nuclear protein 1
  misc_feature (23)..(282): NCBI GI NO: 28278483 NR Description: Similar to RIKEN cDNA 5730427N09 gene
  misc_feature (23)..(282): NCBI GI NO: 34924868 NR Description: TGF beta-inducible nuclear protein 1
  misc_feature (23)..(282): NCBI GI NO: 12856931 NR Description: unnamed protein product [Mus musculus]
  misc_feature (23)..(282): NCBI GI NO: 9438133 NR Description: unknown [Ochlerotatus triseriatus]
  misc_feature (25)..(282): NCBI GI NO: 34881321 NR Description: similar to TGF beta-inducible nuclear protein 1
SLSVQFPSLSLFISPSDRLEATMPQGDYIDLHRKRNGYRLDHFERKRKKEAREVHKHSTMAQKSLGIKGKMIAKKNYAEKALMKKTLKMHEESSSRRKADENVQEGAVPAYLLDREDTTRAKVLSNTIKQKRKEKAGKWEVPLPKVRPVAEDEMFRVIRSGKRKTKQWKRMVTKATFVGPAFTRKPPKYERFIRPSGLRFTKAHVTHPELKCTFCLEIIGIKKNPNGPMYTSLGVMTRGTIIEVNVSELGLVTPAGKVVWGKYAQVTNNPENDGCINAVLLV

SEQ ID NO: 2487 - protein, 260 aa, Arabidopsis thaliana
  peptide (1)..(260): Ceres Seq. ID no. 12370349
  misc_feature (1)..(237): Pfam Name: Pfam Description:  Ribosomal protein S8e
  misc_feature (1)..(260): NCBI GI NO: 15240023 NR Description: putative protein; protein id: At5g06360
  misc_feature (1)..(260): NCBI GI NO: 21553587 NR Description: unknown [Arabidopsis thaliana]
  misc_feature (1)..(260): NCBI GI NO: 33146852 NR Description: putative TGF
  misc_feature (1)..(260): NCBI GI NO: 7662677 NR Description: hypothetical protein YR-29
  misc_feature (1)..(260): NCBI GI NO: 34925411 NR Description: TGF beta-inducible nuclear protein 1
  misc_feature (1)..(260): NCBI GI NO: 28278483 NR Description: Similar to RIKEN cDNA 5730427N09 gene
  misc_feature (1)..(260): NCBI GI NO: 34924868 NR Description: TGF beta-inducible nuclear protein 1
  misc_feature (1)..(260): NCBI GI NO: 12856931 NR Description: unnamed protein product [Mus musculus]
  misc_feature (1)..(260): NCBI GI NO: 9438133 NR Description: unknown [Ochlerotatus triseriatus]
  misc_feature (3)..(260): NCBI GI NO: 34881321 NR Description: similar to TGF beta-inducible nuclear protein 1
MPQGDYIDLHRKRNGYRLDHFERKRKKEAREVHKHSTMAQKSLGIKGKMIAKKNYAEKALMKKTLKMHEESSSRRKADENVQEGAVPAYLLDREDTTRAKVLSNTIKQKRKEKAGKWEVPLPKVRPVAEDEMFRVIRSGKRKTKQWKRMVTKATFVGPAFTRKPPKYERFIRPSGLRFTKAHVTHPELKCTFCLEIIGIKKNPNGPMYTSLGVMTRGTIIEVNVSELGLVTPAGKVVWGKYAQVTNNPENDGCINAVLLV

SEQ ID NO: 2488 - protein, 223 aa, Arabidopsis thaliana
  peptide (1)..(223): Ceres Seq. ID no. 12370350
  misc_feature (1)..(200): Pfam Name: Pfam Description:  Ribosomal protein S8e
  misc_feature (1)..(223): NCBI GI NO: 15240023 NR Description: putative protein; protein id: At5g06360
  misc_feature (1)..(223): NCBI GI NO: 21553587 NR Description: unknown [Arabidopsis thaliana]
  misc_feature (1)..(223): NCBI GI NO: 33146852 NR Description: putative TGF
  misc_feature (1)..(223): NCBI GI NO: 7662677 NR Description: hypothetical protein YR-29
  misc_feature (1)..(223): NCBI GI NO: 34925411 NR Description: TGF beta-inducible nuclear protein 1
  misc_feature (1)..(223): NCBI GI NO: 28278483 NR Description: Similar to RIKEN cDNA 5730427N09 gene
  misc_feature (1)..(223): NCBI GI NO: 34924868 NR Description: TGF beta-inducible nuclear protein 1
  misc_feature (1)..(223): NCBI GI NO: 12856931 NR Description: unnamed protein product [Mus musculus]
  misc_feature (1)..(223): NCBI GI NO: 9438133 NR Description: unknown [Ochlerotatus triseriatus]
  misc_feature (1)..(223): NCBI GI NO: 34881321 NR Description: similar to TGF beta-inducible nuclear protein 1
MAQKSLGIKGKMIAKKNYAEKALMKKTLKMHEESSSRRKADENVQEGAVPAYLLDREDTTRAKVLSNTIKQKRKEKAGKWEVPLPKVRPVAEDEMFRVIRSGKRKTKQWKRMVTKATFVGPAFTRKPPKYERFIRPSGLRFTKAHVTHPELKCTFCLEIIGIKKNPNGPMYTSLGVMTRGTIIEVNVSELGLVTPAGKVVWGKYAQVTNNPENDGCINAVLLV

SEQ ID NO: 2489 - DNA, 1730 bp, Arabidopsis thaliana
  misc_feature (1)..(1730): Ceres Seq. ID no. 12335381
atcataaacttgttctcttccagaagaaactaaaaacaaaaatggcattgcaaaagtttcctctcatggggctgcttttgctcctaaccatcctcgtctctgtgacaacagcggtcgatgatcctgtttgcccggcgacttccaagctaagccgagcaagtttccctaatgggtttttgtttggcacggctactgctgcgtttcaggtcgaaggtgcaattaatgaaacttgtcgtggaccggctctatgggatatctactgtagaagaaatccagagagatgtagtggcgaccacgccgatgtggccgttgatttcttccatcgttataaggaagatattcagctaatgaagaatctaaacacagatgcattcagactctcaatcgcatggtcaagaatatttcctcatgggagaaaggagaagggagtgagtcaagctggtgtgcaattctaccacgagctcatcgatgaactccttaaaaatggtatagttccgtttgtgactgttttccattgggacactccacaagatttggaagacgaatatggcggtttcttaagccaaaacattgtgaaagattttcgagaatatgcagattatgttttcactgaatacggtggaaaagtgaaaaactggatcactttcaacgagccatgggtctttgctcacgcaggttacgacttaggaaagaaggcaccaggacgttgttctcgctacgttccaggttgcgaagaccgagagggacaatcaggtaaagaggcttatctagtcagtcacaatctcctcaacgctcacgcagaagctgttgaagttttccgccaaaaggttaaaggtgggaaaatcggaatcgcacatagtccggcttggttcgaaccacatgatcttaaagattcaaatgacgctccaactgttagccgtgtacttgactttatgttgggatggcatctggagccaactacttcgggagattatccacaaatcatgaaagaccttcttggttacagattgcctcaatttactgctgcacaaaaagcaaaattgaaagattcgaccgatttcgtagggcttaactactatacttcgacattttcaaattataatgagaagccagatccgtctaaaccaagttggaagcaagattctcttgtttcctgggaacctaagaatgtagatcacagcgccattggtagcatgcctcttactgctgcattgcccgtctacgcaggatttagaaagcttttaaagtacatcaaggacaaatacgcaaacccggagattatgataatggaaaatggatatggagataaacttgggaccacagattcggttgacgttggtactgctgatcataacaggaaatattatcttcagaggcatcttctggctatgaacgaggctatttgcatcgataaggtgagagttacgggatactttgtatggtcattgttggataacttcgaatggcaagatggttacaaaaacagattcggactctattacgtcgatttcaaaaataacctcacacgttatgagaaagaatcagccaagtactacaaagatttcctcgctcaaggtgttcgtccatccgcgctcaagagggatgagctttaagttatattttgaggatttggttttctgttcaatgtttctttcctatgttgtagtttgtgattgaccaggatacatgaggtcttggttaataataataaaagtgttttgtttttcttc

SEQ ID NO: 2490 - protein, 536 aa, Arabidopsis thaliana
  peptide (1)..(536): Ceres Seq. ID no. 12335382
  misc_feature (14)..(536): NCBI GI NO: 15219605 NR Description: glycosyl hydrolase family 1, beta-glucosidase
  misc_feature (14)..(536): NCBI GI NO: 2286069 NR Description: beta-glucosidase [Arabidopsis thaliana]
  misc_feature (14)..(536): NCBI GI NO: 15219623 NR Description: glycosyl hydrolase family 1; protein id: At1g66280
  misc_feature (14)..(536): NCBI GI NO: 15232626 NR Description: glycosyl hydrolase family 1; protein id: At3g09260
  misc_feature (14)..(536): NCBI GI NO: 1363489 NR Description: thioglucosidase (EC 3
  misc_feature (14)..(536): NCBI GI NO: 1732570 NR Description: beta-glucosidase [Arabidopsis thaliana]
  misc_feature (14)..(536): NCBI GI NO: 15241841 NR Description: glycosyl hydrolase family 1; protein id: At5g28510
  misc_feature (103)..(536): NCBI GI NO: 1732572 NR Description: beta-glucosidase [Brassica nigra]
  misc_feature (18)..(529): NCBI GI NO: 22331243 NR Description: glycosyl hydrolase family 1; protein id: At3g21370
  misc_feature (18)..(529): NCBI GI NO: 16604493 NR Description: AT3g21370/MHC9_5 [Arabidopsis thaliana]
HKLVLFQKKLKTKMALQKFPLMGLLLLLTILVSVTTAVDDPVCPATSKLSRASFPNGFLFGTATAAFQVEGAINETCRGPALWDIYCRRNPERCSGDHADVAVDFFHRYKEDIQLMKNLNTDAFRLSIAWSRIFPHGRKEKGVSQAGVQFYHELIDELLKNGIVPFVTVFHWDTPQDLEDEYGGFLSQNIVKDFREYADYVFTEYGGKVKNWITFNEPWVFAHAGYDLGKKAPGRCSRYVPGCEDREGQSGKEAYLVSHNLLNAHAEAVEVFRQKVKGGKIGIAHSPAWFEPHDLKDSNDAPTVSRVLDFMLGWHLEPTTSGDYPQIMKDLLGYRLPQFTAAQKAKLKDSTDFVGLNYYTSTFSNYNEKPDPSKPSWKQDSLVSWEPKNVDHSAIGSMPLTAALPVYAGFRKLLKYIKDKYANPEIMIMENGYGDKLGTTDSVDVGTADHNRKYYLQRHLLAMNEAICIDKVRVTGYFVWSLLDNFEWQDGYKNRFGLYYVDFKNNLTRYEKESAKYYKDFLAQGVRPSALKRDEL

SEQ ID NO: 2491 - protein, 523 aa, Arabidopsis thaliana
  peptide (1)..(523): Ceres Seq. ID no. 12335383
  misc_feature (1)..(523): NCBI GI NO: 15219605 NR Description: glycosyl hydrolase family 1, beta-glucosidase
  misc_feature (1)..(523): NCBI GI NO: 2286069 NR Description: beta-glucosidase [Arabidopsis thaliana]
  misc_feature (1)..(523): NCBI GI NO: 15219623 NR Description: glycosyl hydrolase family 1; protein id: At1g66280
  misc_feature (1)..(523): NCBI GI NO: 15232626 NR Description: glycosyl hydrolase family 1; protein id: At3g09260
  misc_feature (1)..(523): NCBI GI NO: 1363489 NR Description: thioglucosidase (EC 3
  misc_feature (1)..(523): NCBI GI NO: 1732570 NR Description: beta-glucosidase [Arabidopsis thaliana]
  misc_feature (1)..(523): NCBI GI NO: 15241841 NR Description: glycosyl hydrolase family 1; protein id: At5g28510
  misc_feature (90)..(523): NCBI GI NO: 1732572 NR Description: beta-glucosidase [Brassica nigra]
  misc_feature (5)..(516): NCBI GI NO: 22331243 NR Description: glycosyl hydrolase family 1; protein id: At3g21370
  misc_feature (5)..(516): NCBI GI NO: 16604493 NR Description: AT3g21370/MHC9_5 [Arabidopsis thaliana]
MALQKFPLMGLLLLLTILVSVTTAVDDPVCPATSKLSRASFPNGFLFGTATAAFQVEGAINETCRGPALWDIYCRRNPERCSGDHADVAVDFFHRYKEDIQLMKNLNTDAFRLSIAWSRIFPHGRKEKGVSQAGVQFYHELIDELLKNGIVPFVTVFHWDTPQDLEDEYGGFLSQNIVKDFREYADYVFTEYGGKVKNWITFNEPWVFAHAGYDLGKKAPGRCSRYVPGCEDREGQSGKEAYLVSHNLLNAHAEAVEVFRQKVKGGKIGIAHSPAWFEPHDLKDSNDAPTVSRVLDFMLGWHLEPTTSGDYPQIMKDLLGYRLPQFTAAQKAKLKDSTDFVGLNYYTSTFSNYNEKPDPSKPSWKQDSLVSWEPKNVDHSAIGSMPLTAALPVYAGFRKLLKYIKDKYANPEIMIMENGYGDKLGTTDSVDVGTADHNRKYYLQRHLLAMNEAICIDKVRVTGYFVWSLLDNFEWQDGYKNRFGLYYVDFKNNLTRYEKESAKYYKDFLAQGVRPSALKRDEL

SEQ ID NO: 2492 - protein, 515 aa, Arabidopsis thaliana
  peptide (1)..(515): Ceres Seq. ID no. 12335384
  misc_feature (1)..(515): NCBI GI NO: 15219605 NR Description: glycosyl hydrolase family 1, beta-glucosidase
  misc_feature (1)..(515): NCBI GI NO: 2286069 NR Description: beta-glucosidase [Arabidopsis thaliana]
  misc_feature (1)..(515): NCBI GI NO: 15219623 NR Description: glycosyl hydrolase family 1; protein id: At1g66280
  misc_feature (1)..(515): NCBI GI NO: 15232626 NR Description: glycosyl hydrolase family 1; protein id: At3g09260
  misc_feature (1)..(515): NCBI GI NO: 1363489 NR Description: thioglucosidase (EC 3
  misc_feature (1)..(515): NCBI GI NO: 1732570 NR Description: beta-glucosidase [Arabidopsis thaliana]
  misc_feature (1)..(515): NCBI GI NO: 15241841 NR Description: glycosyl hydrolase family 1; protein id: At5g28510
  misc_feature (82)..(515): NCBI GI NO: 1732572 NR Description: beta-glucosidase [Brassica nigra]
  misc_feature (1)..(508): NCBI GI NO: 22331243 NR Description: glycosyl hydrolase family 1; protein id: At3g21370
  misc_feature (1)..(508): NCBI GI NO: 16604493 NR Description: AT3g21370/MHC9_5 [Arabidopsis thaliana]
MGLLLLLTILVSVTTAVDDPVCPATSKLSRASFPNGFLFGTATAAFQVEGAINETCRGPALWDIYCRRNPERCSGDHADVAVDFFHRYKEDIQLMKNLNTDAFRLSIAWSRIFPHGRKEKGVSQAGVQFYHELIDELLKNGIVPFVTVFHWDTPQDLEDEYGGFLSQNIVKDFREYADYVFTEYGGKVKNWITFNEPWVFAHAGYDLGKKAPGRCSRYVPGCEDREGQSGKEAYLVSHNLLNAHAEAVEVFRQKVKGGKIGIAHSPAWFEPHDLKDSNDAPTVSRVLDFMLGWHLEPTTSGDYPQIMKDLLGYRLPQFTAAQKAKLKDSTDFVGLNYYTSTFSNYNEKPDPSKPSWKQDSLVSWEPKNVDHSAIGSMPLTAALPVYAGFRKLLKYIKDKYANPEIMIMENGYGDKLGTTDSVDVGTADHNRKYYLQRHLLAMNEAICIDKVRVTGYFVWSLLDNFEWQDGYKNRFGLYYVDFKNNLTRYEKESAKYYKDFLAQGVRPSALKRDEL

SEQ ID NO: 2493 - DNA, 1075 bp, Arabidopsis thaliana
  misc_feature (1)..(1075): Ceres Seq. ID no. 12562413
aatcgtcatttcctcggtatctcctcctcgaaagaagaatgcctggaattagaggtccttcggaatactcgcaggaaccacctcgtcacccttctctcaaggtcaacgccaaggaacctttcaacgccgagcctccccgctcggccttagtctcatcttatatcactcccgtcgaccttttctacaagaattcttgataggggggcccttataaggcgtcaatcactctaagtcaagccacaaatcctgaagcggatgttctactcgcttatgagatgaatggagagaccctgaacagggatcacggatttccgttaagggtggttgtccctggtgtgattggtgctcgttcggtcaaatggcttgattccatcaatgtcatcgctgaagaaagccagggattcttcatgcaaaaagattacaaaatgtttccaccctctgtcaattgggataatatcaactggtcctctaggagaccgcaaatggatttccctgttcagagtgcaatctgctctgtggaggatgtgcaaatggtgaagcctggaaaggtaagtatcaaaggatatgcggtttcaggaggtggacgcgggatagaaagagtggacatatccctggatggaggcaaaaactgggtggaagcttctagaacgcaggaaccaggaaagcagtacatctcagaacacagctccagtgacaaatgggcatgggtgttgtttgaagccaccattgatgtttcacagactacagaggtcatcgccaaagcggttgattcggcggcgaatgttcaaccggaaaatgtggagtcggtgtggaacctaagaggagttctcaacacttcgtggcaccgtgtccttctccggcttggccactctaacttgtagaccaagttaccactatgcgtctggtctctctttatcttttctttaagaactaaaacatccttgaatatgcttgtccttgtggatctgtgagagcaaaatactgtttatagttaaataaaatgggaaaacccatctgttgtcatgtggtggattataaattatttatttatatgatagaactgttattcactatt

SEQ ID NO: 2494 - protein, 201 aa, Arabidopsis thaliana
  peptide (1)..(201): Ceres Seq. ID no. 12562414
  misc_feature (66)..(197): Pfam Name: Pfam Description:  Mo-co oxidoreductase dimerisation domain
  misc_feature (1)..(201): NCBI GI NO: 15232230 NR Description: putative sulfite oxidase; protein id: At3g01910
  misc_feature (1)..(201): NCBI GI NO: 6468008 NR Description: sulfite oxidase [Arabidopsis thaliana]
  misc_feature (1)..(195): NCBI GI NO: 22759584 NR Description: Moco containing protein
  misc_feature (1)..(192): NCBI GI NO: 3212610 NR Description: Chain A, Sulfite Oxidase From Chicken Liver
  misc_feature (1)..(192): NCBI GI NO: 30424565 NR Description: sulfite oxidase [Mus musculus]
  misc_feature (1)..(192): NCBI GI NO: 586053 NR Description: Sulfite oxidase, mitochondrial precursor
  misc_feature (1)..(192): NCBI GI NO: 40254758 NR Description: sulfite oxidase [Rattus norvegicus]
  misc_feature (1)..(192): NCBI GI NO: 4557867 NR Description: SUOX gene product [Homo sapiens]
  misc_feature (1)..(191): NCBI GI NO: 86440 NR Description: sulfite oxidase (EC 1.8.3.1), hepatic - chicken
  misc_feature (1)..(191): NCBI GI NO: 28558813 NR Description: Sulfite oxidase
MNGETLNRDHGFPLRVVVPGVIGARSVKWLDSINVIAEESQGFFMQKDYKMFPPSVNWDNINWSSRRPQMDFPVQSAICSVEDVQMVKPGKVSIKGYAVSGGGRGIERVDISLDGGKNWVEASRTQEPGKQYISEHSSSDKWAWVLFEATIDVSQTTEVIAKAVDSAANVQPENVESVWNLRGVLNTSWHRVLLRLGHSNL

SEQ ID NO: 2495 - protein, 157 aa, Arabidopsis thaliana
  peptide (1)..(157): Ceres Seq. ID no. 12562415
  misc_feature (22)..(153): Pfam Name: Pfam Description:  Mo-co oxidoreductase dimerisation domain
  misc_feature (1)..(157): NCBI GI NO: 15232230 NR Description: putative sulfite oxidase; protein id: At3g01910
  misc_feature (1)..(157): NCBI GI NO: 6468008 NR Description: sulfite oxidase [Arabidopsis thaliana]
  misc_feature (1)..(151): NCBI GI NO: 22759584 NR Description: Moco containing protein
  misc_feature (1)..(148): NCBI GI NO: 3212610 NR Description: Chain A, Sulfite Oxidase From Chicken Liver
  misc_feature (1)..(148): NCBI GI NO: 30424565 NR Description: sulfite oxidase [Mus musculus]
  misc_feature (1)..(148): NCBI GI NO: 586053 NR Description: Sulfite oxidase, mitochondrial precursor
  misc_feature (1)..(148): NCBI GI NO: 40254758 NR Description: sulfite oxidase [Rattus norvegicus]
  misc_feature (1)..(148): NCBI GI NO: 4557867 NR Description: SUOX gene product [Homo sapiens]
  misc_feature (1)..(147): NCBI GI NO: 86440 NR Description: sulfite oxidase (EC 1.8.3.1), hepatic - chicken
  misc_feature (1)..(147): NCBI GI NO: 28558813 NR Description: Sulfite oxidase
MQKDYKMFPPSVNWDNINWSSRRPQMDFPVQSAICSVEDVQMVKPGKVSIKGYAVSGGGRGIERVDISLDGGKNWVEASRTQEPGKQYISEHSSSDKWAWVLFEATIDVSQTTEVIAKAVDSAANVQPENVESVWNLRGVLNTSWHRVLLRLGHSNL

SEQ ID NO: 2496 - protein, 151 aa, Arabidopsis thaliana
  peptide (1)..(151): Ceres Seq. ID no. 12562416
  misc_feature (16)..(147): Pfam Name: Pfam Description:  Mo-co oxidoreductase dimerisation domain
  misc_feature (1)..(151): NCBI GI NO: 15232230 NR Description: putative sulfite oxidase; protein id: At3g01910
  misc_feature (1)..(151): NCBI GI NO: 6468008 NR Description: sulfite oxidase [Arabidopsis thaliana]
  misc_feature (1)..(145): NCBI GI NO: 22759584 NR Description: Moco containing protein
  misc_feature (1)..(142): NCBI GI NO: 3212610 NR Description: Chain A, Sulfite Oxidase From Chicken Liver
  misc_feature (1)..(142): NCBI GI NO: 30424565 NR Description: sulfite oxidase [Mus musculus]
  misc_feature (1)..(142): NCBI GI NO: 586053 NR Description: Sulfite oxidase, mitochondrial precursor
  misc_feature (1)..(142): NCBI GI NO: 40254758 NR Description: sulfite oxidase [Rattus norvegicus]
  misc_feature (1)..(142): NCBI GI NO: 4557867 NR Description: SUOX gene product [Homo sapiens]
  misc_feature (1)..(141): NCBI GI NO: 86440 NR Description: sulfite oxidase (EC 1.8.3.1), hepatic - chicken
  misc_feature (1)..(141): NCBI GI NO: 28558813 NR Description: Sulfite oxidase
MFPPSVNWDNINWSSRRPQMDFPVQSAICSVEDVQMVKPGKVSIKGYAVSGGGRGIERVDISLDGGKNWVEASRTQEPGKQYISEHSSSDKWAWVLFEATIDVSQTTEVIAKAVDSAANVQPENVESVWNLRGVLNTSWHRVLLRLGHSNL

SEQ ID NO: 2497 - DNA, 1842 bp, Arabidopsis thaliana
  misc_feature (1)..(1842): Ceres Seq. ID no. 13509651
gcttctaaaattttctggtagatctgagtccacaatcatcagaaatcaactttgtgaattgaaggccgatcactcctttgactttgttcttagggttcatcctcaaaggtgtttaatgagctcttagaagctatgggaatggcgtccatgagctctggtactgaaagccttcgtctttgcgtgtttgacttaagaagaggccaacacgaaggacaggaactggacaagatcttgttcttctatcctcctgatctaaccttctccactcagctatcggttataggtctcagtgaagggcttatcacgttcacgagacttttctccccggaggcagcttgtgaggtaattgaagcagagagacattcccatgttttctatgaggccgagcccgatatctggatggtcatgattgtagagaaaaataaggagattgaagctgtatggaggattgatgcattgcggagagtgcttaaggaagtgcactctctctttgttatgtttcaagggtcaattagggcattgcttgagaaagaaccaactggaggacttgtaagatcgcacttgtatccattcatcacagactatttaaatgatcttttcgttgggaaaaaacatcagttaccttccttccgtgactctttgaaagagcgtggaacagttcagatgctaactttagctagagatgcggcacttgaagttcagtctctcgtcggagtgctagattcgtgtgctgggaccgttcgatgccactctgtgattctatttcatgatctactggtgtcaacaactctctcacctgatgataccgtcgacttgtttgcattttctgtcatgagattaaccacaaacgcgctatcatctggcacaagttcctggtcatatctacgcaagggatccggttcacctcaaatatcttctagatctactacggtgccccctcttggttcaggcggtacattgccttcgggaaatggtagtagcacaggtcgtgttattagacctttgcagcacgataagtggtcaaaggggaaagacgggtttcttgtaactgatatttggggtttagatgccaccccgacaattttgatacagaagacgcaggaaagattttaccttttgacttatcaatacaagagtctcaccttggttcttctcgtgcctatcgctgcaattgttaatggagagctagacatctcattcgtgaagcagcaagttattgaaaacgcatcgaccaaaatcttgaaagtcgaagagaagctatcgaaagggtggggcggtgagaatgcttaccatgtaagcggttaccgttacttactagttgataatgacatggaagtttccagagcttctccaccaggaaaggtagcaacactagcaaaggagtctttgcttgcactaaacaagctaagggaagaagtggatacagaaaaaaaccgctcgaagcaagagaaagacatggaaatatgcattcgagcgaagaacaacacatgggtcatcgcgcgtctaaacagaggtaaagagctttacatggctttagagaaagcaagtgaaactcttcttgatgctacagactctgtccaaagattcagcaacaggtactgcagcggggcattctccatggattagattctgcaattgtttgttttgatagaagttgcaaaggaaagtgtttttgaagtgttttgagatatgttttagattttcaattataagatataaaagaaaccgttacaaagaaagagaatttggtgacttttgtatccacaactaaaagtaaacgtggaacttgacccttgacggtttgaactttgaagaagtcaaataaaaccttcgcttaatctc

SEQ ID NO: 2498 - protein, 497 aa, Arabidopsis thaliana
  peptide (1)..(497): Ceres Seq. ID no. 13509652
  misc_feature (1)..(497): NCBI GI NO: 25372816 NR Description: F23A5.27 [imported] - Arabidopsis thaliana
  misc_feature (1)..(497): NCBI GI NO: 15220866 NR Description: myrosinase precursor -related
  misc_feature (3)..(497): NCBI GI NO: 30684673 NR Description: expressed protein [Arabidopsis thaliana]
  misc_feature (1)..(497): NCBI GI NO: 38175489 NR Description: putative myrosinase precursor
  misc_feature (125)..(497): NCBI GI NO: 18394314 NR Description: expressed protein [Arabidopsis thaliana]
  misc_feature (125)..(497): NCBI GI NO: 21618002 NR Description: unknown [Arabidopsis thaliana]
  misc_feature (234)..(488): NCBI GI NO: 14517360 NR Description: At1g80910/F23A5_21 [Arabidopsis thaliana]
  misc_feature (3)..(312): NCBI GI NO: 18394314 NR Description: expressed protein [Arabidopsis thaliana]
  misc_feature (192)..(497): NCBI GI NO: 18266049 NR Description: myrosinase precursor [Brassica oleracea]
  misc_feature (3)..(312): NCBI GI NO: 21618002 NR Description: unknown [Arabidopsis thaliana]
MGMASMSSGTESLRLCVFDLRRGQHEGQELDKILFFYPPDLTFSTQLSVIGLSEGLITFTRLFSPEAACEVIEAERHSHVFYEAEPDIWMVMIVEKNKEIEAVWRIDALRRVLKEVHSLFVMFQGSIRALLEKEPTGGLVRSHLYPFITDYLNDLFVGKKHQLPSFRDSLKERGTVQMLTLARDAALEVQSLVGVLDSCAGTVRCHSVILFHDLLVSTTLSPDDTVDLFAFSVMRLTTNALSSGTSSWSYLRKGSGSPQISSRSTTVPPLGSGGTLPSGNGSSTGRVIRPLQHDKWSKGKDGFLVTDIWGLDATPTILIQKTQERFYLLTYQYKSLTLVLLVPIAAIVNGELDISFVKQQVIENASTKILKVEEKLSKGWGGENAYHVSGYRYLLVDNDMEVSRASPPGKVATLAKESLLALNKLREEVDTEKNRSKQEKDMEICIRAKNNTWVIARLNRGKELYMALEKASETLLDATDSVQRFSNRYCSGAFSMD

SEQ ID NO: 2499 - protein, 495 aa, Arabidopsis thaliana
  peptide (1)..(495): Ceres Seq. ID no. 13509653
  misc_feature (1)..(495): NCBI GI NO: 25372816 NR Description: F23A5.27 [imported] - Arabidopsis thaliana
  misc_feature (1)..(495): NCBI GI NO: 15220866 NR Description: myrosinase precursor -related
  misc_feature (1)..(495): NCBI GI NO: 30684673 NR Description: expressed protein [Arabidopsis thaliana]
  misc_feature (1)..(495): NCBI GI NO: 38175489 NR Description: putative myrosinase precursor
  misc_feature (123)..(495): NCBI GI NO: 18394314 NR Description: expressed protein [Arabidopsis thaliana]
  misc_feature (123)..(495): NCBI GI NO: 21618002 NR Description: unknown [Arabidopsis thaliana]
  misc_feature (232)..(486): NCBI GI NO: 14517360 NR Description: At1g80910/F23A5_21 [Arabidopsis thaliana]
  misc_feature (1)..(310): NCBI GI NO: 18394314 NR Description: expressed protein [Arabidopsis thaliana]
  misc_feature (190)..(495): NCBI GI NO: 18266049 NR Description: myrosinase precursor [Brassica oleracea]
  misc_feature (1)..(310): NCBI GI NO: 21618002 NR Description: unknown [Arabidopsis thaliana]
MASMSSGTESLRLCVFDLRRGQHEGQELDKILFFYPPDLTFSTQLSVIGLSEGLITFTRLFSPEAACEVIEAERHSHVFYEAEPDIWMVMIVEKNKEIEAVWRIDALRRVLKEVHSLFVMFQGSIRALLEKEPTGGLVRSHLYPFITDYLNDLFVGKKHQLPSFRDSLKERGTVQMLTLARDAALEVQSLVGVLDSCAGTVRCHSVILFHDLLVSTTLSPDDTVDLFAFSVMRLTTNALSSGTSSWSYLRKGSGSPQISSRSTTVPPLGSGGTLPSGNGSSTGRVIRPLQHDKWSKGKDGFLVTDIWGLDATPTILIQKTQERFYLLTYQYKSLTLVLLVPIAAIVNGELDISFVKQQVIENASTKILKVEEKLSKGWGGENAYHVSGYRYLLVDNDMEVSRASPPGKVATLAKESLLALNKLREEVDTEKNRSKQEKDMEICIRAKNNTWVIARLNRGKELYMALEKASETLLDATDSVQRFSNRYCSGAFSMD

SEQ ID NO: 2500 - protein, 492 aa, Arabidopsis thaliana
  peptide (1)..(492): Ceres Seq. ID no. 13509654
  misc_feature (1)..(492): NCBI GI NO: 25372816 NR Description: F23A5.27 [imported] - Arabidopsis thaliana
  misc_feature (1)..(492): NCBI GI NO: 15220866 NR Description: myrosinase precursor -related
  misc_feature (1)..(492): NCBI GI NO: 30684673 NR Description: expressed protein [Arabidopsis thaliana]
  misc_feature (1)..(492): NCBI GI NO: 38175489 NR Description: putative myrosinase precursor
  misc_feature (120)..(492): NCBI GI NO: 18394314 NR Description: expressed protein [Arabidopsis thaliana]
  misc_feature (120)..(492): NCBI GI NO: 21618002 NR Description: unknown [Arabidopsis thaliana]
  misc_feature (229)..(483): NCBI GI NO: 14517360 NR Description: At1g80910/F23A5_21 [Arabidopsis thaliana]
  misc_feature (1)..(307): NCBI GI NO: 18394314 NR Description: expressed protein [Arabidopsis thaliana]
  misc_feature (187)..(492): NCBI GI NO: 18266049 NR Description: myrosinase precursor [Brassica oleracea]
  misc_feature (1)..(307): NCBI GI NO: 21618002 NR Description: unknown [Arabidopsis thaliana]
MSSGTESLRLCVFDLRRGQHEGQELDKILFFYPPDLTFSTQLSVIGLSEGLITFTRLFSPEAACEVIEAERHSHVFYEAEPDIWMVMIVEKNKEIEAVWRIDALRRVLKEVHSLFVMFQGSIRALLEKEPTGGLVRSHLYPFITDYLNDLFVGKKHQLPSFRDSLKERGTVQMLTLARDAALEVQSLVGVLDSCAGTVRCHSVILFHDLLVSTTLSPDDTVDLFAFSVMRLTTNALSSGTSSWSYLRKGSGSPQISSRSTTVPPLGSGGTLPSGNGSSTGRVIRPLQHDKWSKGKDGFLVTDIWGLDATPTILIQKTQERFYLLTYQYKSLTLVLLVPIAAIVNGELDISFVKQQVIENASTKILKVEEKLSKGWGGENAYHVSGYRYLLVDNDMEVSRASPPGKVATLAKESLLALNKLREEVDTEKNRSKQEKDMEICIRAKNNTWVIARLNRGKELYMALEKASETLLDATDSVQRFSNRYCSGAFSMD

SEQ ID NO: 2501 - DNA, 1280 bp, Arabidopsis thaliana
  misc_feature (1)..(1280): Ceres Seq. ID no. 12335829
aaattgtcttttgtctcctttccttttcgtttttagggtttttttttcttagcacagctctctcttctcaatttccccaaatgaaataaattcctccgaaagtttatagatttcactctcccccgaactatacaaatttccctcaaaaggaaaaactaaaaagccgatcttggcttttttgtttctgagtgcatctcgatacttggaagcattctttggtgaggctgattcattctcatctgtgaaagtctttggcttttgaagcaatactatggaaggaattcagcatcctatacctcgcactgtcgaagaggtttttagcgactttcgtggtcgtagagctggtctcatcaaggctctctctactgatgtacagaagttttaccatcagtgtgaccctgagaaggaaaacttgtgtctttatggacttccaaatgagacatgggaggttaatcttcccgttgaggaggtccctcctgagcttcctgaaccagcgttaggcatcaatttcgcaagggacggaatgcaagaaaaagactggatttctttggttgcagttcacagtgattcatggcttatctctgttgcattttactttggtgcacgtttcggatttggcaagaatgagaggaagaggctcttccagatgataaatgatctcccaaccattttcgaggttgtaactggcaatgcaaagcaatccaaggatcaatctgctaaccacaacagtagcagaagcaaatctagtggtggcaagcctcgtcattctgaatctcacactaaggcttcaaagatgtcccctccaccaagaaaagaagatgagagcggagatgaggatgaagatgacgagcaaggtgctgtttgtggtgcgtgtggcgacaactatggaggagatgagttctggatatgttgtgatgcttgcgagaaatggttccatgggaaatgcgtgaagatcacaccagcaaaggctgagcatatcaaacattacaaatgcccaagttgcactaccagcaagaaaatgaaagcctgaaagtgataataacattagagcctgtgaaagaggaaaacgttttcacagtttaagaagacagtacaagagtttagctgtgggaagaagaagaaacaaaaggcttctgattgcgtagttttaatgggattgagacagcttacagttagtaatgtctctttctcttttcttttctttttttttgctgttaatgttaaaatgttatgactaatttgtcttaagtttctgagaaaattctgtcttttaagcactc

SEQ ID NO: 2502 - protein, 252 aa, Arabidopsis thaliana
  peptide (1)..(252): Ceres Seq. ID no. 12335830
  misc_feature (197)..(247): Pfam Name: Pfam Description:  PHD-finger
  misc_feature (1)..(252): NCBI GI NO: 15223786 NR Description: nucleic acid binding protein
  misc_feature (34)..(252): NCBI GI NO: 25346630 NR Description: F14L17.29 protein - Arabidopsis thaliana
  misc_feature (1)..(32): NCBI GI NO: 25346630 NR Description: F14L17.29 protein - Arabidopsis thaliana
  misc_feature (1)..(248): NCBI GI NO: 21593407 NR Description: putative PHD-type zinc finger protein
  misc_feature (1)..(248): NCBI GI NO: 15226967 NR Description: putative PHD-type zinc finger protein
  misc_feature (1)..(248): NCBI GI NO: 7488751 NR Description: probable zinc finger protein - alfalfa (fragment)
  misc_feature (9)..(252): NCBI GI NO: 15229157 NR Description: nucleic acid binding protein-like
  misc_feature (9)..(248): NCBI GI NO: 15239624 NR Description: nucleic acid binding protein - like
  misc_feature (9)..(245): NCBI GI NO: 14192880 NR Description: Putative nucleic acid binding protein
  misc_feature (9)..(245): NCBI GI NO: 34394182 NR Description: putative nucleic acid binding protein
MEGIQHPIPRTVEEVFSDFRGRRAGLIKALSTDVQKFYHQCDPEKENLCLYGLPNETWEVNLPVEEVPPELPEPALGINFARDGMQEKDWISLVAVHSDSWLISVAFYFGARFGFGKNERKRLFQMINDLPTIFEVVTGNAKQSKDQSANHNSSRSKSSGGKPRHSESHTKASKMSPPPRKEDESGDEDEDDEQGAVCGACGDNYGGDEFWICCDACEKWFHGKCVKITPAKAEHIKHYKCPSCTTSKKMKA

SEQ ID NO: 2503 - protein, 168 aa, Arabidopsis thaliana
  peptide (1)..(168): Ceres Seq. ID no. 12335831
  misc_feature (113)..(163): Pfam Name: Pfam Description:  PHD-finger
  misc_feature (1)..(168): NCBI GI NO: 15223786 NR Description: nucleic acid binding protein
  misc_feature (1)..(168): NCBI GI NO: 25346630 NR Description: F14L17.29 protein - Arabidopsis thaliana
  misc_feature (1)..(164): NCBI GI NO: 21593407 NR Description: putative PHD-type zinc finger protein
  misc_feature (1)..(164): NCBI GI NO: 15226967 NR Description: putative PHD-type zinc finger protein
  misc_feature (1)..(164): NCBI GI NO: 7488751 NR Description: probable zinc finger protein - alfalfa (fragment)
  misc_feature (1)..(168): NCBI GI NO: 15229157 NR Description: nucleic acid binding protein-like
  misc_feature (1)..(164): NCBI GI NO: 15239624 NR Description: nucleic acid binding protein - like
  misc_feature (1)..(161): NCBI GI NO: 14192880 NR Description: Putative nucleic acid binding protein
  misc_feature (1)..(161): NCBI GI NO: 34394182 NR Description: putative nucleic acid binding protein
  misc_feature (1)..(164): NCBI GI NO: 30687843 NR Description: zinc finger protein - like [Arabidopsis thaliana]
MQEKDWISLVAVHSDSWLISVAFYFGARFGFGKNERKRLFQMINDLPTIFEVVTGNAKQSKDQSANHNSSRSKSSGGKPRHSESHTKASKMSPPPRKEDESGDEDEDDEQGAVCGACGDNYGGDEFWICCDACEKWFHGKCVKITPAKAEHIKHYKCPSCTTSKKMKA

SEQ ID NO: 2504 - protein, 127 aa, Arabidopsis thaliana
  peptide (1)..(127): Ceres Seq. ID no. 12335832
  misc_feature (72)..(122): Pfam Name: Pfam Description:  PHD-finger
  misc_feature (1)..(127): NCBI GI NO: 15223786 NR Description: nucleic acid binding protein
  misc_feature (1)..(127): NCBI GI NO: 25346630 NR Description: F14L17.29 protein - Arabidopsis thaliana
  misc_feature (1)..(123): NCBI GI NO: 21593407 NR Description: putative PHD-type zinc finger protein
  misc_feature (1)..(123): NCBI GI NO: 15226967 NR Description: putative PHD-type zinc finger protein
  misc_feature (1)..(123): NCBI GI NO: 7488751 NR Description: probable zinc finger protein - alfalfa (fragment)
  misc_feature (1)..(127): NCBI GI NO: 15229157 NR Description: nucleic acid binding protein-like
  misc_feature (1)..(123): NCBI GI NO: 15239624 NR Description: nucleic acid binding protein - like
  misc_feature (1)..(120): NCBI GI NO: 14192880 NR Description: Putative nucleic acid binding protein
  misc_feature (1)..(120): NCBI GI NO: 34394182 NR Description: putative nucleic acid binding protein
  misc_feature (1)..(123): NCBI GI NO: 30687843 NR Description: zinc finger protein - like [Arabidopsis thaliana]
MINDLPTIFEVVTGNAKQSKDQSANHNSSRSKSSGGKPRHSESHTKASKMSPPPRKEDESGDEDEDDEQGAVCGACGDNYGGDEFWICCDACEKWFHGKCVKITPAKAEHIKHYKCPSCTTSKKMKA

SEQ ID NO: 2505 - DNA, 1574 bp, Arabidopsis thaliana
  misc_feature (1)..(1574): Ceres Seq. ID no. 12357666
actcttaatctttaaaaaaaagaaaaaaaaaacagaacaatttcttcttcctctgggatccataagttttgagattttggtggtcagtgtctgatggagtgtaatgcaaagccaccgtttcaatgggaattggaaaacttgatatcttttggcacttctacagctgaagttcctagaaagctaaagccaatggagtgggaaattgatggatttgattgcacctctctgtattcttcaagctttgatgcagtagcttatggtggtagttcaggttctgatatagctcatgctttctctaaaagctcaaagtcaacttccattagctcttcatcagctgaagttagaacacacaattttacatcagaaactggtgaaagtcttcctggagaatttgcaaaggggattgatacttctccaactcttgaactttcttttggctctggtgatccggttctcggtttaaagcttggtaaacgaacgtactttgaagacttttgggaagtggagaatgctaaaggtttgggacttcccgtgagccttgcttcgtcttctgtttctccggtgaagaaatcgaaatccattcctcagaggttacaaactcctcactgtcaagttgaaggctgtaatcttgatctttcatcagctaaagactatcatcggaaacataggatttgtgaaaaccattcaaagtttcctaaagtcgttgtgagtggcgtagagcgtcggttctgccaacaatgtagcaggttccactgtctctccgagtttgatgagaagaaacgtagctgtcgccgacgtctctcagatcacaatgcaagacgtcgcaagccaaatcctggaaggacatatgatgggaaaccacaggtggattttgtatggaacagatttgcgcttatccatccaagaagtgaggaaaagtttctatggcccagttcaaagcctgtaccatcaagagtcttaatgccgcagcctgcaaagaccgagatttccaataagctgttcaccgagcacagtagatttggattgttggaccccaaaacaaaatccgcaagagcggagttattcagtaaagaaaaggtcacaatctcttcacacatgggtgcttctcaagatcttgatggtgctctctctcttctgtcaaattcaacaacatgggtttcttcctctgaccaaccaagacgttttacccttgatcaccatccctcaagcaacctccaacccgtagctaaccggtctgcggctcaactcagttcagtgtccggctattggcagccggacccacccgcagttgaaggcccgaccgctctgcatagaaatggggcaggccagtttaatgaaaactacttcagcttgaaccagttttataactgaaagctgtatgcctttaaatcctatttaggatcaagcaagctagtgataagttaagataggagctgtgaaacttgcaagacaccaaatcctctcttatttctttgtccaaatattttcatgggttagagagctttgacaattgtctttaatatcaactttatcgtgttatacattaggattataaatcttgatggtgtactacg

SEQ ID NO: 2506 - protein, 425 aa, Arabidopsis thaliana
  peptide (1)..(425): Ceres Seq. ID no. 12357667
  misc_feature (171)..(249): Pfam Name: Pfam Description:  SBP domain
  misc_feature (1)..(425): NCBI GI NO: 25456646 NR Description: squamosa promoter binding protein 2
  misc_feature (1)..(425): NCBI GI NO: 15239820 NR Description: squamosa promoter binding protein-like 2
  misc_feature (1)..(352): NCBI GI NO: 22329813 NR Description: putative squamosa-promoter binding protein 2
  misc_feature (1)..(352): NCBI GI NO: 18650611 NR Description: At1g27370/F17L21_16 [Arabidopsis thaliana]
  misc_feature (9)..(352): NCBI GI NO: 9802546 NR Description: F17L21.15 [Arabidopsis thaliana]
  misc_feature (1)..(352): NCBI GI NO: 18396302 NR Description: putative squamosa-promoter binding protein 2
  misc_feature (10)..(352): NCBI GI NO: 25403307 NR Description: protein F17L21.14
  misc_feature (116)..(356): NCBI GI NO: 25352584 NR Description: squamosa promoter binding protein-homolog 4
  misc_feature (98)..(256): NCBI GI NO: 5931778 NR Description: SBP-domain protein 1 [Zea mays]
  misc_feature (156)..(425): NCBI GI NO: 13877707 NR Description: similar to squamosa-promoter binding protein 1 isologgi|1707009
MECNAKPPFQWELENLISFGTSTAEVPRKLKPMEWEIDGFDCTSLYSSSFDAVAYGGSSGSDIAHAFSKSSKSTSISSSSAEVRTHNFTSETGESLPGEFAKGIDTSPTLELSFGSGDPVLGLKLGKRTYFEDFWEVENAKGLGLPVSLASSSVSPVKKSKSIPQRLQTPHCQVEGCNLDLSSAKDYHRKHRICENHSKFPKVVVSGVERRFCQQCSRFHCLSEFDEKKRSCRRRLSDHNARRRKPNPGRTYDGKPQVDFVWNRFALIHPRSEEKFLWPSSKPVPSRVLMPQPAKTEISNKLFTEHSRFGLLDPKTKSARAELFSKEKVTISSHMGASQDLDGALSLLSNSTTWVSSSDQPRRFTLDHHPSSNLQPVANRSAAQLSSVSGYWQPDPPAVEGPTALHRNGAGQFNENYFSLNQFYN

SEQ ID NO: 2507 - protein, 393 aa, Arabidopsis thaliana
  peptide (1)..(393): Ceres Seq. ID no. 12357668
  misc_feature (139)..(217): Pfam Name: Pfam Description:  SBP domain
  misc_feature (1)..(393): NCBI GI NO: 25456646 NR Description: squamosa promoter binding protein 2
  misc_feature (1)..(393): NCBI GI NO: 15239820 NR Description: squamosa promoter binding protein-like 2
  misc_feature (1)..(320): NCBI GI NO: 22329813 NR Description: putative squamosa-promoter binding protein 2
  misc_feature (1)..(320): NCBI GI NO: 18650611 NR Description: At1g27370/F17L21_16 [Arabidopsis thaliana]
  misc_feature (1)..(320): NCBI GI NO: 9802546 NR Description: F17L21.15 [Arabidopsis thaliana]
  misc_feature (1)..(320): NCBI GI NO: 18396302 NR Description: putative squamosa-promoter binding protein 2
  misc_feature (1)..(320): NCBI GI NO: 25403307 NR Description: protein F17L21.14
  misc_feature (84)..(324): NCBI GI NO: 25352584 NR Description: squamosa promoter binding protein-homolog 4
  misc_feature (66)..(224): NCBI GI NO: 5931778 NR Description: SBP-domain protein 1 [Zea mays]
  misc_feature (124)..(393): NCBI GI NO: 13877707 NR Description: similar to squamosa-promoter binding protein 1 isologgi|1707009
MEWEIDGFDCTSLYSSSFDAVAYGGSSGSDIAHAFSKSSKSTSISSSSAEVRTHNFTSETGESLPGEFAKGIDTSPTLELSFGSGDPVLGLKLGKRTYFEDFWEVENAKGLGLPVSLASSSVSPVKKSKSIPQRLQTPHCQVEGCNLDLSSAKDYHRKHRICENHSKFPKVVVSGVERRFCQQCSRFHCLSEFDEKKRSCRRRLSDHNARRRKPNPGRTYDGKPQVDFVWNRFALIHPRSEEKFLWPSSKPVPSRVLMPQPAKTEISNKLFTEHSRFGLLDPKTKSARAELFSKEKVTISSHMGASQDLDGALSLLSNSTTWVSSSDQPRRFTLDHHPSSNLQPVANRSAAQLSSVSGYWQPDPPAVEGPTALHRNGAGQFNENYFSLNQFYN

SEQ ID NO: 2508 - DNA, 1264 bp, Arabidopsis thaliana
  misc_feature (1)..(1264): Ceres Seq. ID no. 12423107
aatttgcagggttcttcttcttcttcttcttttttctctaaactggaaaataaagaagaaaagaacatggatttgcattcttgtctaaactcatactttcttttgctcctcctctgtcttcttattaccaccattaactcaacgaagccattagaacaagaaacagtgctttttggcggcaactttccggctttttatgttattggagattcattggttgattcaggaaacaataatcatcttacaacgatggtcaaatcgaattttccaccttatggttcggactttgaaggtggcaaagccaccggccgtttcagcaatggcaaaacaattgctgattacattgctatctactatggtcttcctttggttcctgcttatttgggattatctcaagaagaaaagaatagtatctcaactggtattaactatgcttctgctggctgtgggattcttcctcagacaggaaggcaaataggaacatgtctctcgttaagtgtccaagtcgatatgttccaggagaccatcacaaacaatctgaagaagaacttcaagaagtccgagctccgtgaacacttggctgaatcgttgtttatgatcgccattggggttaacgactacacattcttatttaatgaaacaaccgatgcgaatgagtttgcaaacaagcttcttcatgattacttgcttcaaatagaaagattgcacaagttaggagcaaggaagttcttcatcaacaacattaaaccattaggatgttacccaaatgttgtagctaagaccgtgccacgtggaagctgcaacgatgctttgaactttgcggtcagcattttcaacactaagcttagaaaaagtctgtctcgtatgacgcaaaaattcatcaaaacgtcctttttatactcggattactacaactacatgttgggactaagaggaccttcaagcaatcaagttggttcgagtctattgaacgtgacaagcccatgttgtcctaacgtttatgatggaggtcaattgacaagttgcaagcctggttcgatcgcgtgtaaggcacccgatactcatattttctttgatccgtttcatccgactcaattggcgaattacatgtatgcgattgcgtgtttccacgagagaagtatttgccatgtgatattggaagattaacttttgtcggcaacaatcttttttgtttgttttaaacaccaatttggttgttgtttgttgctttcaacttttcaatatcatcagaacttttaagatt

SEQ ID NO: 2509 - protein, 388 aa, Arabidopsis thaliana
  peptide (1)..(388): Ceres Seq. ID no. 12423108
  misc_feature (65)..(375): Pfam Name: Pfam Description:  GDSL-like Lipase/Acylhydrolase
  misc_feature (23)..(388): NCBI GI NO: 15228051 NR Description: putative GDSL-motif lipase/hydrolase
  misc_feature (23)..(266): NCBI GI NO: 15228057 NR Description: putative GDSL-motif lipase/hydrolase
  misc_feature (21)..(385): NCBI GI NO: 15241626 NR Description: GDSL-motif lipase acylhydrolase-like protein
  misc_feature (63)..(372): NCBI GI NO: 18417760 NR Description: putative protein; protein id: At5g15720
  misc_feature (63)..(372): NCBI GI NO: 11280578 NR Description: hypothetical protein F14F8_100 - Arabidopsis thaliana
  misc_feature (60)..(385): NCBI GI NO: 18409881 NR Description: hypothetical protein; protein id: At1g71691.1
  misc_feature (63)..(380): NCBI GI NO: 15220514 NR Description: lipase/hydrolase, putative; protein id: At1g29670
  misc_feature (63)..(380): NCBI GI NO: 21592417 NR Description: lipase/hydrolase, putative [Arabidopsis thaliana]
  misc_feature (17)..(377): NCBI GI NO: 15224005 NR Description: putative GDSL-motif lipase/acylhydrolase
  misc_feature (32)..(385): NCBI GI NO: 18398991 NR Description: unknown protein; protein id: At1g33811
NLQGSSSSSSFFSKLENKEEKNMDLHSCLNSYFLLLLLCLLITTINSTKPLEQETVLFGGNFPAFYVIGDSLVDSGNNNHLTTMVKSNFPPYGSDFEGGKATGRFSNGKTIADYIAIYYGLPLVPAYLGLSQEEKNSISTGINYASAGCGILPQTGRQIGTCLSLSVQVDMFQETITNNLKKNFKKSELREHLAESLFMIAIGVNDYTFLFNETTDANEFANKLLHDYLLQIERLHKLGARKFFINNIKPLGCYPNVVAKTVPRGSCNDALNFAVSIFNTKLRKSLSRMTQKFIKTSFLYSDYYNYMLGLRGPSSNQVGSSLLNVTSPCCPNVYDGGQLTSCKPGSIACKAPDTHIFFDPFHPTQLANYMYAIACFHERSICHVILED

SEQ ID NO: 2510 - protein, 366 aa, Arabidopsis thaliana
  peptide (1)..(366): Ceres Seq. ID no. 12423109
  misc_feature (43)..(353): Pfam Name: Pfam Description:  GDSL-like Lipase/Acylhydrolase
  misc_feature (1)..(366): NCBI GI NO: 15228051 NR Description: putative GDSL-motif lipase/hydrolase
  misc_feature (1)..(244): NCBI GI NO: 15228057 NR Description: putative GDSL-motif lipase/hydrolase
  misc_feature (1)..(363): NCBI GI NO: 15241626 NR Description: GDSL-motif lipase acylhydrolase-like protein
  misc_feature (41)..(350): NCBI GI NO: 18417760 NR Description: putative protein; protein id: At5g15720
  misc_feature (41)..(350): NCBI GI NO: 11280578 NR Description: hypothetical protein F14F8_100 - Arabidopsis thaliana
  misc_feature (38)..(363): NCBI GI NO: 18409881 NR Description: hypothetical protein; protein id: At1g71691.1
  misc_feature (41)..(358): NCBI GI NO: 15220514 NR Description: lipase/hydrolase, putative; protein id: At1g29670
  misc_feature (41)..(358): NCBI GI NO: 21592417 NR Description: lipase/hydrolase, putative [Arabidopsis thaliana]
  misc_feature (1)..(355): NCBI GI NO: 15224005 NR Description: putative GDSL-motif lipase/acylhydrolase
  misc_feature (10)..(363): NCBI GI NO: 18398991 NR Description: unknown protein; protein id: At1g33811
MDLHSCLNSYFLLLLLCLLITTINSTKPLEQETVLFGGNFPAFYVIGDSLVDSGNNNHLTTMVKSNFPPYGSDFEGGKATGRFSNGKTIADYIAIYYGLPLVPAYLGLSQEEKNSISTGINYASAGCGILPQTGRQIGTCLSLSVQVDMFQETITNNLKKNFKKSELREHLAESLFMIAIGVNDYTFLFNETTDANEFANKLLHDYLLQIERLHKLGARKFFINNIKPLGCYPNVVAKTVPRGSCNDALNFAVSIFNTKLRKSLSRMTQKFIKTSFLYSDYYNYMLGLRGPSSNQVGSSLLNVTSPCCPNVYDGGQLTSCKPGSIACKAPDTHIFFDPFHPTQLANYMYAIACFHERSICHVILED

SEQ ID NO: 2511 - protein, 305 aa, Arabidopsis thaliana
  peptide (1)..(305): Ceres Seq. ID no. 12423110
  misc_feature (1)..(292): Pfam Name: Pfam Description:  GDSL-like Lipase/Acylhydrolase
  misc_feature (1)..(305): NCBI GI NO: 15228051 NR Description: putative GDSL-motif lipase/hydrolase
  misc_feature (1)..(183): NCBI GI NO: 15228057 NR Description: putative GDSL-motif lipase/hydrolase
  misc_feature (1)..(302): NCBI GI NO: 15241626 NR Description: GDSL-motif lipase acylhydrolase-like protein
  misc_feature (1)..(289): NCBI GI NO: 18417760 NR Description: putative protein; protein id: At5g15720
  misc_feature (1)..(289): NCBI GI NO: 11280578 NR Description: hypothetical protein F14F8_100 - Arabidopsis thaliana
  misc_feature (1)..(302): NCBI GI NO: 18409881 NR Description: hypothetical protein; protein id: At1g71691.1
  misc_feature (1)..(297): NCBI GI NO: 15220514 NR Description: lipase/hydrolase, putative; protein id: At1g29670
  misc_feature (1)..(297): NCBI GI NO: 21592417 NR Description: lipase/hydrolase, putative [Arabidopsis thaliana]
  misc_feature (1)..(294): NCBI GI NO: 15224005 NR Description: putative GDSL-motif lipase/acylhydrolase
  misc_feature (1)..(302): NCBI GI NO: 18398991 NR Description: unknown protein; protein id: At1g33811
MVKSNFPPYGSDFEGGKATGRFSNGKTIADYIAIYYGLPLVPAYLGLSQEEKNSISTGINYASAGCGILPQTGRQIGTCLSLSVQVDMFQETITNNLKKNFKKSELREHLAESLFMIAIGVNDYTFLFNETTDANEFANKLLHDYLLQIERLHKLGARKFFINNIKPLGCYPNVVAKTVPRGSCNDALNFAVSIFNTKLRKSLSRMTQKFIKTSFLYSDYYNYMLGLRGPSSNQVGSSLLNVTSPCCPNVYDGGQLTSCKPGSIACKAPDTHIFFDPFHPTQLANYMYAIACFHERSICHVILED

SEQ ID NO: 2512 - DNA, 424 bp, Arabidopsis thaliana
  misc_feature (1)..(424): Ceres Seq. ID no. 12738873
atttcccatcaacgcctccatcggcggtgacggaaagtctatcgagatccgtaacttccttggcgagaagaaggtgaggaaggtagagatgttggatggtgtaaccattgttcgatctgagaaggtgaaggatgagattgttcttgacggtaacgatatcgagcttgtttcaaggtcgtgcgctctgatcaaccagaaatgtcacgtgaagaagaaggatatcaggaagttccttgacggtatctatgttagcgagaaaagcaagatcgtagaggaagaatgaatactcatattcccctcttagctcatatttcttgtgtttggaatgttgttagttttgttttatggaccaaatccaccggtgatgtaaaccttgccttttttttgttcgagaatttattaacttatgcaacaagttttggag

SEQ ID NO: 2513 - protein, 93 aa, Arabidopsis thaliana
  peptide (1)..(93): Ceres Seq. ID no. 12738874
  misc_feature (1)..(80): Pfam Name: Pfam Description:  Ribosomal protein L6
  misc_feature (1)..(93): NCBI GI NO: 18398753 NR Description: ribosomal protein L9, putative
  misc_feature (1)..(93): NCBI GI NO: 21554945 NR Description: ribosomal protein L9, putative
  misc_feature (1)..(93): NCBI GI NO: 15235114 NR Description: putative ribosomal protein L9, cytosolic
  misc_feature (1)..(93): NCBI GI NO: 266945 NR Description: 60S ribosomal protein L9
  misc_feature (1)..(93): NCBI GI NO: 6015604 NR Description: ribosomal protein L9 [Pisum sativum]
  misc_feature (1)..(93): NCBI GI NO: 2129720 NR Description: ribosomal protein L9
  misc_feature (1)..(92): NCBI GI NO: 6174959 NR Description: 60S RIBOSOMAL PROTEIN L9
  misc_feature (1)..(92): NCBI GI NO: 33087067 NR Description: ribosomal L9-like protein
  misc_feature (4)..(93): NCBI GI NO: 7440703 NR Description: probable ribosomal protein L9 - rice (fragment)
  misc_feature (1)..(65): NCBI GI NO: 12322579 NR Description: ribosomal protein L9, 5' partial
FPINASIGGDGKSIEIRNFLGEKKVRKVEMLDGVTIVRSEKVKDEIVLDGNDIELVSRSCALINQKCHVKKKDIRKFLDGIYVSEKSKIVEEE

SEQ ID NO: 2514 - protein, 64 aa, Arabidopsis thaliana
  peptide (1)..(64): Ceres Seq. ID no. 12738875
  misc_feature (1)..(51): Pfam Name: Pfam Description:  Ribosomal protein L6
  misc_feature (1)..(64): NCBI GI NO: 18398753 NR Description: ribosomal protein L9, putative
  misc_feature (1)..(64): NCBI GI NO: 21554945 NR Description: ribosomal protein L9, putative
  misc_feature (1)..(64): NCBI GI NO: 15235114 NR Description: putative ribosomal protein L9, cytosolic
  misc_feature (1)..(64): NCBI GI NO: 266945 NR Description: 60S ribosomal protein L9
  misc_feature (1)..(64): NCBI GI NO: 6015604 NR Description: ribosomal protein L9 [Pisum sativum]
  misc_feature (1)..(64): NCBI GI NO: 2129720 NR Description: ribosomal protein L9
  misc_feature (1)..(63): NCBI GI NO: 6174959 NR Description: 60S RIBOSOMAL PROTEIN L9
  misc_feature (1)..(63): NCBI GI NO: 33087067 NR Description: ribosomal L9-like protein
  misc_feature (1)..(64): NCBI GI NO: 7440703 NR Description: probable ribosomal protein L9 - rice (fragment)
  misc_feature (1)..(36): NCBI GI NO: 12322579 NR Description: ribosomal protein L9, 5' partial
MLDGVTIVRSEKVKDEIVLDGNDIELVSRSCALINQKCHVKKKDIRKFLDGIYVSEKSKIVEEE

SEQ ID NO: 2515 - protein, 48 aa, Arabidopsis thaliana
  peptide (1)..(48): Ceres Seq. ID no. 12738876
MNTHIPLLAHISCVWNVVSFVLWTKSTGDVNLAFFLFENLLTYATSFG

SEQ ID NO: 2516 - DNA, 927 bp, Arabidopsis thaliana
  misc_feature (1)..(927): Ceres Seq. ID no. 12371965
atcaacaagtctttctctctctctagacaaccacaagaacacaaaacacacaaaaacaaagaggttctttctttgaagaagaaatggaaaaagttgatgtttatgatgagcttgttaacctaaaggcaacagagctgagattgggattaccagggacagaagaaactgtttcttgtggaaaaagcaacaaaagagttttacctgaagctactgagaaagagattgaatccactggaaaaactgaaaccgcttctcctccaaaggctcagattgttggatggccaccagttagatcttacagaaagaacaatgttcagacaaagaagagtgaatctgaaggtcaaggaaactatgtgaaagtaagtatggatggtgctccatatctaaggaagatagatctaacgatgtataaacaatatccagagttgatgaaatcacttgaaaacatgtttaaattctctgtgggagaatattttgagagagaaggatataaaggctcagactttgtacctacttatgaagacaaagatggtgattggatgcttgttggtgatgttccttgggagatgtttgtttcgtcttgtaagaggctaaggatcatgaaaggatctgaagttaaaggtttaggttgtggtggtctttaacaaacctaattgagagataaagatcaaagagaaagattcaaaaacagagttttttgttctgtttcttgaaacagagtaaatatagctctgaaactgctcgggttcttggggagagatgtttcatacaatcatactttgtgaatgtttacctcatcggtaaaaagagagatgcttaaaatggtcttaagcataaaagtgtgagaaagatctaaatctaaactttagctgtaactctgtctccattaaagagaaaggttttgtggtattagaaaggtctaatccg

SEQ ID NO: 2517 - protein, 186 aa, Arabidopsis thaliana
  peptide (1)..(186): Ceres Seq. ID no. 12371966
  misc_feature (11)..(185): Pfam Name: Pfam Description:  AUX/IAA family
  misc_feature (1)..(186): NCBI GI NO: 15239950 NR Description: auxin-induced protein AUX2-11
  misc_feature (1)..(186): NCBI GI NO: 99663 NR Description: auxin-induced protein AUX2-11
  misc_feature (8)..(184): NCBI GI NO: 15219692 NR Description: putative auxin-induced protein AUX2-11
  misc_feature (7)..(184): NCBI GI NO: 34550779 NR Description: Gbiaa-Re [Gossypium barbadense]
  misc_feature (7)..(183): NCBI GI NO: 11131103 NR Description: Auxin-induced protein 22D
  misc_feature (1)..(184): NCBI GI NO: 4887012 NR Description: Nt-iaa2.3 deduced protein [Nicotiana tabacum]
  misc_feature (1)..(183): NCBI GI NO: 416641 NR Description: Auxin-induced protein 22B
  misc_feature (1)..(181): NCBI GI NO: 4887018 NR Description: Nt-iaa4.5 deduced protein [Nicotiana tabacum]
  misc_feature (1)..(181): NCBI GI NO: 4887016 NR Description: Nt-iaa4.3 deduced protein [Nicotiana tabacum]
  misc_feature (11)..(184): NCBI GI NO: 4887014 NR Description: Nt-iaa2.5 deduced protein [Nicotiana tabacum]
MEKVDVYDELVNLKATELRLGLPGTEETVSCGKSNKRVLPEATEKEIESTGKTETASPPKAQIVGWPPVRSYRKNNVQTKKSESEGQGNYVKVSMDGAPYLRKIDLTMYKQYPELMKSLENMFKFSVGEYFEREGYKGSDFVPTYEDKDGDWMLVGDVPWEMFVSSCKRLRIMKGSEVKGLGCGGL

SEQ ID NO: 2518 - DNA, 2348 bp, Arabidopsis thaliana
  misc_feature (1)..(2348): Ceres Seq. ID no. 12674418
atatttttggcttaaggtcattttgaagattaataacatgtctattttatcgcgttgtgtccgatccagaaggttctctatttttcgtggataagaagataaagttattgtttattgataagttttctgctgggaagttgcaactttttctagatttaggacgttacaaatttcaatcatgagtgcatcatgggcagatgtggctgattcagagaaggccgtttctcagtcaaagcctccttatgttcccccacacctacggaacaggccatcagagcctgttgctgctcctttgccacaaaatgatcatgcagggtatggtggtcaaccagctgggtctcgttgggctcctcctagcagtgggggtggtggtgccagcggcggtggctataggaatgatggagggcgcactggctatggttatggtgctggaggaggaggtggtggtggtggtggctggaacaacagaagtggagggtgggaccgtagggaacgtgaagtaaacccatttggagatgatgctgagttagaaccggtctttacagagcaggagaatactggcattaattttgatgcctatgaagatattccagttgagaccagtgggggagacgtgccccctcctgttaacacatttgctgacatagatcttggggatgcattaaatctgaacatccggaggtgcaagtatgtgaggccaacaccggtacagcgtcatgctattccaatactgcttgcagagagagatttgatggcctgtgcccagactgggtctgggaagactgctgctttttgctttccaataattagtggaatcatgaaagatcagcatgtagaaagaccccgtggttcacgggcggtttacccttttgcagtcatcctctcaccaacaagggaattggcatgccagatacatgatgaagccaaaaaattctcctaccaaactggtgtgaaggttgttgttgcttatggaggaacacccattcaccagcagctcagggaactcgagaggggatgtgatatccttgtggcaactcctggccggttaaatgatttgcttgaaagagctagagtctcaatgcagatgattaggtttttagctctagatgaggcagacaggatgctggacatgggttttgagccacagattagaaagattgttgagcagatggacatgcctccacgtggggtgagacagacaatgctgttcagtgctacatttccaagtcagattcagagacttgcagctgatttcatgtcaaactatatatttttggctgtgggaagagttggttcaagcactgatttaattacccaaagggttgagtttgtccaagagtctgacaagagaagccatctcatggacctgcttcacgcgcaaagagagacccaagacaagcaatcattgacattagtttttgtggagacaaagaggggagctgatactttggaaaattggctgtgcatgaatgagtttccagcaacctccattcatggcgatagaacacaacaggaaagagaagtggcactgaggtccttcaaaactgggaggacacctattttggttgcaacagacgtggcagcacgtggtcttgacattccccacgtggctcatgttgtaaacttcgatctaccaaatgacattgatgactatgtccaccgtatcggacgaacaggacgtgcaggcaaatctggaatagcaactgccttcttcaacgagaacaatgcacaactggctaggtcgcttgctgagctaatgcaagaagccaatcaagaggtccccgagtggctcacacgatatgcttcacgtgcttcatttggtggtggtaagaaacggtctggtggtcggtttggtggccgtgacttcagaagggaaggctcttacagtagaggaggaggcggcggcggcggaggaggcggcagtgattactatggcggaggaggctatggtggtggtggatacggtggtgctccaagcggtgggtatggtgctggagtgaccagtgcttgggattagccaattaggctccccaatttttcctctttttaacctgactatttatttcttctcttctacattcccaagagagcacgtgtatttgcccccacctttgagatctctcattcaagagatggatttaactaatcttgctattaggtggatctctctgttttttcaggctatttttaggatttgtcctaaaagatagacagtagtttttccgattttgatcttgttcttggtttcttctaacaatttcatttgttagtttgaaatccaatttgtctttttgtttccctttgttgttgacaatctttcttggtgaaatacaatctctctttatatc

SEQ ID NO: 2519 - protein, 612 aa, Arabidopsis thaliana
  peptide (1)..(612): Ceres Seq. ID no. 12674419
  misc_feature (164)..(381): Pfam Name: Pfam Description:  DEAD/DEAH box helicase
  misc_feature (1)..(612): NCBI GI NO: 15227951 NR Description: DEAD/DEAH box RNA helicase, putative
  misc_feature (1)..(612): NCBI GI NO: 28393424 NR Description: putative DEAD/DEAH box RNA helicase
  misc_feature (2)..(604): NCBI GI NO: 15231074 NR Description: DEAD/DEAH box RNA helicase protein, putative
  misc_feature (192)..(612): NCBI GI NO: 17064740 NR Description: ATP-dependent RNA helicase-like protein
  misc_feature (50)..(606): NCBI GI NO: 17985987 NR Description: belle CG9748-PA
  misc_feature (22)..(104): NCBI GI NO: 17985987 NR Description: belle CG9748-PA
  misc_feature (50)..(606): NCBI GI NO: 19528473 NR Description: RE28061p [Drosophila melanogaster]
  misc_feature (22)..(104): NCBI GI NO: 19528473 NR Description: RE28061p [Drosophila melanogaster]
  misc_feature (40)..(100): NCBI GI NO: 17985987 NR Description: belle CG9748-PA
  misc_feature (40)..(100): NCBI GI NO: 19528473 NR Description: RE28061p [Drosophila melanogaster]
MSASWADVADSEKAVSQSKPPYVPPHLRNRPSEPVAAPLPQNDHAGYGGQPAGSRWAPPSSGGGGASGGGYRNDGGRTGYGYGAGGGGGGGGGWNNRSGGWDRREREVNPFGDDAELEPVFTEQENTGINFDAYEDIPVETSGGDVPPPVNTFADIDLGDALNLNIRRCKYVRPTPVQRHAIPILLAERDLMACAQTGSGKTAAFCFPIISGIMKDQHVERPRGSRAVYPFAVILSPTRELACQIHDEAKKFSYQTGVKVVVAYGGTPIHQQLRELERGCDILVATPGRLNDLLERARVSMQMIRFLALDEADRMLDMGFEPQIRKIVEQMDMPPRGVRQTMLFSATFPSQIQRLAADFMSNYIFLAVGRVGSSTDLITQRVEFVQESDKRSHLMDLLHAQRETQDKQSLTLVFVETKRGADTLENWLCMNEFPATSIHGDRTQQEREVALRSFKTGRTPILVATDVAARGLDIPHVAHVVNFDLPNDIDDYVHRIGRTGRAGKSGIATAFFNENNAQLARSLAELMQEANQEVPEWLTRYASRASFGGGKKRSGGRFGGRDFRREGSYSRGGGGGGGGGGSDYYGGGGYGGGGYGGAPSGGYGAGVTSAWD

SEQ ID NO: 2520 - protein, 421 aa, Arabidopsis thaliana
  peptide (1)..(421): Ceres Seq. ID no. 12674420
  misc_feature (1)..(190): Pfam Name: Pfam Description:  DEAD/DEAH box helicase
  misc_feature (1)..(421): NCBI GI NO: 15227951 NR Description: DEAD/DEAH box RNA helicase, putative
  misc_feature (1)..(421): NCBI GI NO: 28393424 NR Description: putative DEAD/DEAH box RNA helicase
  misc_feature (1)..(413): NCBI GI NO: 15231074 NR Description: DEAD/DEAH box RNA helicase protein, putative
  misc_feature (1)..(421): NCBI GI NO: 17064740 NR Description: ATP-dependent RNA helicase-like protein
  misc_feature (1)..(415): NCBI GI NO: 17985987 NR Description: belle CG9748-PA
  misc_feature (1)..(415): NCBI GI NO: 19528473 NR Description: RE28061p [Drosophila melanogaster]
  misc_feature (1)..(415): NCBI GI NO: 11267519 NR Description: probable ATP-dependent RNA helicase DED1
  misc_feature (1)..(420): NCBI GI NO: 18859239 NR Description: pl10; p110 [Danio rerio]
  misc_feature (1)..(418): NCBI GI NO: 14861844 NR Description: PL10 protein [Mus musculus]
  misc_feature (1)..(418): NCBI GI NO: 3023628 NR Description: DEAD-box protein 3
MACAQTGSGKTAAFCFPIISGIMKDQHVERPRGSRAVYPFAVILSPTRELACQIHDEAKKFSYQTGVKVVVAYGGTPIHQQLRELERGCDILVATPGRLNDLLERARVSMQMIRFLALDEADRMLDMGFEPQIRKIVEQMDMPPRGVRQTMLFSATFPSQIQRLAADFMSNYIFLAVGRVGSSTDLITQRVEFVQESDKRSHLMDLLHAQRETQDKQSLTLVFVETKRGADTLENWLCMNEFPATSIHGDRTQQEREVALRSFKTGRTPILVATDVAARGLDIPHVAHVVNFDLPNDIDDYVHRIGRTGRAGKSGIATAFFNENNAQLARSLAELMQEANQEVPEWLTRYASRASFGGGKKRSGGRFGGRDFRREGSYSRGGGGGGGGGGSDYYGGGGYGGGGYGGAPSGGYGAGVTSAWD

SEQ ID NO: 2521 - protein, 399 aa, Arabidopsis thaliana
  peptide (1)..(399): Ceres Seq. ID no. 12674421
  misc_feature (1)..(168): Pfam Name: Pfam Description:  DEAD/DEAH box helicase
  misc_feature (1)..(399): NCBI GI NO: 15227951 NR Description: DEAD/DEAH box RNA helicase, putative
  misc_feature (1)..(399): NCBI GI NO: 28393424 NR Description: putative DEAD/DEAH box RNA helicase
  misc_feature (1)..(391): NCBI GI NO: 15231074 NR Description: DEAD/DEAH box RNA helicase protein, putative
  misc_feature (1)..(399): NCBI GI NO: 17064740 NR Description: ATP-dependent RNA helicase-like protein
  misc_feature (1)..(393): NCBI GI NO: 17985987 NR Description: belle CG9748-PA
  misc_feature (1)..(393): NCBI GI NO: 19528473 NR Description: RE28061p [Drosophila melanogaster]
  misc_feature (1)..(393): NCBI GI NO: 11267519 NR Description: probable ATP-dependent RNA helicase DED1
  misc_feature (1)..(398): NCBI GI NO: 18859239 NR Description: pl10; p110 [Danio rerio]
  misc_feature (1)..(396): NCBI GI NO: 14861844 NR Description: PL10 protein [Mus musculus]
  misc_feature (1)..(396): NCBI GI NO: 3023628 NR Description: DEAD-box protein 3
MKDQHVERPRGSRAVYPFAVILSPTRELACQIHDEAKKFSYQTGVKVVVAYGGTPIHQQLRELERGCDILVATPGRLNDLLERARVSMQMIRFLALDEADRMLDMGFEPQIRKIVEQMDMPPRGVRQTMLFSATFPSQIQRLAADFMSNYIFLAVGRVGSSTDLITQRVEFVQESDKRSHLMDLLHAQRETQDKQSLTLVFVETKRGADTLENWLCMNEFPATSIHGDRTQQEREVALRSFKTGRTPILVATDVAARGLDIPHVAHVVNFDLPNDIDDYVHRIGRTGRAGKSGIATAFFNENNAQLARSLAELMQEANQEVPEWLTRYASRASFGGGKKRSGGRFGGRDFRREGSYSRGGGGGGGGGGSDYYGGGGYGGGGYGGAPSGGYGAGVTSAWD

SEQ ID NO: 2522 - DNA, 1784 bp, Arabidopsis thaliana
  misc_feature (1)..(1784): Ceres Seq. ID no. 13611515
acttcttcttcatcatctttaatcgttgggaaaagtttgatgatacggagtggacaattcttggtgtagaaggagaatctgagagagagagagtcatggaagctctgaaaaccgcaacttttagccctatgtcggtgttatccgagaaaagatcagaaccacgaaagcctttctcgctccctaacctctttccaccaaaatcacagagaccaatctcccaagaaagcttcttgaagagattcaatggtggattggctcttctaacttctgttctaagcagtgcaacagctcctgctaaatccctgacgtacgaggaagctctgcaacaatctatgaccacttcttcatcttttgattcggatggtctgattgaagggatatccaattttgtcacagacaatcctttggttattgccggtggagttgctgcattggctgttccatttgttctgtctcaggttctgaacaagaagcccaaatcatggggagttgagtctgctaagaatgcttataccaagttgggtactgatgataatgctcagttgcttgacataagagctactgctgatttcagacaagtgggcagtcctaatattaagggtttgggtaaaaaagcggtttctactgtttataacggtgaagacaagcctggtttcctgaagaagctttctttgaagtttaaagatcctgagaacaccacattatacattctggacaagtttgatggaaactctgagcttgttgctgaattggtggctcttaatggattcaaatctgcttatgcgattaaagatggtgcagagggacctagaggctggttgaatagcagcttgccttggatagagccaaagaagactctcagccttgatttaagcagtttgacggatagcatcagcggtgtatttggtgagagttctgatggtgtatctgtcgctcttggagtagctgctgctgctggattaagtgtttttgcatttacagagattgaaaccatactccaactactaggttcagctgcacttgttcaacttgcaggcaagaaacttctatttgctgaggaccgaaagcaaactctaaaacaggtggatgagttcttgaacacaaaggttgcccctaaagaacttgttgatgagttaaaggaaataggaaaggctcttcttcctcaatcaacaagcaacaaagctctcccagcaccagcaacagtaacagcagaagcagaatcagctacagctacaaccaccacagtcgataaaccagtacctgagccagaaacagttgcagctacaacaaccactgtagataaaccagtacctgagccagagccagtgccagagccagtgccagtgccagcgattgaagctgcagtcgctgcacaagtaatcacagaaccaaccgaaacagaagccaaaccaaaacctcattcaagacctctctctccatatgcatcgtaccctgacttgaagcctccatcttctccgatgccatcgcagccctgaaaacagctaagaacagtctctctctcgttacttagtctggttttgtcctcctgcaaacagaagaacaaaagtggtcgaatattgtaacttgttcttttttctctcgttttttctcccgaacttagatgctactttgtgtcgaatctgagataagtggactttgttttgtttttctccctttataccaccattgagttcaaacaagagtctgtcatcgcgttaaaggggatcagaagctgtgtgaggggtgtattggacgaaataaaagttgtggggaaatttccaaat

SEQ ID NO: 2523 - protein, 497 aa, Arabidopsis thaliana
  peptide (1)..(497): Ceres Seq. ID no. 13611516
  misc_feature (32)..(497): NCBI GI NO: 18411523 NR Description: proline-rich protein family [Arabidopsis thaliana]
  misc_feature (1)..(439): NCBI GI NO: 7485232 NR Description: hypothetical protein A_IG002N01
  misc_feature (1)..(441): NCBI GI NO: 25407077 NR Description: hypothetical protein AT4g01050
  misc_feature (255)..(497): NCBI GI NO: 25407077 NR Description: hypothetical protein AT4g01050
  misc_feature (335)..(482): NCBI GI NO: 7485232 NR Description: hypothetical protein A_IG002N01
  misc_feature (41)..(273): NCBI GI NO: 21593550 NR Description: unknown [Arabidopsis thaliana]
  misc_feature (120)..(272): NCBI GI NO: 34907512 NR Description: B1099D03.26
  misc_feature (41)..(273): NCBI GI NO: 18404538 NR Description: rhodanese-like domain protein
  misc_feature (41)..(252): NCBI GI NO: 9279727 NR Description: gb|AAB61039
FFFIIFNRWEKFDDTEWTILGVEGESERERVMEALKTATFSPMSVLSEKRSEPRKPFSLPNLFPPKSQRPISQESFLKRFNGGLALLTSVLSSATAPAKSLTYEEALQQSMTTSSSFDSDGLIEGISNFVTDNPLVIAGGVAALAVPFVLSQVLNKKPKSWGVESAKNAYTKLGTDDNAQLLDIRATADFRQVGSPNIKGLGKKAVSTVYNGEDKPGFLKKLSLKFKDPENTTLYILDKFDGNSELVAELVALNGFKSAYAIKDGAEGPRGWLNSSLPWIEPKKTLSLDLSSLTDSISGVFGESSDGVSVALGVAAAAGLSVFAFTEIETILQLLGSAALVQLAGKKLLFAEDRKQTLKQVDEFLNTKVAPKELVDELKEIGKALLPQSTSNKALPAPATVTAEAESATATTTTVDKPVPEPETVAATTTTVDKPVPEPEPVPEPVPVPAIEAAVAAQVITEPTETEAKPKPHSRPLSPYASYPDLKPPSSPMPSQP

SEQ ID NO: 2524 - protein, 466 aa, Arabidopsis thaliana
  peptide (1)..(466): Ceres Seq. ID no. 13611517
  misc_feature (1)..(466): NCBI GI NO: 18411523 NR Description: proline-rich protein family [Arabidopsis thaliana]
  misc_feature (1)..(408): NCBI GI NO: 7485232 NR Description: hypothetical protein A_IG002N01
  misc_feature (1)..(410): NCBI GI NO: 25407077 NR Description: hypothetical protein AT4g01050
  misc_feature (224)..(466): NCBI GI NO: 25407077 NR Description: hypothetical protein AT4g01050
  misc_feature (304)..(451): NCBI GI NO: 7485232 NR Description: hypothetical protein A_IG002N01
  misc_feature (10)..(242): NCBI GI NO: 21593550 NR Description: unknown [Arabidopsis thaliana]
  misc_feature (89)..(241): NCBI GI NO: 34907512 NR Description: B1099D03.26
  misc_feature (10)..(242): NCBI GI NO: 18404538 NR Description: rhodanese-like domain protein
  misc_feature (10)..(221): NCBI GI NO: 9279727 NR Description: gb|AAB61039
MEALKTATFSPMSVLSEKRSEPRKPFSLPNLFPPKSQRPISQESFLKRFNGGLALLTSVLSSATAPAKSLTYEEALQQSMTTSSSFDSDGLIEGISNFVTDNPLVIAGGVAALAVPFVLSQVLNKKPKSWGVESAKNAYTKLGTDDNAQLLDIRATADFRQVGSPNIKGLGKKAVSTVYNGEDKPGFLKKLSLKFKDPENTTLYILDKFDGNSELVAELVALNGFKSAYAIKDGAEGPRGWLNSSLPWIEPKKTLSLDLSSLTDSISGVFGESSDGVSVALGVAAAAGLSVFAFTEIETILQLLGSAALVQLAGKKLLFAEDRKQTLKQVDEFLNTKVAPKELVDELKEIGKALLPQSTSNKALPAPATVTAEAESATATTTTVDKPVPEPETVAATTTTVDKPVPEPEPVPEPVPVPAIEAAVAAQVITEPTETEAKPKPHSRPLSPYASYPDLKPPSSPMPSQP

SEQ ID NO: 2525 - protein, 455 aa, Arabidopsis thaliana
  peptide (1)..(455): Ceres Seq. ID no. 13611518
  misc_feature (1)..(455): NCBI GI NO: 18411523 NR Description: proline-rich protein family [Arabidopsis thaliana]
  misc_feature (1)..(397): NCBI GI NO: 7485232 NR Description: hypothetical protein A_IG002N01
  misc_feature (1)..(399): NCBI GI NO: 25407077 NR Description: hypothetical protein AT4g01050
  misc_feature (213)..(455): NCBI GI NO: 25407077 NR Description: hypothetical protein AT4g01050
  misc_feature (293)..(440): NCBI GI NO: 7485232 NR Description: hypothetical protein A_IG002N01
  misc_feature (1)..(231): NCBI GI NO: 21593550 NR Description: unknown [Arabidopsis thaliana]
  misc_feature (78)..(230): NCBI GI NO: 34907512 NR Description: B1099D03.26
  misc_feature (1)..(231): NCBI GI NO: 18404538 NR Description: rhodanese-like domain protein
  misc_feature (1)..(210): NCBI GI NO: 9279727 NR Description: gb|AAB61039
MSVLSEKRSEPRKPFSLPNLFPPKSQRPISQESFLKRFNGGLALLTSVLSSATAPAKSLTYEEALQQSMTTSSSFDSDGLIEGISNFVTDNPLVIAGGVAALAVPFVLSQVLNKKPKSWGVESAKNAYTKLGTDDNAQLLDIRATADFRQVGSPNIKGLGKKAVSTVYNGEDKPGFLKKLSLKFKDPENTTLYILDKFDGNSELVAELVALNGFKSAYAIKDGAEGPRGWLNSSLPWIEPKKTLSLDLSSLTDSISGVFGESSDGVSVALGVAAAAGLSVFAFTEIETILQLLGSAALVQLAGKKLLFAEDRKQTLKQVDEFLNTKVAPKELVDELKEIGKALLPQSTSNKALPAPATVTAEAESATATTTTVDKPVPEPETVAATTTTVDKPVPEPEPVPEPVPVPAIEAAVAAQVITEPTETEAKPKPHSRPLSPYASYPDLKPPSSPMPSQP

SEQ ID NO: 2526 - DNA, 1567 bp, Arabidopsis thaliana
  misc_feature (1)..(1567): Ceres Seq. ID no. 12389081
gatcgttttggttcttcacctttccttttctttgctttctgcttcctcccttaaatacatttcactctgttatcatcgatttttttttcttatatctcaatcttattttgtttgtcttttctccatttttgtttcgttaagaagaaacaatggttatggctatggatcggatcgctttgttctcttcctcatcatcatctgtttatcgtcatcgttcgtctcattctcatggctccaaatcttccagagttttcactattcgttccgactctacagcggttggaaggaaactgtatattcctcctcgagaggttcatcttcaagtgaagtattcaatgccaccacaaaagctggagattttcaagtccttagaaggatgggctaatgagaacttgttggcttacttaaaacctgttgagaaatcatggcaaccaactgattttctccctgaacctgagtcagaaggattctatgaccaagttaaggagttaagagaaaggtgtaaggagctctctgatgactaccttatagtgcttgttggtgatatgatcacagaggaagcacttccgacttatcagaccatgattaatacattggacggggttagagatgagacgggagcaagtccaactccttgggccgtatggactagggcatggactgcggaagagaatagacatggtgatcttcttaacaagtacctttatctgtctggacgagtagacatgagacagattgaaaaaactattcaatacctcattggttctggaatggatccaaaaactgaaaacaacccttacttgggattcatatatacttcttttcaagaaagagctacattcatctcccatggaaacactgctagactggcaaaggatcttggagacttgacacttgggaagatttgtggcaccattgctgctgatgagaggcgtcatgaacacgcctacaccaagattgtagagaagctctttgaaattgatcctgataccacagtcgtgggatttgctgacatgatgaggaaaaagatctcgatgcctgctcatttgatgtatgatggtcgtgatgataatctatttgatcacttctcgtccgtggcccagaggcttggtgtctacactgccaaggactatgctgatatactgcaacatcttgtggaaaggtggaatgtggagaagttgtcagacctttctagtgaagggaacagggcccaggactacctctgtggattacctgctagaatccgcaaacttgaagagagggctcaagggagaaccaaagaagcagcaaaaaacataccattcagctggatttttggtcgagaagtcagggcttaaaagaagtaatgctaagcaattaattcttccatattataatcccaagcaagctataaaagatcttcaccaacaccatgatgaagaagccagaagtatgttatgttggaaagtgtgtagataaagtatgtgctagactttgctttgtttggatcacttaaatgactgcctccaaagaatttgctttgttttgacgattttatttatttatttctgcacctctatttgttgcc

SEQ ID NO: 2527 - protein, 395 aa, Arabidopsis thaliana
  peptide (1)..(395): Ceres Seq. ID no. 12389082
  misc_feature (1)..(395): NCBI GI NO: 21593675 NR Description: stearoyl-acyl carrier protein desaturase
  misc_feature (1)..(395): NCBI GI NO: 15237308 NR Description: stearoyl-acyl carrier protein desaturase
  misc_feature (1)..(395): NCBI GI NO: 15232943 NR Description: putative stearoyl-acyl carrier protein desaturase
  misc_feature (1)..(395): NCBI GI NO: 20466636 NR Description: putative stearoyl-acyl carrier protein desaturase
  misc_feature (1)..(395): NCBI GI NO: 21592896 NR Description: putative stearoyl-acyl carrier protein desaturase
  misc_feature (22)..(393): NCBI GI NO: 3355632 NR Description: stearoyl-acyl carrier protein desaturase
  misc_feature (36)..(394): NCBI GI NO: 575942 NR Description: stearoyl-acyl carrier protein desaturase
  misc_feature (22)..(393): NCBI GI NO: 3355634 NR Description: stearoyl-acyl carrier protein desaturase
  misc_feature (36)..(394): NCBI GI NO: 134945 NR Description: Acyl-
  misc_feature (36)..(394): NCBI GI NO: 417820 NR Description: Acyl-
MVMAMDRIALFSSSSSSVYRHRSSHSHGSKSSRVFTIRSDSTAVGRKLYIPPREVHLQVKYSMPPQKLEIFKSLEGWANENLLAYLKPVEKSWQPTDFLPEPESEGFYDQVKELRERCKELSDDYLIVLVGDMITEEALPTYQTMINTLDGVRDETGASPTPWAVWTRAWTAEENRHGDLLNKYLYLSGRVDMRQIEKTIQYLIGSGMDPKTENNPYLGFIYTSFQERATFISHGNTARLAKDLGDLTLGKICGTIAADERRHEHAYTKIVEKLFEIDPDTTVVGFADMMRKKISMPAHLMYDGRDDNLFDHFSSVAQRLGVYTAKDYADILQHLVERWNVEKLSDLSSEGNRAQDYLCGLPARIRKLEERAQGRTKEAAKNIPFSWIFGREVRA

SEQ ID NO: 2528 - protein, 393 aa, Arabidopsis thaliana
  peptide (1)..(393): Ceres Seq. ID no. 12389083
  misc_feature (1)..(393): NCBI GI NO: 21593675 NR Description: stearoyl-acyl carrier protein desaturase
  misc_feature (1)..(393): NCBI GI NO: 15237308 NR Description: stearoyl-acyl carrier protein desaturase
  misc_feature (1)..(393): NCBI GI NO: 15232943 NR Description: putative stearoyl-acyl carrier protein desaturase
  misc_feature (1)..(393): NCBI GI NO: 20466636 NR Description: putative stearoyl-acyl carrier protein desaturase
  misc_feature (1)..(393): NCBI GI NO: 21592896 NR Description: putative stearoyl-acyl carrier protein desaturase
  misc_feature (20)..(391): NCBI GI NO: 3355632 NR Description: stearoyl-acyl carrier protein desaturase
  misc_feature (34)..(392): NCBI GI NO: 575942 NR Description: stearoyl-acyl carrier protein desaturase
  misc_feature (20)..(391): NCBI GI NO: 3355634 NR Description: stearoyl-acyl carrier protein desaturase
  misc_feature (34)..(392): NCBI GI NO: 134945 NR Description: Acyl-
  misc_feature (34)..(392): NCBI GI NO: 417820 NR Description: Acyl-
MAMDRIALFSSSSSSVYRHRSSHSHGSKSSRVFTIRSDSTAVGRKLYIPPREVHLQVKYSMPPQKLEIFKSLEGWANENLLAYLKPVEKSWQPTDFLPEPESEGFYDQVKELRERCKELSDDYLIVLVGDMITEEALPTYQTMINTLDGVRDETGASPTPWAVWTRAWTAEENRHGDLLNKYLYLSGRVDMRQIEKTIQYLIGSGMDPKTENNPYLGFIYTSFQERATFISHGNTARLAKDLGDLTLGKICGTIAADERRHEHAYTKIVEKLFEIDPDTTVVGFADMMRKKISMPAHLMYDGRDDNLFDHFSSVAQRLGVYTAKDYADILQHLVERWNVEKLSDLSSEGNRAQDYLCGLPARIRKLEERAQGRTKEAAKNIPFSWIFGREVRA

SEQ ID NO: 2529 - protein, 391 aa, Arabidopsis thaliana
  peptide (1)..(391): Ceres Seq. ID no. 12389084
  misc_feature (1)..(391): NCBI GI NO: 21593675 NR Description: stearoyl-acyl carrier protein desaturase
  misc_feature (1)..(391): NCBI GI NO: 15237308 NR Description: stearoyl-acyl carrier protein desaturase
  misc_feature (1)..(391): NCBI GI NO: 15232943 NR Description: putative stearoyl-acyl carrier protein desaturase
  misc_feature (1)..(391): NCBI GI NO: 20466636 NR Description: putative stearoyl-acyl carrier protein desaturase
  misc_feature (1)..(391): NCBI GI NO: 21592896 NR Description: putative stearoyl-acyl carrier protein desaturase
  misc_feature (18)..(389): NCBI GI NO: 3355632 NR Description: stearoyl-acyl carrier protein desaturase
  misc_feature (32)..(390): NCBI GI NO: 575942 NR Description: stearoyl-acyl carrier protein desaturase
  misc_feature (18)..(389): NCBI GI NO: 3355634 NR Description: stearoyl-acyl carrier protein desaturase
  misc_feature (32)..(390): NCBI GI NO: 134945 NR Description: Acyl-
  misc_feature (32)..(390): NCBI GI NO: 417820 NR Description: Acyl-
MDRIALFSSSSSSVYRHRSSHSHGSKSSRVFTIRSDSTAVGRKLYIPPREVHLQVKYSMPPQKLEIFKSLEGWANENLLAYLKPVEKSWQPTDFLPEPESEGFYDQVKELRERCKELSDDYLIVLVGDMITEEALPTYQTMINTLDGVRDETGASPTPWAVWTRAWTAEENRHGDLLNKYLYLSGRVDMRQIEKTIQYLIGSGMDPKTENNPYLGFIYTSFQERATFISHGNTARLAKDLGDLTLGKICGTIAADERRHEHAYTKIVEKLFEIDPDTTVVGFADMMRKKISMPAHLMYDGRDDNLFDHFSSVAQRLGVYTAKDYADILQHLVERWNVEKLSDLSSEGNRAQDYLCGLPARIRKLEERAQGRTKEAAKNIPFSWIFGREVRA

SEQ ID NO: 2530 - DNA, 1473 bp, Arabidopsis thaliana
  misc_feature (1)..(1473): Ceres Seq. ID no. 12324325
agagattacaagagtgttgtttgagagcgaatcaaggttcctccaaagaaagaagatgactttaattcttatttaatttccctttctccttttgcttcaccaaaatccacacattcatcaattaaaaaacaaaccctagattcttgaaaactggaactcattcacgaatcctaaaaagagagctcctttggttttcttgaaacccagattcttcaagctcagctatggcggtcttcaaaaccctagctttcctattcgttttaagcatcgtgatttaccaatcagtggctgttacagatgtaaattcatcgttttcctttaatgggtttgtcaaagctccaagctttgacaataatgttgctctgtttggagattcgaagctcgttcatggcggtccatcgattcaattgactgactcagtgagtcgcagtgaagggcgagttatttacaagaaacccatcagactgttccaaggtaaagagagaaacttttccggatcattctcaactagtttctcgttttcgatgtctgatgagattggtagtgtcttggcttttataatggttccaagaggtttggatcttaggttgtttggtagaaagggtaataatagttcctctggtttagggttcttattgaaacacaaagttgttgctgttgagtttggtatctccaagagagggaatcatgtagggatcttagttggtcgtcctgaatctggtaaagttagaaagttatcatcttttggtcaccatttcaatgaagagaagagattgaattgttggattgattatgaggcaagctcaaagagaatagaggttcgtttgagtctatctgctgccttaaagccggtggatccattcgtgtcttactctgtagacttggctaagctatggaaagatgggaagtttatggtgggtttaacctctgcaaatggaaacacttcaaagccggtttatctccattcgtggagctttaaactgatacatccttcgatgaggattcactcgcagccgcttgatccaaacgacgtttccaagactgttaaggaaggggagaagacggtggaagttaaggggaaaggaaaatgtatatggagaatccttggtgcattggtcttgggggcggtttgtggaacattgggagccatgttcgcgttatacctttggacaatatgcggtaataggcagtcaatggcgatagttcccgaggaatgtgctgacgaaaaagcggatatccttgtaacgaaagctgatgttgttgttgaagaagaagtcaagaagtagtagaaaaagaaaagtttggtgtgtgtgttttagaatgttgtatttgttgtttgtaatgtaaattcttgtgtccttctttattcttcttctgtttgtttttttgttagttgcagatttggtgagatgagttttcacatgtagaagaaccatacaatatgtattaagttaagatcctgaaatcttgatc

SEQ ID NO: 2531 - protein, 353 aa, Arabidopsis thaliana
  peptide (1)..(353): Ceres Seq. ID no. 12324326
  misc_feature (1)..(353): NCBI GI NO: 21593676 NR Description: lectin-like protein [Arabidopsis thaliana]
  misc_feature (1)..(353): NCBI GI NO: 15240888 NR Description: lectin - like protein; protein id: At5g01090
  misc_feature (1)..(335): NCBI GI NO: 22330926 NR Description: similar to lectin - like protein
  misc_feature (40)..(332): NCBI GI NO: 5923683 NR Description: putative lectin [Arabidopsis thaliana]
  misc_feature (5)..(331): NCBI GI NO: 15232413 NR Description: putative protein; protein id: At3g54080
  misc_feature (5)..(277): NCBI GI NO: 15232332 NR Description: serine/threonine-specific kinase like protein
  misc_feature (5)..(277): NCBI GI NO: 28416699 NR Description: At3g53810 [Arabidopsis thaliana]
  misc_feature (7)..(280): NCBI GI NO: 15230670 NR Description: receptor-like protein kinase
  misc_feature (9)..(253): NCBI GI NO: 38112427 NR Description: lectin-like receptor kinase 7;2
MAVFKTLAFLFVLSIVIYQSVAVTDVNSSFSFNGFVKAPSFDNNVALFGDSKLVHGGPSIQLTDSVSRSEGRVIYKKPIRLFQGKERNFSGSFSTSFSFSMSDEIGSVLAFIMVPRGLDLRLFGRKGNNSSSGLGFLLKHKVVAVEFGISKRGNHVGILVGRPESGKVRKLSSFGHHFNEEKRLNCWIDYEASSKRIEVRLSLSAALKPVDPFVSYSVDLAKLWKDGKFMVGLTSANGNTSKPVYLHSWSFKLIHPSMRIHSQPLDPNDVSKTVKEGEKTVEVKGKGKCIWRILGALVLGAVCGTLGAMFALYLWTICGNRQSMAIVPEECADEKADILVTKADVVVEEEVKK

SEQ ID NO: 2532 - protein, 253 aa, Arabidopsis thaliana
  peptide (1)..(253): Ceres Seq. ID no. 12324327
  misc_feature (1)..(253): NCBI GI NO: 21593676 NR Description: lectin-like protein [Arabidopsis thaliana]
  misc_feature (1)..(253): NCBI GI NO: 15240888 NR Description: lectin - like protein; protein id: At5g01090
  misc_feature (1)..(235): NCBI GI NO: 22330926 NR Description: similar to lectin - like protein
  misc_feature (1)..(232): NCBI GI NO: 5923683 NR Description: putative lectin [Arabidopsis thaliana]
  misc_feature (1)..(231): NCBI GI NO: 15232413 NR Description: putative protein; protein id: At3g54080
  misc_feature (1)..(177): NCBI GI NO: 15232332 NR Description: serine/threonine-specific kinase like protein
  misc_feature (1)..(177): NCBI GI NO: 28416699 NR Description: At3g53810 [Arabidopsis thaliana]
  misc_feature (1)..(180): NCBI GI NO: 15230670 NR Description: receptor-like protein kinase
  misc_feature (1)..(153): NCBI GI NO: 38112427 NR Description: lectin-like receptor kinase 7;2
MSDEIGSVLAFIMVPRGLDLRLFGRKGNNSSSGLGFLLKHKVVAVEFGISKRGNHVGILVGRPESGKVRKLSSFGHHFNEEKRLNCWIDYEASSKRIEVRLSLSAALKPVDPFVSYSVDLAKLWKDGKFMVGLTSANGNTSKPVYLHSWSFKLIHPSMRIHSQPLDPNDVSKTVKEGEKTVEVKGKGKCIWRILGALVLGAVCGTLGAMFALYLWTICGNRQSMAIVPEECADEKADILVTKADVVVEEEVKK

SEQ ID NO: 2533 - protein, 241 aa, Arabidopsis thaliana
  peptide (1)..(241): Ceres Seq. ID no. 12324328
  misc_feature (1)..(241): NCBI GI NO: 21593676 NR Description: lectin-like protein [Arabidopsis thaliana]
  misc_feature (1)..(241): NCBI GI NO: 15240888 NR Description: lectin - like protein; protein id: At5g01090
  misc_feature (1)..(223): NCBI GI NO: 22330926 NR Description: similar to lectin - like protein
  misc_feature (1)..(220): NCBI GI NO: 5923683 NR Description: putative lectin [Arabidopsis thaliana]
  misc_feature (1)..(219): NCBI GI NO: 15232413 NR Description: putative protein; protein id: At3g54080
  misc_feature (1)..(165): NCBI GI NO: 15232332 NR Description: serine/threonine-specific kinase like protein
  misc_feature (1)..(165): NCBI GI NO: 28416699 NR Description: At3g53810 [Arabidopsis thaliana]
  misc_feature (1)..(168): NCBI GI NO: 15230670 NR Description: receptor-like protein kinase
  misc_feature (1)..(141): NCBI GI NO: 38112427 NR Description: lectin-like receptor kinase 7;2
MVPRGLDLRLFGRKGNNSSSGLGFLLKHKVVAVEFGISKRGNHVGILVGRPESGKVRKLSSFGHHFNEEKRLNCWIDYEASSKRIEVRLSLSAALKPVDPFVSYSVDLAKLWKDGKFMVGLTSANGNTSKPVYLHSWSFKLIHPSMRIHSQPLDPNDVSKTVKEGEKTVEVKGKGKCIWRILGALVLGAVCGTLGAMFALYLWTICGNRQSMAIVPEECADEKADILVTKADVVVEEEVKK

SEQ ID NO: 2534 - DNA, 1471 bp, Arabidopsis thaliana
  misc_feature (1)..(1471): Ceres Seq. ID no. 12422556
gttttggtttcttcttcatcggtccgatcagagagagagaatcgccggtgagaaaagaaaatggcgtcggcgatttctctttctctcttaaacggagcaacgcctttgaaatcgaattcgctccacaaatctagactcactccacttcatcttcgaactatctcttgttctagactatcttactctccctcgagtcgcgaaatttctctcaaaactcaatctactgttcctatttcgtgtaggcgtagtaggtttgacttcgttcctcgttgcggcatttcgtcgaacgatttgcctactgagaaaaagaagagctttggggagtgggttgagtttgtgggagaggcggtttcgacggcgtttccgatatgggtttctctgggatgcttgttgggactgatgagaccaagtactttcaattgggttactccaaattggaccattgtaggtcttacgatcactatgcttggaatgggaatgactttgacccttgatgatcttcgtggcgctttatcgatgcccaaggagctcttcgctggctttctgttgcagtattcggtcatgccactatcagcattttttgtgagtaaactcttaaatttgccaccacattacgcagccggtctcatattggttggttgctgtccaggcggcacggctagtaatattgtcacatacatcgcgcgtggaaatgttgcgctatcagtgttgatgacagcagctagcactgtttcagctgtgattatgacaccgcttcttacggcgaagcttgccaagcagtatatcacagttgatgctcttggattactaatgtcaacactacaggtggttcttctcccagtgttggctggtgcatttcttaaccaatactttaaaaagctggtgaaattcgtctctcctgtgatgcctccaattgcggttggaacagttgcaatcctgtgtgggtatgctatcggtcagaacgcatctgcaatactcatgtctgggaaacaagtagtcttggcttcatgccttcttcacatctctggatttctctttgggtatctgttttcaagaatactcggaattgatgtggcatcatcgagaactatctctatcgaagttggcatgcagaactcggtgcttggagttgttcttgcgacacagcattttgggaatccactcactgcagtaccgtgcgctgtttctagcgtctgtcactcaatcctcggtagcgtcttggctggaatttggagacgcagtgccccaaaacagcttgaagactaaaaagaaagcaaaggaaagttcatgaagtcctcactgtgttactcaatttcaacatctttcaggaccatttagttaagtttgttgaacaaatgaaccaaaacgggttatgtcttgtaaagctttggaagatttttttttttttttctatgtctgagatttctcttgttattcttcaaagaattttgtgaattcgaaacatgaaaat

SEQ ID NO: 2535 - protein, 401 aa, Arabidopsis thaliana
  peptide (1)..(401): Ceres Seq. ID no. 12422557
  misc_feature (128)..(304): Pfam Name: Pfam Description:  Sodium Bile acid symporter family
  misc_feature (1)..(401): NCBI GI NO: 18412023 NR Description: expressed protein; protein id: At1g78560
  misc_feature (19)..(396): NCBI GI NO: 38346633 NR Description: OSJNBa0072D21.3
  misc_feature (218)..(401): NCBI GI NO: 25406554 NR Description: hypothetical protein T30F21.11
  misc_feature (34)..(401): NCBI GI NO: 34911708 NR Description: P0707D10.18
  misc_feature (42)..(401): NCBI GI NO: 30683305 NR Description: bile acid:sodium symporter family
  misc_feature (42)..(401): NCBI GI NO: 20269901 NR Description: putative sodium-dependent bile acid symporter
  misc_feature (54)..(394): NCBI GI NO: 33865169 NR Description: Sodium/bile acid cotransporter family
  misc_feature (93)..(393): NCBI GI NO: 24217327 NR Description: conserved hypothetical protein
  misc_feature (133)..(392): NCBI GI NO: 22298669 NR Description: ORF_ID:tll1126~probable sodium-dependent transporter
  misc_feature (60)..(382): NCBI GI NO: 7485401 NR Description: hypothetical protein At2g26900
MASAISLSLLNGATPLKSNSLHKSRLTPLHLRTISCSRLSYSPSSREISLKTQSTVPISCRRSRFDFVPRCGISSNDLPTEKKKSFGEWVEFVGEAVSTAFPIWVSLGCLLGLMRPSTFNWVTPNWTIVGLTITMLGMGMTLTLDDLRGALSMPKELFAGFLLQYSVMPLSAFFVSKLLNLPPHYAAGLILVGCCPGGTASNIVTYIARGNVALSVLMTAASTVSAVIMTPLLTAKLAKQYITVDALGLLMSTLQVVLLPVLAGAFLNQYFKKLVKFVSPVMPPIAVGTVAILCGYAIGQNASAILMSGKQVVLASCLLHISGFLFGYLFSRILGIDVASSRTISIEVGMQNSVLGVVLATQHFGNPLTAVPCAVSSVCHSILGSVLAGIWRRSAPKQLED

SEQ ID NO: 2536 - protein, 288 aa, Arabidopsis thaliana
  peptide (1)..(288): Ceres Seq. ID no. 12422558
  misc_feature (15)..(191): Pfam Name: Pfam Description:  Sodium Bile acid symporter family
  misc_feature (1)..(288): NCBI GI NO: 18412023 NR Description: expressed protein; protein id: At1g78560
  misc_feature (1)..(283): NCBI GI NO: 38346633 NR Description: OSJNBa0072D21.3
  misc_feature (105)..(288): NCBI GI NO: 25406554 NR Description: hypothetical protein T30F21.11
  misc_feature (1)..(288): NCBI GI NO: 34911708 NR Description: P0707D10.18
  misc_feature (1)..(288): NCBI GI NO: 30683305 NR Description: bile acid:sodium symporter family
  misc_feature (1)..(288): NCBI GI NO: 20269901 NR Description: putative sodium-dependent bile acid symporter
  misc_feature (1)..(281): NCBI GI NO: 33865169 NR Description: Sodium/bile acid cotransporter family
  misc_feature (1)..(280): NCBI GI NO: 24217327 NR Description: conserved hypothetical protein
  misc_feature (20)..(279): NCBI GI NO: 22298669 NR Description: ORF_ID:tll1126~probable sodium-dependent transporter
  misc_feature (1)..(269): NCBI GI NO: 7485401 NR Description: hypothetical protein At2g26900
MRPSTFNWVTPNWTIVGLTITMLGMGMTLTLDDLRGALSMPKELFAGFLLQYSVMPLSAFFVSKLLNLPPHYAAGLILVGCCPGGTASNIVTYIARGNVALSVLMTAASTVSAVIMTPLLTAKLAKQYITVDALGLLMSTLQVVLLPVLAGAFLNQYFKKLVKFVSPVMPPIAVGTVAILCGYAIGQNASAILMSGKQVVLASCLLHISGFLFGYLFSRILGIDVASSRTISIEVGMQNSVLGVVLATQHFGNPLTAVPCAVSSVCHSILGSVLAGIWRRSAPKQLED

SEQ ID NO: 2537 - protein, 267 aa, Arabidopsis thaliana
  peptide (1)..(267): Ceres Seq. ID no. 12422559
  misc_feature (1)..(170): Pfam Name: Pfam Description:  Sodium Bile acid symporter family
  misc_feature (1)..(267): NCBI GI NO: 18412023 NR Description: expressed protein; protein id: At1g78560
  misc_feature (1)..(262): NCBI GI NO: 38346633 NR Description: OSJNBa0072D21.3
  misc_feature (84)..(267): NCBI GI NO: 25406554 NR Description: hypothetical protein T30F21.11
  misc_feature (1)..(267): NCBI GI NO: 34911708 NR Description: P0707D10.18
  misc_feature (1)..(267): NCBI GI NO: 30683305 NR Description: bile acid:sodium symporter family
  misc_feature (1)..(267): NCBI GI NO: 20269901 NR Description: putative sodium-dependent bile acid symporter
  misc_feature (1)..(260): NCBI GI NO: 33865169 NR Description: Sodium/bile acid cotransporter family
  misc_feature (1)..(259): NCBI GI NO: 24217327 NR Description: conserved hypothetical protein
  misc_feature (1)..(258): NCBI GI NO: 22298669 NR Description: ORF_ID:tll1126~probable sodium-dependent transporter
  misc_feature (1)..(248): NCBI GI NO: 7485401 NR Description: hypothetical protein At2g26900
MLGMGMTLTLDDLRGALSMPKELFAGFLLQYSVMPLSAFFVSKLLNLPPHYAAGLILVGCCPGGTASNIVTYIARGNVALSVLMTAASTVSAVIMTPLLTAKLAKQYITVDALGLLMSTLQVVLLPVLAGAFLNQYFKKLVKFVSPVMPPIAVGTVAILCGYAIGQNASAILMSGKQVVLASCLLHISGFLFGYLFSRILGIDVASSRTISIEVGMQNSVLGVVLATQHFGNPLTAVPCAVSSVCHSILGSVLAGIWRRSAPKQLED

SEQ ID NO: 2538 - DNA, 1414 bp, Arabidopsis thaliana
  misc_feature (1)..(1414): Ceres Seq. ID no. 13490862
gccgctgtgtcatcgtggaactcccattttctctcttttacttgttcgttcccaaactcttctccctcgatcgtctccgtcgccgatctcgtttcttcattttccgcgtgttgattggtacaaaggtttaatcaaatggttggaggaggagttatccagcaaattcttaggaggaagcttcactcccaatcacttgcaactccggttttgtcttggttttcttcgaagaaagctcatgaggatgctggttcttctggtgtaagagcacttgccttgttgggtgctggtgttacaggactgttgagtttttctacagtagcatctgctgatgaggctgaacatggattggagagtccagagtacccttggcctcatgatggcattcttagctcatatgaccatgcttcgatccgtcgtgggcatcaagtttatcagcaagtctgtgcatcatgccattcaatgtctctgatctcataccgagacttggtgggtgtcgcctacgcagaggaagaggcaaaggcaatggcagctgaaatcgaggtagtagatggacctaatgatgagggtgagatgttcacccgccctggtaaactcagtgaccggtttcctcagccatatgcaaatgaatcagctgcaaggtttgctaatggtggagcgtatcctcctgatctaagtcttataactaaggcacgtcacaatggtccaaactatgtctttgcgcttctgactggttaccgtgatccccctgctggcatatcgattagagaggggttacactacaatccttatttccctgggggagcaattgctatgccgaaaatgctcaatgatgaagctgttgagtatgaagatggtgtccccgccacagaggcacagatgggtaaagatattgtatcattcttggcctgggcagctgaaccagaaatggaagagaggaaactgatgggtttcaaatggatattcctactctctctcgctcttctccaagctgcttactacaggcgactaaaatggtcggttctcaagtcccgcaagctggttcttgacgtggttaactaaagcgccgctgagaagcttttgcattggcctggccacacacagtcgtattttcaacaaaggatgttaaatagagaagagcctttctctggtaataacgtatcatcatttttatgtgtcataaaaatctttgatgagaccagttctcacctgaaggtgaaaagacctcatcgttcttctttttccttcgattattactagagagttttatgaggataatcacgaaaacttgtttttttcgcctcataataatcacacatgattttgagattatatcatttgttatgtttttcctcttgtctcaataaaaaataactttgtactctgattttgttgtctattttcggcatttcttgcg

SEQ ID NO: 2539 - protein, 307 aa, Arabidopsis thaliana
  peptide (1)..(307): Ceres Seq. ID no. 13490863
  misc_feature (72)..(297): Pfam Name: Pfam Description:  Cytochrome C1 family
  misc_feature (1)..(307): NCBI GI NO: 15809956 NR Description: AT3g27240/K17E12_6 [Arabidopsis thaliana]
  misc_feature (1)..(307): NCBI GI NO: 15232125 NR Description: cytochrome c -related [Arabidopsis thaliana]
  misc_feature (1)..(307): NCBI GI NO: 21593678 NR Description: cytochrome c, putative [Arabidopsis thaliana]
  misc_feature (1)..(307): NCBI GI NO: 15237497 NR Description: cytochrome c1 precursor [Arabidopsis thaliana]
  misc_feature (1)..(307): NCBI GI NO: 15215624 NR Description: AT5g40810/MHK7_4 [Arabidopsis thaliana]
  misc_feature (37)..(307): NCBI GI NO: 82263 NR Description: ubiquinol-cytochrome-c reductase (EC 1
  misc_feature (37)..(307): NCBI GI NO: 7547401 NR Description: cytochrome c1 precursor [Solanum tuberosum]
  misc_feature (1)..(307): NCBI GI NO: 34907202 NR Description: putative cytochrome c1 precursor
  misc_feature (37)..(307): NCBI GI NO: 117765 NR Description: Cytochrome c1
  misc_feature (48)..(307): NCBI GI NO: 82264 NR Description: ubiquinol-cytochrome-c reductase (EC 1
MVGGGVIQQILRRKLHSQSLATPVLSWFSSKKAHEDAGSSGVRALALLGAGVTGLLSFSTVASADEAEHGLESPEYPWPHDGILSSYDHASIRRGHQVYQQVCASCHSMSLISYRDLVGVAYAEEEAKAMAAEIEVVDGPNDEGEMFTRPGKLSDRFPQPYANESAARFANGGAYPPDLSLITKARHNGPNYVFALLTGYRDPPAGISIREGLHYNPYFPGGAIAMPKMLNDEAVEYEDGVPATEAQMGKDIVSFLAWAAEPEMEERKLMGFKWIFLLSLALLQAAYYRRLKWSVLKSRKLVLDVVN

SEQ ID NO: 2540 - protein, 199 aa, Arabidopsis thaliana
  peptide (1)..(199): Ceres Seq. ID no. 13490864
  misc_feature (1)..(189): Pfam Name: Pfam Description:  Cytochrome C1 family
  misc_feature (1)..(199): NCBI GI NO: 15809956 NR Description: AT3g27240/K17E12_6 [Arabidopsis thaliana]
  misc_feature (1)..(199): NCBI GI NO: 15232125 NR Description: cytochrome c -related [Arabidopsis thaliana]
  misc_feature (1)..(199): NCBI GI NO: 21593678 NR Description: cytochrome c, putative [Arabidopsis thaliana]
  misc_feature (1)..(199): NCBI GI NO: 15237497 NR Description: cytochrome c1 precursor [Arabidopsis thaliana]
  misc_feature (1)..(199): NCBI GI NO: 15215624 NR Description: AT5g40810/MHK7_4 [Arabidopsis thaliana]
  misc_feature (1)..(199): NCBI GI NO: 82263 NR Description: ubiquinol-cytochrome-c reductase (EC 1
  misc_feature (1)..(199): NCBI GI NO: 7547401 NR Description: cytochrome c1 precursor [Solanum tuberosum]
  misc_feature (1)..(199): NCBI GI NO: 34907202 NR Description: putative cytochrome c1 precursor
  misc_feature (1)..(199): NCBI GI NO: 117765 NR Description: Cytochrome c1
  misc_feature (1)..(199): NCBI GI NO: 82264 NR Description: ubiquinol-cytochrome-c reductase (EC 1
MSLISYRDLVGVAYAEEEAKAMAAEIEVVDGPNDEGEMFTRPGKLSDRFPQPYANESAARFANGGAYPPDLSLITKARHNGPNYVFALLTGYRDPPAGISIREGLHYNPYFPGGAIAMPKMLNDEAVEYEDGVPATEAQMGKDIVSFLAWAAEPEMEERKLMGFKWIFLLSLALLQAAYYRRLKWSVLKSRKLVLDVVN

SEQ ID NO: 2541 - protein, 178 aa, Arabidopsis thaliana
  peptide (1)..(178): Ceres Seq. ID no. 13490865
  misc_feature (1)..(168): Pfam Name: Pfam Description:  Cytochrome C1 family
  misc_feature (1)..(178): NCBI GI NO: 15809956 NR Description: AT3g27240/K17E12_6 [Arabidopsis thaliana]
  misc_feature (1)..(178): NCBI GI NO: 15232125 NR Description: cytochrome c -related [Arabidopsis thaliana]
  misc_feature (1)..(178): NCBI GI NO: 21593678 NR Description: cytochrome c, putative [Arabidopsis thaliana]
  misc_feature (1)..(178): NCBI GI NO: 15237497 NR Description: cytochrome c1 precursor [Arabidopsis thaliana]
  misc_feature (1)..(178): NCBI GI NO: 15215624 NR Description: AT5g40810/MHK7_4 [Arabidopsis thaliana]
  misc_feature (1)..(178): NCBI GI NO: 82263 NR Description: ubiquinol-cytochrome-c reductase (EC 1
  misc_feature (1)..(178): NCBI GI NO: 7547401 NR Description: cytochrome c1 precursor [Solanum tuberosum]
  misc_feature (1)..(178): NCBI GI NO: 34907202 NR Description: putative cytochrome c1 precursor
  misc_feature (1)..(178): NCBI GI NO: 117765 NR Description: Cytochrome c1
  misc_feature (1)..(178): NCBI GI NO: 82264 NR Description: ubiquinol-cytochrome-c reductase (EC 1
MAAEIEVVDGPNDEGEMFTRPGKLSDRFPQPYANESAARFANGGAYPPDLSLITKARHNGPNYVFALLTGYRDPPAGISIREGLHYNPYFPGGAIAMPKMLNDEAVEYEDGVPATEAQMGKDIVSFLAWAAEPEMEERKLMGFKWIFLLSLALLQAAYYRRLKWSVLKSRKLVLDVVN

SEQ ID NO: 2542 - DNA, 1490 bp, Arabidopsis thaliana
  misc_feature (1)..(1490): Ceres Seq. ID no. 12421224
aaaaaagattcgatttttgactgcaaaaaagagaatttctaaaagcaaatcggagagcttcggcgatggcgttatcacgactttcttcacgatccaacactttcctaaagccggcgattaccgccttgccctcctccatccgccgtcatgtttccacagactcatcaccgatcacaatcgaaaccgccgtccctttcacatcgcatctatgtgaatcaccgtcacgctccgtcgagacttcatcggaggagatcttagcctttttccgtgacatggctcggatgaggaggatggagatcgcagcagattctctttacaaggcgaagctgatccgtgggttctgtcatttgtacgatggtcaagaggctttagcggtgggaatggaagcggcgattaccaaaaaagatgcgattatcacatcgtatcgtgatcactgtactttcattggtcgtggtgggaagcttgttgatgctttctctgagcttatggggagaaaaactggttgttctcatggtaaaggaggatctatgcatttctataagaaagatgcttccttttatggtggacatgggattgttggtgctcagattccattgggatgtggtttggcttttgctcagaagtataataaggatgaggctgtgacttttgctttgtatggtgatggtgctgcgaatcagggacagttgtttgaggccttgaacatttcggctttgtgggatttgcctgcgattcttgtttgcgagaataaccattatggaatgggaacggctacatggaggtcggctaagtctccggcttatttcaagcgtggagattatgttcctggcttgaaggtggatggtatggatgcactggctgtgaaacaggcgtgcaagtttgccaaggagcatgctctcaagaatggtcctattatccttgagatggacacttacagataccacggtcactctatgtctgacccaggaagcacttaccgtactcgtgatgaaatctctggcgtgagacaggtgcgtgatccaattgaaagggtgcgaaagttgctcttaactcatgacatagctaccgaaaaagagcttaaggacatggagaaagagataaggaaagaagtagatgacgccgtagctcaggccaaggagagcccgataccagatgcatctgagctattcacaaacatgtacgtgaaagactgcggagttgagtcgtttggagcagacagaaaagaactcaaagtaacacttccatagaatcttgcttcccaaggagatgattggttcaataaatcagaaggcaaggctacacaaatctttttaacttgctaccaaaaatatttctggttttttttttttgtattttcatttcaagtgtaaagccattgcttcaccagtttgccaactttgtttcccacacttaaatttgacaccaagcaaaagaagcttcggatatcactctgtgagataaagttagagaaataagcagagagagtagtt

SEQ ID NO: 2543 - protein, 393 aa, Arabidopsis thaliana
  peptide (1)..(393): Ceres Seq. ID no. 12421225
  misc_feature (68)..(365): Pfam Name: Pfam Description:  Dehydrogenase E1 component
  misc_feature (1)..(393): NCBI GI NO: 15221692 NR Description: pyruvate dehydrogenase E1 alpha subunit
  misc_feature (1)..(393): NCBI GI NO: 23306664 NR Description: pyruvate dehydrogenase E1a-like subunit IAR4
  misc_feature (1)..(393): NCBI GI NO: 15218940 NR Description: pyruvate dehydrogenase e1 alpha subunit, putative
  misc_feature (1)..(393): NCBI GI NO: 13430788 NR Description: putative pyruvate dehydrogenase e1 alpha subunit
  misc_feature (1)..(393): NCBI GI NO: 2117533 NR Description: pyruvate dehydrogenase (lipoamide) (EC 1
  misc_feature (1)..(393): NCBI GI NO: 1709449 NR Description: Pyruvate dehydrogenase E1 component alpha subunit
  misc_feature (3)..(393): NCBI GI NO: 28465343 NR Description: pyruvate dehydrogenase E1alpha subunit
  misc_feature (1)..(393): NCBI GI NO: 1709453 NR Description: Pyruvate dehydrogenase E1 component alpha subunit
  misc_feature (1)..(393): NCBI GI NO: 3851005 NR Description: pyruvate dehydrogenase E1 alpha subunit [Zea mays]
  misc_feature (3)..(393): NCBI GI NO: 28465345 NR Description: pyruvate dehydrogenase E1 alpha subunit
MALSRLSSRSNTFLKPAITALPSSIRRHVSTDSSPITIETAVPFTSHLCESPSRSVETSSEEILAFFRDMARMRRMEIAADSLYKAKLIRGFCHLYDGQEALAVGMEAAITKKDAIITSYRDHCTFIGRGGKLVDAFSELMGRKTGCSHGKGGSMHFYKKDASFYGGHGIVGAQIPLGCGLAFAQKYNKDEAVTFALYGDGAANQGQLFEALNISALWDLPAILVCENNHYGMGTATWRSAKSPAYFKRGDYVPGLKVDGMDALAVKQACKFAKEHALKNGPIILEMDTYRYHGHSMSDPGSTYRTRDEISGVRQVRDPIERVRKLLLTHDIATEKELKDMEKEIRKEVDDAVAQAKESPIPDASELFTNMYVKDCGVESFGADRKELKVTLP

SEQ ID NO: 2544 - protein, 324 aa, Arabidopsis thaliana
  peptide (1)..(324): Ceres Seq. ID no. 12421226
  misc_feature (1)..(296): Pfam Name: Pfam Description:  Dehydrogenase E1 component
  misc_feature (1)..(324): NCBI GI NO: 15221692 NR Description: pyruvate dehydrogenase E1 alpha subunit
  misc_feature (1)..(324): NCBI GI NO: 23306664 NR Description: pyruvate dehydrogenase E1a-like subunit IAR4
  misc_feature (1)..(324): NCBI GI NO: 15218940 NR Description: pyruvate dehydrogenase e1 alpha subunit, putative
  misc_feature (1)..(324): NCBI GI NO: 13430788 NR Description: putative pyruvate dehydrogenase e1 alpha subunit
  misc_feature (1)..(324): NCBI GI NO: 2117533 NR Description: pyruvate dehydrogenase (lipoamide) (EC 1
  misc_feature (1)..(324): NCBI GI NO: 1709449 NR Description: Pyruvate dehydrogenase E1 component alpha subunit
  misc_feature (1)..(324): NCBI GI NO: 28465343 NR Description: pyruvate dehydrogenase E1alpha subunit
  misc_feature (1)..(324): NCBI GI NO: 1709453 NR Description: Pyruvate dehydrogenase E1 component alpha subunit
  misc_feature (1)..(324): NCBI GI NO: 3851005 NR Description: pyruvate dehydrogenase E1 alpha subunit [Zea mays]
  misc_feature (1)..(324): NCBI GI NO: 28465345 NR Description: pyruvate dehydrogenase E1 alpha subunit
MARMRRMEIAADSLYKAKLIRGFCHLYDGQEALAVGMEAAITKKDAIITSYRDHCTFIGRGGKLVDAFSELMGRKTGCSHGKGGSMHFYKKDASFYGGHGIVGAQIPLGCGLAFAQKYNKDEAVTFALYGDGAANQGQLFEALNISALWDLPAILVCENNHYGMGTATWRSAKSPAYFKRGDYVPGLKVDGMDALAVKQACKFAKEHALKNGPIILEMDTYRYHGHSMSDPGSTYRTRDEISGVRQVRDPIERVRKLLLTHDIATEKELKDMEKEIRKEVDDAVAQAKESPIPDASELFTNMYVKDCGVESFGADRKELKVTLP

SEQ ID NO: 2545 - protein, 321 aa, Arabidopsis thaliana
  peptide (1)..(321): Ceres Seq. ID no. 12421227
  misc_feature (1)..(293): Pfam Name: Pfam Description:  Dehydrogenase E1 component
  misc_feature (1)..(321): NCBI GI NO: 15221692 NR Description: pyruvate dehydrogenase E1 alpha subunit
  misc_feature (1)..(321): NCBI GI NO: 23306664 NR Description: pyruvate dehydrogenase E1a-like subunit IAR4
  misc_feature (1)..(321): NCBI GI NO: 15218940 NR Description: pyruvate dehydrogenase e1 alpha subunit, putative
  misc_feature (1)..(321): NCBI GI NO: 13430788 NR Description: putative pyruvate dehydrogenase e1 alpha subunit
  misc_feature (1)..(321): NCBI GI NO: 2117533 NR Description: pyruvate dehydrogenase (lipoamide) (EC 1
  misc_feature (1)..(321): NCBI GI NO: 1709449 NR Description: Pyruvate dehydrogenase E1 component alpha subunit
  misc_feature (1)..(321): NCBI GI NO: 28465343 NR Description: pyruvate dehydrogenase E1alpha subunit
  misc_feature (1)..(321): NCBI GI NO: 1709453 NR Description: Pyruvate dehydrogenase E1 component alpha subunit
  misc_feature (1)..(321): NCBI GI NO: 3851005 NR Description: pyruvate dehydrogenase E1 alpha subunit [Zea mays]
  misc_feature (1)..(321): NCBI GI NO: 28465345 NR Description: pyruvate dehydrogenase E1 alpha subunit
MRRMEIAADSLYKAKLIRGFCHLYDGQEALAVGMEAAITKKDAIITSYRDHCTFIGRGGKLVDAFSELMGRKTGCSHGKGGSMHFYKKDASFYGGHGIVGAQIPLGCGLAFAQKYNKDEAVTFALYGDGAANQGQLFEALNISALWDLPAILVCENNHYGMGTATWRSAKSPAYFKRGDYVPGLKVDGMDALAVKQACKFAKEHALKNGPIILEMDTYRYHGHSMSDPGSTYRTRDEISGVRQVRDPIERVRKLLLTHDIATEKELKDMEKEIRKEVDDAVAQAKESPIPDASELFTNMYVKDCGVESFGADRKELKVTLP

SEQ ID NO: 2546 - DNA, 1439 bp, Arabidopsis thaliana
  misc_feature (1)..(1439): Ceres Seq. ID no. 12738816
cttcttcttcttcgtcgtcctcaacaagctcttctttctgactcataacccaaatttctgagaatcagagccttattcaagagaacaccaagagtttggtggaagttgttgaaattcgaagccgatcgcggactcgtttgctcttgattacgtcgcaatccgtacgattttccgatcaaacttaagagtgaaggagatagatttgtagaaaaaggaagagaataagagtgagcttgtggccaaaaaagggatgcctttgaacttaggcaacgatggcgatgggtcttcccggattattttgactgagcctcgcggatctactgctgaggtgcttctatttggaggacaagtcatttcttggaaaaatgaaaggagggaagaactgctttatatgagcagcaaggctcaatataagccacccaaggcgatcagaggaggaatacctgtttgctttccacagtttggaaactttggtggacttgagcgacatggatttgcccggaacaaattctggtcacatgatgaagatccttcgcctctacctcctgctaacaaacaatcatctgttgatctgatattgaagtccacagaagatgacttgaagacctggccgcatagttttgaactccgtattcgcatttctattagccctgggaagcttactttgatccctcgtgtgaggaacattgactcaaaggcattctcctttatgtttgcactgcgaaactacttatatgtatctgacataagtgaagttcgagttgagggtttggagacactggattatctagacaacttgattggtaaagaaagattcactgagcaagcagacgcgattacctttgacggggaggtcgatagagtgtacttgaacacaccaacaaagattgcggtcatagatcatgagcgaaagaggaccatcgagttgcgaaaggaaggcatgcccaatgcagttgtgtggaacccctgggacaaaaaggcaaagaccatagctgatatgggagatgaagattacaaaacaatgctttgtgtagattctggagtaatcgaacctctggtattgttaaagcctcgtgaagagtggaaaggcagacaagaactatccatcgtctcatcaagttactgcagcggacagcttgatccacgcaaggttctttacggagatatctgatccttttgggggtttatcttacttagtaaaaaaaacaataataagccatgatctcattatcactaccacccagaaacaactctctaagagtcttgtcttgaacttggagattttatccttttgacttgtgttttgagtgagttctgattgttgttgttacacagagaggtcacggtaatattttgtaacgttgactctgtgtttgaccgtcaaacagtgtatcggtttctttgttcggaaatttagtagaatatatcatcaatttagt

SEQ ID NO: 2547 - protein, 306 aa, Arabidopsis thaliana
  peptide (1)..(306): Ceres Seq. ID no. 12738817
  misc_feature (13)..(285): Pfam Name: Pfam Description:  Aldose 1-epimerase
  misc_feature (1)..(306): NCBI GI NO: 18395868 NR Description: expressed protein; protein id: At3g01590
  misc_feature (1)..(306): NCBI GI NO: 16612258 NR Description: AT3g01590/F4P13_13 [Arabidopsis thaliana]
  misc_feature (1)..(305): NCBI GI NO: 11281678 NR Description: hypothetical protein F18O22
  misc_feature (1)..(305): NCBI GI NO: 28393808 NR Description: unknown protein [Arabidopsis thaliana]
  misc_feature (1)..(305): NCBI GI NO: 18417396 NR Description: putative protein; protein id: At5g14500
  misc_feature (10)..(302): NCBI GI NO: 15242099 NR Description: apospory-associated protein C
  misc_feature (11)..(304): NCBI GI NO: 38344152 NR Description: OSJNBa0041A02.19
  misc_feature (6)..(304): NCBI GI NO: 40253263 NR Description: putative Aldose 1-epimerase
  misc_feature (11)..(304): NCBI GI NO: 2501555 NR Description: POSSIBLE APOSPORY-ASSOCIATED PROTEIN C
  misc_feature (10)..(302): NCBI GI NO: 19387263 NR Description: putative apospory-associated protein C
MPLNLGNDGDGSSRIILTEPRGSTAEVLLFGGQVISWKNERREELLYMSSKAQYKPPKAIRGGIPVCFPQFGNFGGLERHGFARNKFWSHDEDPSPLPPANKQSSVDLILKSTEDDLKTWPHSFELRIRISISPGKLTLIPRVRNIDSKAFSFMFALRNYLYVSDISEVRVEGLETLDYLDNLIGKERFTEQADAITFDGEVDRVYLNTPTKIAVIDHERKRTIELRKEGMPNAVVWNPWDKKAKTIADMGDEDYKTMLCVDSGVIEPLVLLKPREEWKGRQELSIVSSSYCSGQLDPRKVLYGDI

SEQ ID NO: 2548 - protein, 259 aa, Arabidopsis thaliana
  peptide (1)..(259): Ceres Seq. ID no. 12738818
  misc_feature (1)..(238): Pfam Name: Pfam Description:  Aldose 1-epimerase
  misc_feature (1)..(259): NCBI GI NO: 18395868 NR Description: expressed protein; protein id: At3g01590
  misc_feature (1)..(259): NCBI GI NO: 16612258 NR Description: AT3g01590/F4P13_13 [Arabidopsis thaliana]
  misc_feature (1)..(258): NCBI GI NO: 11281678 NR Description: hypothetical protein F18O22
  misc_feature (1)..(258): NCBI GI NO: 28393808 NR Description: unknown protein [Arabidopsis thaliana]
  misc_feature (1)..(258): NCBI GI NO: 18417396 NR Description: putative protein; protein id: At5g14500
  misc_feature (1)..(255): NCBI GI NO: 15242099 NR Description: apospory-associated protein C
  misc_feature (1)..(257): NCBI GI NO: 38344152 NR Description: OSJNBa0041A02.19
  misc_feature (1)..(257): NCBI GI NO: 40253263 NR Description: putative Aldose 1-epimerase
  misc_feature (1)..(257): NCBI GI NO: 2501555 NR Description: POSSIBLE APOSPORY-ASSOCIATED PROTEIN C
  misc_feature (1)..(255): NCBI GI NO: 19387263 NR Description: putative apospory-associated protein C
MSSKAQYKPPKAIRGGIPVCFPQFGNFGGLERHGFARNKFWSHDEDPSPLPPANKQSSVDLILKSTEDDLKTWPHSFELRIRISISPGKLTLIPRVRNIDSKAFSFMFALRNYLYVSDISEVRVEGLETLDYLDNLIGKERFTEQADAITFDGEVDRVYLNTPTKIAVIDHERKRTIELRKEGMPNAVVWNPWDKKAKTIADMGDEDYKTMLCVDSGVIEPLVLLKPREEWKGRQELSIVSSSYCSGQLDPRKVLYGDI

SEQ ID NO: 2549 - protein, 153 aa, Arabidopsis thaliana
  peptide (1)..(153): Ceres Seq. ID no. 12738819
  misc_feature (1)..(132): Pfam Name: Pfam Description:  Aldose 1-epimerase
  misc_feature (1)..(153): NCBI GI NO: 18395868 NR Description: expressed protein; protein id: At3g01590
  misc_feature (1)..(153): NCBI GI NO: 16612258 NR Description: AT3g01590/F4P13_13 [Arabidopsis thaliana]
  misc_feature (1)..(152): NCBI GI NO: 11281678 NR Description: hypothetical protein F18O22
  misc_feature (1)..(152): NCBI GI NO: 28393808 NR Description: unknown protein [Arabidopsis thaliana]
  misc_feature (1)..(152): NCBI GI NO: 18417396 NR Description: putative protein; protein id: At5g14500
  misc_feature (1)..(149): NCBI GI NO: 15242099 NR Description: apospory-associated protein C
  misc_feature (1)..(151): NCBI GI NO: 38344152 NR Description: OSJNBa0041A02.19
  misc_feature (1)..(151): NCBI GI NO: 40253263 NR Description: putative Aldose 1-epimerase
  misc_feature (1)..(151): NCBI GI NO: 2501555 NR Description: POSSIBLE APOSPORY-ASSOCIATED PROTEIN C
  misc_feature (1)..(149): NCBI GI NO: 19387263 NR Description: putative apospory-associated protein C
MFALRNYLYVSDISEVRVEGLETLDYLDNLIGKERFTEQADAITFDGEVDRVYLNTPTKIAVIDHERKRTIELRKEGMPNAVVWNPWDKKAKTIADMGDEDYKTMLCVDSGVIEPLVLLKPREEWKGRQELSIVSSSYCSGQLDPRKVLYGDI

SEQ ID NO: 2550 - DNA, 775 bp, Arabidopsis thaliana
  misc_feature (1)..(775): Ceres Seq. ID no. 12348623
attcatcatccacaacaaacctcttcttcagtctgatagagatctcacgtttcaaacaacaagaatggcgttccctaaggtatacttcgacatgaccatcgacggccagcccgcgggaaggatcgtgatggagctgtacaccgataagactcccaggactgccgagaatttcagagctctctgcaccggagagaaaggtgttggcggtaccggaaaaccccttcacttcaagggatctaagtttcaccgtgtgatccctaacttcatgtgccagggaggagatttcaccgccgggaacggaacaggcggtgagtcgatctacgggagcaagttcgaggacgagaatttcgagaggaagcacaccggaccggggatcctgtcgatggcgaacgccggtgcaaacacgaacggatctcagttcttcatctgcaccgtgaagaccgattggcttgatgggaagcacgtggtgtttgggcaggtcgtggaaggcttagacgtggtaaaggccatcgagaaggttggatcatcatctggaaagccgacgaagcctgtggttgttgccgattgtggtcagctctcttaggatcttcctatcatcatccttaatttagcatcatcgtcgtcattgtggtgtctctttatgcttttgcttttgttatggagtctttttaaaatttgtagtcataagtttggtgtgtgttctcatgggaacatatataaacttgcccctttaatattaactaccagaaataaggaatgagcactcttttatcat

SEQ ID NO: 2551 - protein, 193 aa, Arabidopsis thaliana
  peptide (1)..(193): Ceres Seq. ID no. 12348624
  misc_feature (22)..(193): NCBI GI NO: 15234781 NR Description: peptidylprolyl isomerase ROC1
  misc_feature (25)..(193): NCBI GI NO: 11270324 NR Description: peptidylprolyl isomerase (EC 5.2.1.8) CYP2
  misc_feature (25)..(193): NCBI GI NO: 15226467 NR Description: cyclophilin (CYP2); protein id: At2g21130
  misc_feature (22)..(193): NCBI GI NO: 1076510 NR Description: peptidylprolyl isomerase (EC 5
  misc_feature (22)..(193): NCBI GI NO: 18146786 NR Description: CYP1 [Vigna radiata]
  misc_feature (22)..(192): NCBI GI NO: 11270316 NR Description: peptidylprolyl isomerase (EC 5.2.1.8)
  misc_feature (23)..(193): NCBI GI NO: 18076088 NR Description: cyclophilin [Ricinus communis]
  misc_feature (25)..(193): NCBI GI NO: 21886603 NR Description: peptidylprolyl isomerase (cyclophilin)
  misc_feature (25)..(193): NCBI GI NO: 15227259 NR Description: cytosolic cyclophilin
  misc_feature (22)..(192): NCBI GI NO: 11270320 NR Description: peptidylprolyl isomerase (EC 5.2.1.8) vcCyP
FIIHNKPLLQSDRDLTFQTTRMAFPKVYFDMTIDGQPAGRIVMELYTDKTPRTAENFRALCTGEKGVGGTGKPLHFKGSKFHRVIPNFMCQGGDFTAGNGTGGESIYGSKFEDENFERKHTGPGILSMANAGANTNGSQFFICTVKTDWLDGKHVVFGQVVEGLDVVKAIEKVGSSSGKPTKPVVVADCGQLS

SEQ ID NO: 2552 - protein, 172 aa, Arabidopsis thaliana
  peptide (1)..(172): Ceres Seq. ID no. 12348625
  misc_feature (1)..(172): NCBI GI NO: 15234781 NR Description: peptidylprolyl isomerase ROC1
  misc_feature (4)..(172): NCBI GI NO: 11270324 NR Description: peptidylprolyl isomerase (EC 5.2.1.8) CYP2
  misc_feature (4)..(172): NCBI GI NO: 15226467 NR Description: cyclophilin (CYP2); protein id: At2g21130
  misc_feature (1)..(172): NCBI GI NO: 1076510 NR Description: peptidylprolyl isomerase (EC 5
  misc_feature (1)..(172): NCBI GI NO: 18146786 NR Description: CYP1 [Vigna radiata]
  misc_feature (1)..(171): NCBI GI NO: 11270316 NR Description: peptidylprolyl isomerase (EC 5.2.1.8)
  misc_feature (2)..(172): NCBI GI NO: 18076088 NR Description: cyclophilin [Ricinus communis]
  misc_feature (4)..(172): NCBI GI NO: 21886603 NR Description: peptidylprolyl isomerase (cyclophilin)
  misc_feature (4)..(172): NCBI GI NO: 15227259 NR Description: cytosolic cyclophilin
  misc_feature (1)..(171): NCBI GI NO: 11270320 NR Description: peptidylprolyl isomerase (EC 5.2.1.8) vcCyP
MAFPKVYFDMTIDGQPAGRIVMELYTDKTPRTAENFRALCTGEKGVGGTGKPLHFKGSKFHRVIPNFMCQGGDFTAGNGTGGESIYGSKFEDENFERKHTGPGILSMANAGANTNGSQFFICTVKTDWLDGKHVVFGQVVEGLDVVKAIEKVGSSSGKPTKPVVVADCGQLS

SEQ ID NO: 2553 - protein, 163 aa, Arabidopsis thaliana
  peptide (1)..(163): Ceres Seq. ID no. 12348626
  misc_feature (1)..(163): NCBI GI NO: 15234781 NR Description: peptidylprolyl isomerase ROC1
  misc_feature (1)..(163): NCBI GI NO: 11270324 NR Description: peptidylprolyl isomerase (EC 5.2.1.8) CYP2
  misc_feature (1)..(163): NCBI GI NO: 15226467 NR Description: cyclophilin (CYP2); protein id: At2g21130
  misc_feature (1)..(163): NCBI GI NO: 1076510 NR Description: peptidylprolyl isomerase (EC 5
  misc_feature (1)..(163): NCBI GI NO: 18146786 NR Description: CYP1 [Vigna radiata]
  misc_feature (1)..(162): NCBI GI NO: 11270316 NR Description: peptidylprolyl isomerase (EC 5.2.1.8)
  misc_feature (1)..(163): NCBI GI NO: 18076088 NR Description: cyclophilin [Ricinus communis]
  misc_feature (1)..(163): NCBI GI NO: 21886603 NR Description: peptidylprolyl isomerase (cyclophilin)
  misc_feature (1)..(163): NCBI GI NO: 15227259 NR Description: cytosolic cyclophilin
  misc_feature (1)..(162): NCBI GI NO: 11270320 NR Description: peptidylprolyl isomerase (EC 5.2.1.8) vcCyP
MTIDGQPAGRIVMELYTDKTPRTAENFRALCTGEKGVGGTGKPLHFKGSKFHRVIPNFMCQGGDFTAGNGTGGESIYGSKFEDENFERKHTGPGILSMANAGANTNGSQFFICTVKTDWLDGKHVVFGQVVEGLDVVKAIEKVGSSSGKPTKPVVVADCGQLS

SEQ ID NO: 2554 - DNA, 1949 bp, Arabidopsis thaliana
  misc_feature (1)..(1949): Ceres Seq. ID no. 12335366
aatcttagtaataatcccaaaaaccagaaaaaaaggagctttgcttttgtaggaattaatggattcagtgaactccttcaaaggatatggaaaagtagacgaagctcaagatttagcattgaagaaaaagacaagaaaacgtctacttctactatccatctccgtcgtagttctcatcgccgtaataatcgccgccgtagtcgccaccgtcgttcacaagaacaaaaacgagtcaacaccgagtccacctcccgagttaacaccatccacttcactcaaagccatttgcagtgtaactcgtttccctgaatcttgcatttcaagtatctcaaagcttccatcttccaacacaacagatccagagactctattcaagctctcattgaaagtaatcatcgatgagcttgattcgatttccgatttaccggagaagctatcgaaagagactgaagacgaaagaatcaaatctgcgttaagggtttgtggagatctgatcgaagatgctttagatcgactcaacgacactgtttccgccattgatgacgaagaaaagaagaaaactttgtcatcttccaaaatcgaagatctcaaaacttggctaagcgcaacggtaacagatcacgagacgtgtttcgattcgttagatgagttgaaacagaacaaaacagagtatgcgaactcgacgattactcagaatctgaaatcggcaatgagtagatcaacggagttcacaagtaacagtcttgcaatagtatcgaagattctttctgcgttaagcgatttggggattccgatacacaggagaagaagactgatgagtcatcatcatcagcaaagtgtggattttgagaaatgggcacgacggaggttgttgcaaacggcaggtttaaagcctgatgtgacggtggcgggtgatggaaccggtgatgtgttgactgtgaatgaagcggtggctaaggtgccgaagaagagtttgaagatgtttgtgatttatgtgaagagtggaacttatgttgagaatgttgtgatggataagagtaaatggaacgttatgatttacggtgacggcaaagggaagaccattatttccggcagcaagaacttcgtcgacgggactcctacttacgaaacggcgacgtttgctatacaaggcaaaggatttataatgaaggatattggaatcataaacaccgcgggagcagcaaaacaccaagctgtggcattccgatcaggctctgatttctcagtctattaccaatgctcattcgatggttttcaagacactctttaccctcactccaaccgccaattctaccgtgactgcgacgttactgggacaatcgacttcattttcggaagtgctgcggtcgttttccaaggctgcaaaatcatgcctcgccagcctctttctaaccaattcaacaccataaccgctcagggcaaaaaagatccgaaccaaagctcggggatgtcgattcaacgatgcactatctccgcaaacggcaatgtgattgctcccacgtatcttggccggccgtggaaggagttttccacgacggttattatggagacggtgattggagcagtggttcgaccgtccgggtggatgtcatgggtttctggagttgatccaccagcaagtattgtctacggagagtataagaatacgggcccgggttcagatgtaacgcagagagttaaatgggctggatataaaccggttatgtcggacgccgaggctgcgaagtttacagtggctacgcttttacacggagctgattggataccggcaacaggagtgatcaatcagctatcttaatatagtgacaatacaattggattcgtagcttgtttttgaaaacatccggttgtgatctactttatatttgtttgacacttatgcatgatctgtaattttttccaacatagttgtattttgtgtatcccct

SEQ ID NO: 2555 - protein, 586 aa, Arabidopsis thaliana
  peptide (1)..(586): Ceres Seq. ID no. 12335367
  misc_feature (280)..(574): Pfam Name: Pfam Description:  Pectinesterase
  misc_feature (1)..(586): NCBI GI NO: 15220958 NR Description: pectinesterase family; protein id: At1g53840
  misc_feature (1)..(586): NCBI GI NO: 21593683 NR Description: pectinesterase, putative [Arabidopsis thaliana]
  misc_feature (1)..(581): NCBI GI NO: 6093739 NR Description: Pectinesterase 3 precursor
  misc_feature (46)..(577): NCBI GI NO: 15231826 NR Description: putative pectin methylesterase
  misc_feature (15)..(581): NCBI GI NO: 15238377 NR Description: pectinesterase family; protein id: At5g04960.1
  misc_feature (15)..(581): NCBI GI NO: 28393771 NR Description: unknown protein [Arabidopsis thaliana]
  misc_feature (24)..(586): NCBI GI NO: 15241079 NR Description: pectin methyl-esterase - like protein
  misc_feature (22)..(581): NCBI GI NO: 15230019 NR Description: putative pectinesterase; protein id: At3g05610.1
  misc_feature (22)..(581): NCBI GI NO: 26451784 NR Description: putative pectinesterase [Arabidopsis thaliana]
  misc_feature (14)..(581): NCBI GI NO: 15238729 NR Description: pectinesterase; protein id: At5g53370
MDSVNSFKGYGKVDEAQDLALKKKTRKRLLLLSISVVVLIAVIIAAVVATVVHKNKNESTPSPPPELTPSTSLKAICSVTRFPESCISSISKLPSSNTTDPETLFKLSLKVIIDELDSISDLPEKLSKETEDERIKSALRVCGDLIEDALDRLNDTVSAIDDEEKKKTLSSSKIEDLKTWLSATVTDHETCFDSLDELKQNKTEYANSTITQNLKSAMSRSTEFTSNSLAIVSKILSALSDLGIPIHRRRRLMSHHHQQSVDFEKWARRRLLQTAGLKPDVTVAGDGTGDVLTVNEAVAKVPKKSLKMFVIYVKSGTYVENVVMDKSKWNVMIYGDGKGKTIISGSKNFVDGTPTYETATFAIQGKGFIMKDIGIINTAGAAKHQAVAFRSGSDFSVYYQCSFDGFQDTLYPHSNRQFYRDCDVTGTIDFIFGSAAVVFQGCKIMPRQPLSNQFNTITAQGKKDPNQSSGMSIQRCTISANGNVIAPTYLGRPWKEFSTTVIMETVIGAVVRPSGWMSWVSGVDPPASIVYGEYKNTGPGSDVTQRVKWAGYKPVMSDAEAAKFTVATLLHGADWIPATGVINQLS

SEQ ID NO: 2556 - protein, 369 aa, Arabidopsis thaliana
  peptide (1)..(369): Ceres Seq. ID no. 12335368
  misc_feature (63)..(357): Pfam Name: Pfam Description:  Pectinesterase
  misc_feature (1)..(369): NCBI GI NO: 15220958 NR Description: pectinesterase family; protein id: At1g53840
  misc_feature (1)..(369): NCBI GI NO: 21593683 NR Description: pectinesterase, putative [Arabidopsis thaliana]
  misc_feature (1)..(364): NCBI GI NO: 6093739 NR Description: Pectinesterase 3 precursor
  misc_feature (1)..(360): NCBI GI NO: 15231826 NR Description: putative pectin methylesterase
  misc_feature (1)..(364): NCBI GI NO: 15238377 NR Description: pectinesterase family; protein id: At5g04960.1
  misc_feature (1)..(364): NCBI GI NO: 28393771 NR Description: unknown protein [Arabidopsis thaliana]
  misc_feature (1)..(369): NCBI GI NO: 15241079 NR Description: pectin methyl-esterase - like protein
  misc_feature (1)..(364): NCBI GI NO: 15230019 NR Description: putative pectinesterase; protein id: At3g05610.1
  misc_feature (1)..(364): NCBI GI NO: 26451784 NR Description: putative pectinesterase [Arabidopsis thaliana]
  misc_feature (1)..(364): NCBI GI NO: 15238729 NR Description: pectinesterase; protein id: At5g53370
MSRSTEFTSNSLAIVSKILSALSDLGIPIHRRRRLMSHHHQQSVDFEKWARRRLLQTAGLKPDVTVAGDGTGDVLTVNEAVAKVPKKSLKMFVIYVKSGTYVENVVMDKSKWNVMIYGDGKGKTIISGSKNFVDGTPTYETATFAIQGKGFIMKDIGIINTAGAAKHQAVAFRSGSDFSVYYQCSFDGFQDTLYPHSNRQFYRDCDVTGTIDFIFGSAAVVFQGCKIMPRQPLSNQFNTITAQGKKDPNQSSGMSIQRCTISANGNVIAPTYLGRPWKEFSTTVIMETVIGAVVRPSGWMSWVSGVDPPASIVYGEYKNTGPGSDVTQRVKWAGYKPVMSDAEAAKFTVATLLHGADWIPATGVINQLS

SEQ ID NO: 2557 - protein, 334 aa, Arabidopsis thaliana
  peptide (1)..(334): Ceres Seq. ID no. 12335369
  misc_feature (28)..(322): Pfam Name: Pfam Description:  Pectinesterase
  misc_feature (1)..(334): NCBI GI NO: 15220958 NR Description: pectinesterase family; protein id: At1g53840
  misc_feature (1)..(334): NCBI GI NO: 21593683 NR Description: pectinesterase, putative [Arabidopsis thaliana]
  misc_feature (1)..(329): NCBI GI NO: 6093739 NR Description: Pectinesterase 3 precursor
  misc_feature (1)..(325): NCBI GI NO: 15231826 NR Description: putative pectin methylesterase
  misc_feature (1)..(329): NCBI GI NO: 15238377 NR Description: pectinesterase family; protein id: At5g04960.1
  misc_feature (1)..(329): NCBI GI NO: 28393771 NR Description: unknown protein [Arabidopsis thaliana]
  misc_feature (1)..(334): NCBI GI NO: 15241079 NR Description: pectin methyl-esterase - like protein
  misc_feature (1)..(329): NCBI GI NO: 15230019 NR Description: putative pectinesterase; protein id: At3g05610.1
  misc_feature (1)..(329): NCBI GI NO: 26451784 NR Description: putative pectinesterase [Arabidopsis thaliana]
  misc_feature (1)..(329): NCBI GI NO: 15238729 NR Description: pectinesterase; protein id: At5g53370
MSHHHQQSVDFEKWARRRLLQTAGLKPDVTVAGDGTGDVLTVNEAVAKVPKKSLKMFVIYVKSGTYVENVVMDKSKWNVMIYGDGKGKTIISGSKNFVDGTPTYETATFAIQGKGFIMKDIGIINTAGAAKHQAVAFRSGSDFSVYYQCSFDGFQDTLYPHSNRQFYRDCDVTGTIDFIFGSAAVVFQGCKIMPRQPLSNQFNTITAQGKKDPNQSSGMSIQRCTISANGNVIAPTYLGRPWKEFSTTVIMETVIGAVVRPSGWMSWVSGVDPPASIVYGEYKNTGPGSDVTQRVKWAGYKPVMSDAEAAKFTVATLLHGADWIPATGVINQLS

SEQ ID NO: 2558 - DNA, 1283 bp, Arabidopsis thaliana
  misc_feature (1)..(1283): Ceres Seq. ID no. 12335735
tacgtctctcacatgtcaaatccttacgatttcgatttctcctgaaaatctcaacaaaacccttaagaattttcgatttcgaattcccaattctcccggagttctgatgcagatcgccggagataagtaatctcgagtttactaatgccgcggcttccgtcgtctcgtcgcggtgtcgtgtggtttcgatggaagatactcatcactatctccaccgcattatgcatcctcgctctcttctgtatcaaccgtcagtctaattccactgcgacgacgacgacactgtcttcgtctctctccgtcgcgagatctcgtatccctctcgttaaatactccggcgatcgtcccaaactcgccttccttttcctcgctcgacgtgatttgccacttgattttctctgggacagattcttcaagagtgcagatcagaggaatttctcaatctatgtacattcaatacctggtttcgtattcgatgaatcatccacaagatcacatttcttctacaatcgtcaattgaagaatagcattgaggtagtttggggagaatcaagcatgattgcagcagaaagattgttgcttgcatctgctttggaagatccttctaatcaaagatttgttcttttgtctgatagctgtgttccgttatacgactttggttacatttacagatatctagtttcttcaccaaagagttttgtagacagcttccttgataaagataatcgctacactatgaaaatgtttcctgttatacggaaagagaaatggcgaaaaggatctcagtggatatcattgatcagaagccatgcaaaggtcattgttaatgatgatactgtgttccctgtttttcagaaattttgcaagcgatctctacctctggatcccaaaaagaattggctatatcttaaaaagaggcgacacaactgcatccctgatgaacactacgtgcaaactctactaacaatgcgtggcttggaaaatgaaatggaacggagaacagtgacatacaccacatggaacctatcagcaaaaaaagctgaagctaaatcttggcatcctctcactttcacatctgacaattccggaccagaggaaatagaaggaataaagaaaatcaaccatgtatattatgaatcggagtatcgaacagaatggtgcagatcgaattcaaaacccgtcccgtgctttctgtttgcgaggaagttcactagaggagccgcaatgcgtcttttgagtgaaggattaatagaatcctcaatagatacaacaaccttgtagat

SEQ ID NO: 2559 - protein, 378 aa, Arabidopsis thaliana
  peptide (1)..(378): Ceres Seq. ID no. 12335736
  misc_feature (108)..(216): Pfam Name: Pfam Description:  Arabidopsis protein of unknown function, DUF266
  misc_feature (5)..(376): NCBI GI NO: 30682534 NR Description: expressed protein [Arabidopsis thaliana]
  misc_feature (130)..(244): NCBI GI NO: 22330381 NR Description: hypothetical protein; protein id: At1g62305.1
  misc_feature (1)..(91): NCBI GI NO: 22330381 NR Description: hypothetical protein; protein id: At1g62305.1
  misc_feature (5)..(293): NCBI GI NO: 25402693 NR Description: hypothetical protein
  misc_feature (14)..(369): NCBI GI NO: 15241437 NR Description: putative protein; protein id: At5g14550.1
  misc_feature (14)..(323): NCBI GI NO: 30684956 NR Description: expressed protein [Arabidopsis thaliana]
  misc_feature (64)..(241): NCBI GI NO: 34911442 NR Description: P0431H09.21
  misc_feature (59)..(365): NCBI GI NO: 38346557 NR Description: OSJNBa0035M09.18
  misc_feature (52)..(355): NCBI GI NO: 15236024 NR Description: putative protein; protein id: At4g25870.1
  misc_feature (69)..(355): NCBI GI NO: 30680587 NR Description: expressed protein [Arabidopsis thaliana]
MPRLPSSRRGVVWFRWKILITISTALCILALFCINRQSNSTATTTTLSSSLSVARSRIPLVKYSGDRPKLAFLFLARRDLPLDFLWDRFFKSADQRNFSIYVHSIPGFVFDESSTRSHFFYNRQLKNSIEVVWGESSMIAAERLLLASALEDPSNQRFVLLSDSCVPLYDFGYIYRYLVSSPKSFVDSFLDKDNRYTMKMFPVIRKEKWRKGSQWISLIRSHAKVIVNDDTVFPVFQKFCKRSLPLDPKKNWLYLKKRRHNCIPDEHYVQTLLTMRGLENEMERRTVTYTTWNLSAKKAEAKSWHPLTFTSDNSGPEEIEGIKKINHVYYESEYRTEWCRSNSKPVPCFLFARKFTRGAAMRLLSEGLIESSIDTTTL

SEQ ID NO: 2560 - protein, 241 aa, Arabidopsis thaliana
  peptide (1)..(241): Ceres Seq. ID no. 12335737
  misc_feature (1)..(79): Pfam Name: Pfam Description:  Arabidopsis protein of unknown function, DUF266
  misc_feature (1)..(239): NCBI GI NO: 30682534 NR Description: expressed protein [Arabidopsis thaliana]
  misc_feature (1)..(107): NCBI GI NO: 22330381 NR Description: hypothetical protein; protein id: At1g62305.1
  misc_feature (1)..(156): NCBI GI NO: 25402693 NR Description: hypothetical protein
  misc_feature (1)..(232): NCBI GI NO: 15241437 NR Description: putative protein; protein id: At5g14550.1
  misc_feature (1)..(186): NCBI GI NO: 30684956 NR Description: expressed protein [Arabidopsis thaliana]
  misc_feature (1)..(104): NCBI GI NO: 34911442 NR Description: P0431H09.21
  misc_feature (1)..(228): NCBI GI NO: 38346557 NR Description: OSJNBa0035M09.18
  misc_feature (1)..(218): NCBI GI NO: 15236024 NR Description: putative protein; protein id: At4g25870.1
  misc_feature (1)..(218): NCBI GI NO: 30680587 NR Description: expressed protein [Arabidopsis thaliana]
  misc_feature (1)..(218): NCBI GI NO: 38637182 NR Description: unknown protein
MIAAERLLLASALEDPSNQRFVLLSDSCVPLYDFGYIYRYLVSSPKSFVDSFLDKDNRYTMKMFPVIRKEKWRKGSQWISLIRSHAKVIVNDDTVFPVFQKFCKRSLPLDPKKNWLYLKKRRHNCIPDEHYVQTLLTMRGLENEMERRTVTYTTWNLSAKKAEAKSWHPLTFTSDNSGPEEIEGIKKINHVYYESEYRTEWCRSNSKPVPCFLFARKFTRGAAMRLLSEGLIESSIDTTTL

SEQ ID NO: 2561 - DNA, 1303 bp, Arabidopsis thaliana
  misc_feature (1)..(1303): Ceres Seq. ID no. 12321886
agatccactcacacctcgtctcctaatctgtacggttcttatttcgaaagggtaaaaaccaaaagcgacgcaaagggcaaaatcggaaaaagtgttttatttatggccgccgttagtagttcgtcggagaccggagactgcggcgttacgggaaagagagatgagatcatgttgttcggagttagagtcgtggttgatccgatgagaaagtgtgtgagtttgaacaatctctctgattatgaaaagtcttctccggaggatgagatccctaagatagtcaccgccggagctggagatggtgaagataagaacgaaacggatgcgacggtgattgtcgctgacggttacgcctccgccaatgacgctgtccagatttcgtcttcttccgtcgggaggaaacgaggggttccatggacagagaacgagcataagaggttcttgattgggttgcagaaagtaggaaaaggagattggaaaggaatatcaagaaactttgtgaagagtaggactcctactcaagtagctagtcatgctcagaaatacttcctccgacgaaccaacctcaaccgtcgccgaagaagatctagcctttttgatatcactactgagacggttacagaaatggccatggagcaagatcctactcaggagaactcaccactacctgaaaccaacatcagctctggacagcaagcgatgcaagtttttactgacgtgccgacaaaaactgagaatgcaccagagacatttcatctcaacgatccatatctggttccagtaaccttccaagcaaagccaacattcaatctaaacacagatgctgctccactttctctcaacctttgtctggcatcctcatttaatcttaacgagcaacccaactcaagacactcggctttcacgatgatgccaagcttcagcgatggagatagcaatagcagcatcatcagagttgcttagagcttaaacccaaggggaaaaaaaaaacagaacaaaaacagaggaaggctatagagattgatggacaaactgtgtctagggtgcttcatcatctttgtttgtttgtaaaactcttgtcacacacactgttatgagtcattttctgctgtgtgtgttttgttttgtggtgatgtaagttaaaaacaagcgtgattctcatgtggcccatctcaatcaatggttggtgatttgtggggtttttaggcttttctattatcttatcttttggggataagataaaagcctaaaactgtatgtaactatgtatggttcttcgaatattttatcatttatctctaatgtc

SEQ ID NO: 2562 - protein, 319 aa, Arabidopsis thaliana
  peptide (1)..(319): Ceres Seq. ID no. 12321887
  misc_feature (135)..(182): Pfam Name: Pfam Description:  Myb-like DNA-binding domain
  misc_feature (35)..(319): NCBI GI NO: 21593684 NR Description: Myb-related transcription activator, putative
  misc_feature (35)..(319): NCBI GI NO: 15221922 NR Description: myb family transcription factor
  misc_feature (37)..(300): NCBI GI NO: 15221408 NR Description: myb family transcription factor
  misc_feature (55)..(314): NCBI GI NO: 28629811 NR Description: transcription factor Myb1 [Malus xiaojinensis]
  misc_feature (56)..(254): NCBI GI NO: 15238083 NR Description: Myb-related transcription activator-like
  misc_feature (39)..(319): NCBI GI NO: 37536856 NR Description: putative Myb-related protein
  misc_feature (39)..(262): NCBI GI NO: 24850307 NR Description: transcription factor MYBS3
  misc_feature (39)..(224): NCBI GI NO: 7705206 NR Description: MybSt1 [Solanum tuberosum]
  misc_feature (39)..(224): NCBI GI NO: 1076660 NR Description: D13F(MYBST1) protein - potato
  misc_feature (45)..(307): NCBI GI NO: 15228185 NR Description: putative MYB family transcription factor
RSTHTSSPNLYGSYFERVKTKSDAKGKIGKSVLFMAAVSSSSETGDCGVTGKRDEIMLFGVRVVVDPMRKCVSLNNLSDYEKSSPEDEIPKIVTAGAGDGEDKNETDATVIVADGYASANDAVQISSSSVGRKRGVPWTENEHKRFLIGLQKVGKGDWKGISRNFVKSRTPTQVASHAQKYFLRRTNLNRRRRRSSLFDITTETVTEMAMEQDPTQENSPLPETNISSGQQAMQVFTDVPTKTENAPETFHLNDPYLVPVTFQAKPTFNLNTDAAPLSLNLCLASSFNLNEQPNSRHSAFTMMPSFSDGDSNSSIIRVA

SEQ ID NO: 2563 - protein, 285 aa, Arabidopsis thaliana
  peptide (1)..(285): Ceres Seq. ID no. 12321888
  misc_feature (101)..(148): Pfam Name: Pfam Description:  Myb-like DNA-binding domain
  misc_feature (1)..(285): NCBI GI NO: 21593684 NR Description: Myb-related transcription activator, putative
  misc_feature (1)..(285): NCBI GI NO: 15221922 NR Description: myb family transcription factor
  misc_feature (3)..(266): NCBI GI NO: 15221408 NR Description: myb family transcription factor
  misc_feature (21)..(280): NCBI GI NO: 28629811 NR Description: transcription factor Myb1 [Malus xiaojinensis]
  misc_feature (22)..(220): NCBI GI NO: 15238083 NR Description: Myb-related transcription activator-like
  misc_feature (5)..(285): NCBI GI NO: 37536856 NR Description: putative Myb-related protein
  misc_feature (5)..(228): NCBI GI NO: 24850307 NR Description: transcription factor MYBS3
  misc_feature (5)..(190): NCBI GI NO: 7705206 NR Description: MybSt1 [Solanum tuberosum]
  misc_feature (5)..(190): NCBI GI NO: 1076660 NR Description: D13F(MYBST1) protein - potato
  misc_feature (11)..(273): NCBI GI NO: 15228185 NR Description: putative MYB family transcription factor
MAAVSSSSETGDCGVTGKRDEIMLFGVRVVVDPMRKCVSLNNLSDYEKSSPEDEIPKIVTAGAGDGEDKNETDATVIVADGYASANDAVQISSSSVGRKRGVPWTENEHKRFLIGLQKVGKGDWKGISRNFVKSRTPTQVASHAQKYFLRRTNLNRRRRRSSLFDITTETVTEMAMEQDPTQENSPLPETNISSGQQAMQVFTDVPTKTENAPETFHLNDPYLVPVTFQAKPTFNLNTDAAPLSLNLCLASSFNLNEQPNSRHSAFTMMPSFSDGDSNSSIIRVA

SEQ ID NO: 2564 - protein, 263 aa, Arabidopsis thaliana
  peptide (1)..(263): Ceres Seq. ID no. 12321889
  misc_feature (79)..(126): Pfam Name: Pfam Description:  Myb-like DNA-binding domain
  misc_feature (1)..(263): NCBI GI NO: 21593684 NR Description: Myb-related transcription activator, putative
  misc_feature (1)..(263): NCBI GI NO: 15221922 NR Description: myb family transcription factor
  misc_feature (1)..(244): NCBI GI NO: 15221408 NR Description: myb family transcription factor
  misc_feature (1)..(258): NCBI GI NO: 28629811 NR Description: transcription factor Myb1 [Malus xiaojinensis]
  misc_feature (1)..(198): NCBI GI NO: 15238083 NR Description: Myb-related transcription activator-like
  misc_feature (1)..(263): NCBI GI NO: 37536856 NR Description: putative Myb-related protein
  misc_feature (1)..(206): NCBI GI NO: 24850307 NR Description: transcription factor MYBS3
  misc_feature (1)..(168): NCBI GI NO: 7705206 NR Description: MybSt1 [Solanum tuberosum]
  misc_feature (1)..(168): NCBI GI NO: 1076660 NR Description: D13F(MYBST1) protein - potato
  misc_feature (1)..(251): NCBI GI NO: 15228185 NR Description: putative MYB family transcription factor
MLFGVRVVVDPMRKCVSLNNLSDYEKSSPEDEIPKIVTAGAGDGEDKNETDATVIVADGYASANDAVQISSSSVGRKRGVPWTENEHKRFLIGLQKVGKGDWKGISRNFVKSRTPTQVASHAQKYFLRRTNLNRRRRRSSLFDITTETVTEMAMEQDPTQENSPLPETNISSGQQAMQVFTDVPTKTENAPETFHLNDPYLVPVTFQAKPTFNLNTDAAPLSLNLCLASSFNLNEQPNSRHSAFTMMPSFSDGDSNSSIIRVA

SEQ ID NO: 2565 - DNA, 1398 bp, Arabidopsis thaliana
  misc_feature (1)..(1398): Ceres Seq. ID no. 13499706
tccccccgctcttcttagtaacctcctaagccatgaaatagtcgcaaaggccctttcttcgtcttcgtttctaattgctttcgacgacaatcgatcgtagagaagtctacctcgtagacatctctctcacaaatccaattcaattaccattgtttgttattatctgatgtcgaatatgcaattctctcgtggttttaatccctttgttatcctcttctgtctcgccgtggttgcaccaattatatcggctgatgtcgctatcttgagaacggactattaccaaaaaacatgtcctgatttccacaaaattgtgcgtgaagccgttacaaccaaacaagtccaacaaccaacaactgcggccgggaccctccgtctctttttccatgattgtttccttgaaggttgtgatgcatctgtcttgatcgcgaccaactcgttcaacaaagcggaacgcgatgatgatctcaatgattccctcccgggagatgcttttgacatcgtcacccgcatcaagacagctctcgagttgtcttgtcctggtgtagtatcatgcgcggatattctagcgcaggctacacgtgaccttgtcacaatggtaggaggaccttactttgacgtaaagcttggtcgtaaagacggattcgaatccaaagctcataaagtcagaggaaatgtcccaatggcaaaccagactgttcctgacatccacgggatattcaagaaaaacggttttagtcttcgcgagatggtagcattaagcggggctcacaccattggattctctcactgcaaagagttttccgacagactctacggatcccgtgctgataaagaaatcaacccgcgattcgcagccgctctcaaagatctttgcaaaaaccacaccgtggatgatacaatcgccgcgtttaacgacgtgatgactccaggaaagttcgacaacatgtacttcaagaacctaaagcgagggctagggcttttagcgtctgaccacatccttattaaagacaacagcaccaagccgtttgtggatctatacgcaactaacgagacagcattctttgaggatttcgctcgtgcgatggagaaacttggcacggtcggcgtcaagggcgataaagatggagaagtgagacgtaggtgcgaccacttcaacaatctcaacgtttaagaagaaaaagaaaacacaaaaccatataaatataatattatttctgttttatttgcggaggagttgaggagaagaaaggtttggttggtatatatgtttaataactacctattataagcaagatcttgtaacaattcaagttgggatgtttaatttttccatgaaaattcaaactgttgtattgaaagtatatagataaaataacatattatatatcgaacaattgt

SEQ ID NO: 2566 - protein, 334 aa, Arabidopsis thaliana
  peptide (1)..(334): Ceres Seq. ID no. 13499707
  misc_feature (1)..(334): NCBI GI NO: 18422742 NR Description: peroxidase, putative [Arabidopsis thaliana]
  misc_feature (1)..(334): NCBI GI NO: 21593687 NR Description: peroxidase [Arabidopsis thaliana]
  misc_feature (4)..(334): NCBI GI NO: 9759442 NR Description: peroxidase [Arabidopsis thaliana]
  misc_feature (15)..(334): NCBI GI NO: 15236620 NR Description: peroxidase, putative [Arabidopsis thaliana]
  misc_feature (18)..(331): NCBI GI NO: 15221670 NR Description: peroxidase, putative [Arabidopsis thaliana]
  misc_feature (14)..(330): NCBI GI NO: 15242580 NR Description: peroxidase, putative [Arabidopsis thaliana]
  misc_feature (33)..(330): NCBI GI NO: 15232929 NR Description: peroxidase, putative [Arabidopsis thaliana]
  misc_feature (33)..(330): NCBI GI NO: 14334600 NR Description: putative peroxidase [Arabidopsis thaliana]
  misc_feature (54)..(330): NCBI GI NO: 1890317 NR Description: peroxidase ATP26a [Arabidopsis thaliana]
  misc_feature (5)..(330): NCBI GI NO: 7433082 NR Description: probable peroxidase (EC 1
MSNMQFSRGFNPFVILFCLAVVAPIISADVAILRTDYYQKTCPDFHKIVREAVTTKQVQQPTTAAGTLRLFFHDCFLEGCDASVLIATNSFNKAERDDDLNDSLPGDAFDIVTRIKTALELSCPGVVSCADILAQATRDLVTMVGGPYFDVKLGRKDGFESKAHKVRGNVPMANQTVPDIHGIFKKNGFSLREMVALSGAHTIGFSHCKEFSDRLYGSRADKEINPRFAAALKDLCKNHTVDDTIAAFNDVMTPGKFDNMYFKNLKRGLGLLASDHILIKDNSTKPFVDLYATNETAFFEDFARAMEKLGTVGVKGDKDGEVRRRCDHFNNLNV

SEQ ID NO: 2567 - protein, 331 aa, Arabidopsis thaliana
  peptide (1)..(331): Ceres Seq. ID no. 13499708
  misc_feature (1)..(331): NCBI GI NO: 18422742 NR Description: peroxidase, putative [Arabidopsis thaliana]
  misc_feature (1)..(331): NCBI GI NO: 21593687 NR Description: peroxidase [Arabidopsis thaliana]
  misc_feature (1)..(331): NCBI GI NO: 9759442 NR Description: peroxidase [Arabidopsis thaliana]
  misc_feature (12)..(331): NCBI GI NO: 15236620 NR Description: peroxidase, putative [Arabidopsis thaliana]
  misc_feature (15)..(328): NCBI GI NO: 15221670 NR Description: peroxidase, putative [Arabidopsis thaliana]
  misc_feature (11)..(327): NCBI GI NO: 15242580 NR Description: peroxidase, putative [Arabidopsis thaliana]
  misc_feature (30)..(327): NCBI GI NO: 15232929 NR Description: peroxidase, putative [Arabidopsis thaliana]
  misc_feature (30)..(327): NCBI GI NO: 14334600 NR Description: putative peroxidase [Arabidopsis thaliana]
  misc_feature (51)..(327): NCBI GI NO: 1890317 NR Description: peroxidase ATP26a [Arabidopsis thaliana]
  misc_feature (2)..(327): NCBI GI NO: 7433082 NR Description: probable peroxidase (EC 1
MQFSRGFNPFVILFCLAVVAPIISADVAILRTDYYQKTCPDFHKIVREAVTTKQVQQPTTAAGTLRLFFHDCFLEGCDASVLIATNSFNKAERDDDLNDSLPGDAFDIVTRIKTALELSCPGVVSCADILAQATRDLVTMVGGPYFDVKLGRKDGFESKAHKVRGNVPMANQTVPDIHGIFKKNGFSLREMVALSGAHTIGFSHCKEFSDRLYGSRADKEINPRFAAALKDLCKNHTVDDTIAAFNDVMTPGKFDNMYFKNLKRGLGLLASDHILIKDNSTKPFVDLYATNETAFFEDFARAMEKLGTVGVKGDKDGEVRRRCDHFNNLNV

SEQ ID NO: 2568 - protein, 192 aa, Arabidopsis thaliana
  peptide (1)..(192): Ceres Seq. ID no. 13499709
  misc_feature (1)..(192): NCBI GI NO: 18422742 NR Description: peroxidase, putative [Arabidopsis thaliana]
  misc_feature (1)..(192): NCBI GI NO: 21593687 NR Description: peroxidase [Arabidopsis thaliana]
  misc_feature (1)..(192): NCBI GI NO: 9759442 NR Description: peroxidase [Arabidopsis thaliana]
  misc_feature (1)..(192): NCBI GI NO: 15236620 NR Description: peroxidase, putative [Arabidopsis thaliana]
  misc_feature (1)..(189): NCBI GI NO: 15221670 NR Description: peroxidase, putative [Arabidopsis thaliana]
  misc_feature (1)..(188): NCBI GI NO: 15242580 NR Description: peroxidase, putative [Arabidopsis thaliana]
  misc_feature (1)..(188): NCBI GI NO: 15232929 NR Description: peroxidase, putative [Arabidopsis thaliana]
  misc_feature (1)..(188): NCBI GI NO: 14334600 NR Description: putative peroxidase [Arabidopsis thaliana]
  misc_feature (1)..(188): NCBI GI NO: 1890317 NR Description: peroxidase ATP26a [Arabidopsis thaliana]
  misc_feature (1)..(188): NCBI GI NO: 7433082 NR Description: probable peroxidase (EC 1
MVGGPYFDVKLGRKDGFESKAHKVRGNVPMANQTVPDIHGIFKKNGFSLREMVALSGAHTIGFSHCKEFSDRLYGSRADKEINPRFAAALKDLCKNHTVDDTIAAFNDVMTPGKFDNMYFKNLKRGLGLLASDHILIKDNSTKPFVDLYATNETAFFEDFARAMEKLGTVGVKGDKDGEVRRRCDHFNNLNV

SEQ ID NO: 2569 - DNA, 880 bp, Arabidopsis thaliana
  misc_feature (1)..(880): Ceres Seq. ID no. 12326782
aactctgtcttagttttgagcagcagcagctatggttaacgtcagattctaccgaaactatgggaaaacattcaagaagccacgtcgtccttatgagaaagagcgtcttgatgctgagctaaagcttgttggagaatacggtcttcgttgtaagagagagctttggagagttcaatatacacttagcagaatccgtaatgctgcaagagaactcttaactcttgatgagaagaatcctcgtcgtatctttgaaggtgaagctcttcttaggagaatgaatcgatatggtcttcttgatgaaacccagaacaagcttgattatgttcttgctttgactgttgagaatttccttgaacgtcgtctccaaactattgtctttaagtctggtatggctaagtccattcaccacgctcgtgtccttatccgacaaaggcatatcagggttgggaggcaacttgtgaacattccatcgtttatggtgagagtagagtcacagaagcacgtagacttttctctaaccagtccattcggtggtggtcgacctggaagagtgaagagaaggaacgagagagccggagctaagaaagcttctggtggtgatggagatgaggatgatgaagagtgaaaagtaccaaacccttaaaaaaatccctaagatgaaacactacctagctaaacctatcaaaatgcttttagttgataatagtttggttttgttacctctttttgtgagatatttggtttgttagtgttcttaattagtagtagaagtgaagtgttttctttttttttttataatgttttggaccttgtgttcttgaaccatgtcactttcgaatcttgcttcttataagatactagtagttgatattattatgtc

SEQ ID NO: 2570 - protein, 197 aa, Arabidopsis thaliana [sequence omitted]

SEQ ID NO: 2571 - protein, 116 aa, Arabidopsis thaliana
  peptide (1)..(116): Ceres Seq. ID no. 12326784
  misc_feature (28)..(75): Pfam Name: Pfam Description:  S4 domain
  misc_feature (1)..(116): NCBI GI NO: 15242498 NR Description: 40S ribosomal protein S9-like
  misc_feature (1)..(116): NCBI GI NO: 15242241 NR Description: 40S ribosomal protein - like
  misc_feature (1)..(115): NCBI GI NO: 6440857 NR Description: 40S ribosomal protein S9 [Chlamydomonas sp. HS-5]
  misc_feature (1)..(116): NCBI GI NO: 1710780 NR Description: 40S ribosomal protein S9 (S7)
  misc_feature (1)..(116): NCBI GI NO: 40741183 NR Description: RS9_PODAN 40S ribosomal protein S9 (S7)
  misc_feature (1)..(116): NCBI GI NO: 32417322 NR Description: hypothetical protein [Neurospora crassa]
  misc_feature (1)..(116): NCBI GI NO: 14141193 NR Description: ribosomal protein S9; 40S ribosomal protein S9
  misc_feature (1)..(114): NCBI GI NO: 15294029 NR Description: 40S ribosomal protein S9 [Ictalurus punctatus]
  misc_feature (1)..(116): NCBI GI NO: 13592067 NR Description: ribosomal protein S9 [Rattus norvegicus]
  misc_feature (1)..(116): NCBI GI NO: 24661707 NR Description: Ribosomal protein S9 CG3395-PA
MNRYGLLDETQNKLDYVLALTVENFLERRLQTIVFKSGMAKSIHHARVLIRQRHIRVGRQLVNIPSFMVRVESQKHVDFSLTSPFGGGRPGRVKRRNERAGAKKASGGDGDEDDEE

SEQ ID NO: 2572 - DNA, 1246 bp, Arabidopsis thaliana
  misc_feature (1)..(1246): Ceres Seq. ID no. 12488424
ctgggtcctccgcaatttgagaatcggagatatctcaagtttcgcaaagtctcgtggatttgatcttcgtctccttgatcgatggattcaccttgagcaatcgttgatcgagcttcgaagatgtcgaatcactccagagatgagcctagtactgccccgaagacagatcaatggtatgatcttgtccttggttcctctgccaaagatgactcctcccataaattctgcactttgcgatatgaatttaagccggcttcaatcgataagaacaggtcaggatcaatgcacaagaagaaggataacagagtttcagttgagtttcagaataaccaaccaggtaaacccaaggtgacatttgaaggtagtagtgaggattacaaagaaagcgatgcggtgttgtttttcgatggggagaagtttcgtttagagaggttgcatcgggctgttacgcagctgcgacatgttaggacacctggtgaatctgctgcggcttctcaatctgcggtgcctgtggagcatcggttatctcctgttggtcgtgctgctaaatctccacaagtcaatagaagtttgcttcctgatgtgcctgttgaggtggaaagaatcgaaattgggaagccagagaactcagctgaacctgccaacactggaaacgtgcctgcaacctcaccagtcgaggacaagaacgatgatggagatgagcatcaagagatcgatctggttgaaatatttggctcatttacaccagagaacgacaatgcagagaaagagaacgctgatggtggagaatatgtagaaagcttaaataaacagcttagcatgacggaagaagagattgcagatgtagatgacgatagcggcggtgaaggagaaaaaggtcttaacgcagcagaagcacttagagcacaagtgaacgcagaggtgcaaaagagtcaaacctcaagctcaagcagtagcagtggaagtagcagcggaagtgacagtgatggtcgtagcaaaagcgtaagcagcggaagtggcagcggcggccaaagcagtagtggaagcagtagccgtggaagtggaggaagtgacgatgaagatgaagtcaactccgtataacaaccagctcccaacaactttgtcaaacaatatttccatatttgagacactttgtctgaataatttggttgaagaatccaaaagggtaaaaatttatgttttactacgaaagtagtaaatacaaatgatataaagatccagttac

SEQ ID NO: 2573 - protein, 326 aa, Arabidopsis thaliana
  peptide (1)..(326): Ceres Seq. ID no. 12488425
  misc_feature (226)..(314): Pfam Name: Pfam Description:  Lipoprotein amino terminal region
  misc_feature (1)..(326): NCBI GI NO: 18409756 NR Description: expressed protein; protein id: At1g71080
  misc_feature (1)..(321): NCBI GI NO: 34914534 NR Description: OSJNBa0094H06.13
  misc_feature (1)..(288): NCBI GI NO: 15240826 NR Description: putative protein; protein id: At5g38050.1
  misc_feature (159)..(320): NCBI GI NO: 15240826 NR Description: putative protein; protein id: At5g38050.1
  misc_feature (20)..(116): NCBI GI NO: 20129745 NR Description: CG11166-PD [Drosophila melanogaster]
  misc_feature (242)..(300): NCBI GI NO: 20129745 NR Description: CG11166-PD [Drosophila melanogaster]
  misc_feature (21)..(243): NCBI GI NO: 21361796 NR Description: ELL-associated factor 2
  misc_feature (223)..(326): NCBI GI NO: 21357919 NR Description: CG5516-PA [Drosophila melanogaster]
  misc_feature (168)..(321): NCBI GI NO: 39979238 NR Description: putative protein [Neurospora crassa]
MSNHSRDEPSTAPKTDQWYDLVLGSSAKDDSSHKFCTLRYEFKPASIDKNRSGSMHKKKDNRVSVEFQNNQPGKPKVTFEGSSEDYKESDAVLFFDGEKFRLERLHRAVTQLRHVRTPGESAAASQSAVPVEHRLSPVGRAAKSPQVNRSLLPDVPVEVERIEIGKPENSAEPANTGNVPATSPVEDKNDDGDEHQEIDLVEIFGSFTPENDNAEKENADGGEYVESLNKQLSMTEEEIADVDDDSGGEGEKGLNAAEALRAQVNAEVQKSQTSSSSSSSGSSSGSDSDGRSKSVSSGSGSGGQSSSGSSSRGSGGSDDEDEVNSV

SEQ ID NO: 2574 - protein, 272 aa, Arabidopsis thaliana
  peptide (1)..(272): Ceres Seq. ID no. 12488426
  misc_feature (172)..(260): Pfam Name: Pfam Description:  Lipoprotein amino terminal region
  misc_feature (1)..(272): NCBI GI NO: 18409756 NR Description: expressed protein; protein id: At1g71080
  misc_feature (1)..(267): NCBI GI NO: 34914534 NR Description: OSJNBa0094H06.13
  misc_feature (1)..(234): NCBI GI NO: 15240826 NR Description: putative protein; protein id: At5g38050.1
  misc_feature (105)..(266): NCBI GI NO: 15240826 NR Description: putative protein; protein id: At5g38050.1
  misc_feature (1)..(62): NCBI GI NO: 20129745 NR Description: CG11166-PD [Drosophila melanogaster]
  misc_feature (188)..(246): NCBI GI NO: 20129745 NR Description: CG11166-PD [Drosophila melanogaster]
  misc_feature (1)..(189): NCBI GI NO: 21361796 NR Description: ELL-associated factor 2
  misc_feature (169)..(272): NCBI GI NO: 21357919 NR Description: CG5516-PA [Drosophila melanogaster]
  misc_feature (114)..(267): NCBI GI NO: 39979238 NR Description: putative protein [Neurospora crassa]
MHKKKDNRVSVEFQNNQPGKPKVTFEGSSEDYKESDAVLFFDGEKFRLERLHRAVTQLRHVRTPGESAAASQSAVPVEHRLSPVGRAAKSPQVNRSLLPDVPVEVERIEIGKPENSAEPANTGNVPATSPVEDKNDDGDEHQEIDLVEIFGSFTPENDNAEKENADGGEYVESLNKQLSMTEEEIADVDDDSGGEGEKGLNAAEALRAQVNAEVQKSQTSSSSSSSGSSSGSDSDGRSKSVSSGSGSGGQSSSGSSSRGSGGSDDEDEVNSV

SEQ ID NO: 2575 - DNA, 1142 bp, Arabidopsis thaliana
  misc_feature (1)..(1142): Ceres Seq. ID no. 13492937
aagcacttcactctctaatttccttctctctatctctcaccatattcgcgattaaaaactctcaacttttctctcaaatttctgatcctttgatccaacagttagaagaagattcatctgatcatggccctcgaagcgatgaacactccaacttcttctttcaccagaatcgaaacgaaagaagatttgatgaacgacgccgttttcattgagccgtggcttaaacgcaaacgctccaaacgtcagcgttctcacagcccttcttcgtcttcttcctcaccgcctcgatctcgacccaaatcccagaatcaagatcttacggaagaagagtatctcgctctttgtctcctcatgctcgctaaagatcaaccgtcgcaaacgcgatttcatcaacagtcgcaatcgttaacgccgccgccagaatcaaagaaccttccgtacaagtgtaacgtctgtgaaaaagcgtttccttcctatcaggctttaggcggtcacaaagcaagtcaccgaatcaaaccaccaaccgtaatctcaacaactgccgatgattcaacagctccgaccatctccatcgtcgccggagaaaaacatccgattgctgcctccggaaagatccacgagtgttcaatctgtcataaagtgtttccgacgggtcaagctttaggcggtcacaaacgttgtcactacgaaggcaacctcggcggcggaggaggaggaggaagcaaatcaatcagtcacagtggaagcgtgtcgagcacggtatcggaagaaaggagccaccgtggattcatcgatctaaacctaccggcgttacctgaactcagccttcatcacaatccaatcgtcgacgaagagatcttgagtccgttgaccggtaaaaaaccgcttttgttgaccgatcacgaccaagtcatcaagaaagaagatttatctttaaaaatctaatactcgactattaattcttgtgttttcattttcatttttttagttacaaatttttaattgttctgatttggattgaatattggtatattgttagggattgatacaaaaatttgatgattgattaagtcagaatttctttttaattatggtaactaatctcttgatcagtccactctgtataaatattgcgtggcatt

SEQ ID NO: 2576 - protein, 273 aa, Arabidopsis thaliana
  peptide (1)..(273): Ceres Seq. ID no. 13492938
  misc_feature (165)..(187): Pfam Name: Pfam Description:  Zinc finger, C2H2 type
  misc_feature (1)..(273): NCBI GI NO: 15230889 NR Description: zinc finger protein -related
  misc_feature (1)..(256): NCBI GI NO: 439493 NR Description: zinc-finger protein [Petunia x hybrida]
  misc_feature (21)..(256): NCBI GI NO: 7228329 NR Description: putative TFIIIA
  misc_feature (48)..(253): NCBI GI NO: 15237692 NR Description: c2h2 zinc finger transcription factor -related
  misc_feature (48)..(253): NCBI GI NO: 26452746 NR Description: putative C2H2 zinc finger transcription factor
  misc_feature (55)..(254): NCBI GI NO: 6693033 NR Description: T22C5.18 [Arabidopsis thaliana]
  misc_feature (55)..(254): NCBI GI NO: 15217692 NR Description: salt-tolerance zinc finger protein
  misc_feature (1)..(256): NCBI GI NO: 33331578 NR Description: zinc finger protein [Capsicum annuum]
  misc_feature (55)..(254): NCBI GI NO: 1418323 NR Description: zinc finger protein [Arabidopsis thaliana]
  misc_feature (46)..(257): NCBI GI NO: 4666360 NR Description: zinc-finger protein 1 [Datisca glomerata]
MALEAMNTPTSSFTRIETKEDLMNDAVFIEPWLKRKRSKRQRSHSPSSSSSSPPRSRPKSQNQDLTEEEYLALCLLMLAKDQPSQTRFHQQSQSLTPPPESKNLPYKCNVCEKAFPSYQALGGHKASHRIKPPTVISTTADDSTAPTISIVAGEKHPIAASGKIHECSICHKVFPTGQALGGHKRCHYEGNLGGGGGGGSKSISHSGSVSSTVSEERSHRGFIDLNLPALPELSLHHNPIVDEEILSPLTGKKPLLLTDHDQVIKKEDLSLKI

SEQ ID NO: 2577 - protein, 268 aa, Arabidopsis thaliana
  peptide (1)..(268): Ceres Seq. ID no. 13492939
  misc_feature (160)..(182): Pfam Name: Pfam Description:  Zinc finger, C2H2 type
  misc_feature (1)..(268): NCBI GI NO: 15230889 NR Description: zinc finger protein -related
  misc_feature (1)..(251): NCBI GI NO: 439493 NR Description: zinc-finger protein [Petunia x hybrida]
  misc_feature (16)..(251): NCBI GI NO: 7228329 NR Description: putative TFIIIA
  misc_feature (43)..(248): NCBI GI NO: 15237692 NR Description: c2h2 zinc finger transcription factor -related
  misc_feature (43)..(248): NCBI GI NO: 26452746 NR Description: putative C2H2 zinc finger transcription factor
  misc_feature (50)..(249): NCBI GI NO: 6693033 NR Description: T22C5.18 [Arabidopsis thaliana]
  misc_feature (50)..(249): NCBI GI NO: 15217692 NR Description: salt-tolerance zinc finger protein
  misc_feature (1)..(251): NCBI GI NO: 33331578 NR Description: zinc finger protein [Capsicum annuum]
  misc_feature (50)..(249): NCBI GI NO: 1418323 NR Description: zinc finger protein [Arabidopsis thaliana]
  misc_feature (41)..(252): NCBI GI NO: 4666360 NR Description: zinc-finger protein 1 [Datisca glomerata]
MNTPTSSFTRIETKEDLMNDAVFIEPWLKRKRSKRQRSHSPSSSSSSPPRSRPKSQNQDLTEEEYLALCLLMLAKDQPSQTRFHQQSQSLTPPPESKNLPYKCNVCEKAFPSYQALGGHKASHRIKPPTVISTTADDSTAPTISIVAGEKHPIAASGKIHECSICHKVFPTGQALGGHKRCHYEGNLGGGGGGGSKSISHSGSVSSTVSEERSHRGFIDLNLPALPELSLHHNPIVDEEILSPLTGKKPLLLTDHDQVIKKEDLSLKI

SEQ ID NO: 2578 - protein, 251 aa, Arabidopsis thaliana
  peptide (1)..(251): Ceres Seq. ID no. 13492940
  misc_feature (143)..(165): Pfam Name: Pfam Description:  Zinc finger, C2H2 type
  misc_feature (1)..(251): NCBI GI NO: 15230889 NR Description: zinc finger protein -related
  misc_feature (1)..(234): NCBI GI NO: 439493 NR Description: zinc-finger protein [Petunia x hybrida]
  misc_feature (1)..(234): NCBI GI NO: 7228329 NR Description: putative TFIIIA
  misc_feature (26)..(231): NCBI GI NO: 15237692 NR Description: c2h2 zinc finger transcription factor -related
  misc_feature (26)..(231): NCBI GI NO: 26452746 NR Description: putative C2H2 zinc finger transcription factor
  misc_feature (33)..(232): NCBI GI NO: 6693033 NR Description: T22C5.18 [Arabidopsis thaliana]
  misc_feature (33)..(232): NCBI GI NO: 15217692 NR Description: salt-tolerance zinc finger protein
  misc_feature (1)..(234): NCBI GI NO: 33331578 NR Description: zinc finger protein [Capsicum annuum]
  misc_feature (33)..(232): NCBI GI NO: 1418323 NR Description: zinc finger protein [Arabidopsis thaliana]
  misc_feature (24)..(235): NCBI GI NO: 4666360 NR Description: zinc-finger protein 1 [Datisca glomerata]
MNDAVFIEPWLKRKRSKRQRSHSPSSSSSSPPRSRPKSQNQDLTEEEYLALCLLMLAKDQPSQTRFHQQSQSLTPPPESKNLPYKCNVCEKAFPSYQALGGHKASHRIKPPTVISTTADDSTAPTISIVAGEKHPIAASGKIHECSICHKVFPTGQALGGHKRCHYEGNLGGGGGGGSKSISHSGSVSSTVSEERSHRGFIDLNLPALPELSLHHNPIVDEEILSPLTGKKPLLLTDHDQVIKKEDLSLKI

SEQ ID NO: 2579 - DNA, 1126 bp, Arabidopsis thaliana
  misc_feature (1)..(1126): Ceres Seq. ID no. 12396454
acattgcaacactttctacaaaaacaagatgaagattgcaaagttttctgttctactcttgcttttatttattttccccgtggcattagcgcagctgaaatttaagttttacagtgaatcgtgccctaatgcagagactatcgtagaaaacctggttcgccagcagtttgctcgtgacccttcaatcacggccgccttgactcgtatgcattttcacgactgttttgtccagggctgcgcacgcttctctcctcatagacccaacgacgtctcaactatcggaaaaaaacgccggcccaaactttagcgtgagagggttcgagctgatcgacgagatcaagacggcactcgaagctcaatgtccctctacggtctcgtgctccgatatagtcacgctcgccacacgtgacgccgtgttcttaggtggaggaccaagctacgtggtccccaccggacgtcgcgatggctttgtgtcgaatcctgaagacgccaatgagatcctccctccaccattcatatccgtcgaaggcatgttaagttttttcggcaacaaaggaatgaatgtttttgattccgtagctcttttgggggcgcacacggttgggatcgcgtcttgtggtaattttgtggaccgggtcacgaactttcaaggaaccggactgcccgacccatccatggaccccactttggctggcaggctaaggaacacatgtgcggttccaggcggcttcgcggcactggaccagtcgatgccagtaacgccggtctcattcgacaacttgttctttggtcagatcagagagaggaaaggaattttgcttattgaccaactgatcgcaagcgacccggccacttctggtgttgtacttcagtatgcgtccaacaacgaactattcaaacgtcagttcgcaatcgcaatggtgaagatgggagccgttgacgtgcttaccggttcagctggtgagatcaggacgaattgtagagcattcaactaaagctttataacaagtttctatatctgattattgattgtttttcccttaatttccgcttctgatgatgaattgtgaatggtgattgtttgcctatatatgtatgtacgtatatctttaaaataaggtttggc

SEQ ID NO: 2580 - protein, 154 aa, Arabidopsis thaliana
  peptide (1)..(154): Ceres Seq. ID no. 12396455
  misc_feature (1)..(118): Pfam Name: Pfam Description:  Peroxidase
  misc_feature (1)..(154): NCBI GI NO: 21593692 NR Description: putative peroxidase [Arabidopsis thaliana]
  misc_feature (1)..(154): NCBI GI NO: 15228606 NR Description: peroxidase, putative; protein id: At3g03670
  misc_feature (1)..(154): NCBI GI NO: 15238030 NR Description: peroxidase, putative; protein id: At5g17820
  misc_feature (1)..(154): NCBI GI NO: 21593467 NR Description: peroxidase ATP13a [Arabidopsis thaliana]
  misc_feature (1)..(154): NCBI GI NO: 18416663 NR Description: peroxidase, putative; protein id: At4g26010
  misc_feature (1)..(154): NCBI GI NO: 7433094 NR Description: peroxidase homolog F20B18
  misc_feature (1)..(154): NCBI GI NO: 15218665 NR Description: peroxidase, putative; protein id: At1g34510.1
  misc_feature (1)..(154): NCBI GI NO: 21593262 NR Description: peroxidase [Arabidopsis thaliana]
  misc_feature (1)..(154): NCBI GI NO: 15240140 NR Description: peroxidase, putative; protein id: At5g06720
  misc_feature (1)..(154): NCBI GI NO: 5002348 NR Description: peroxidase 5 precursor [Phaseolus vulgaris]
MLSFFGNKGMNVFDSVALLGAHTVGIASCGNFVDRVTNFQGTGLPDPSMDPTLAGRLRNTCAVPGGFAALDQSMPVTPVSFDNLFFGQIRERKGILLIDQLIASDPATSGVVLQYASNNELFKRQFAIAMVKMGAVDVLTGSAGEIRTNCRAFN

SEQ ID NO: 2581 - protein, 145 aa, Arabidopsis thaliana
  peptide (1)..(145): Ceres Seq. ID no. 12396456
  misc_feature (1)..(109): Pfam Name: Pfam Description:  Peroxidase
  misc_feature (1)..(145): NCBI GI NO: 21593692 NR Description: putative peroxidase [Arabidopsis thaliana]
  misc_feature (1)..(145): NCBI GI NO: 15228606 NR Description: peroxidase, putative; protein id: At3g03670
  misc_feature (1)..(145): NCBI GI NO: 15238030 NR Description: peroxidase, putative; protein id: At5g17820
  misc_feature (1)..(145): NCBI GI NO: 21593467 NR Description: peroxidase ATP13a [Arabidopsis thaliana]
  misc_feature (1)..(145): NCBI GI NO: 18416663 NR Description: peroxidase, putative; protein id: At4g26010
  misc_feature (1)..(145): NCBI GI NO: 7433094 NR Description: peroxidase homolog F20B18
  misc_feature (1)..(145): NCBI GI NO: 15218665 NR Description: peroxidase, putative; protein id: At1g34510.1
  misc_feature (1)..(145): NCBI GI NO: 21593262 NR Description: peroxidase [Arabidopsis thaliana]
  misc_feature (1)..(145): NCBI GI NO: 15240140 NR Description: peroxidase, putative; protein id: At5g06720
  misc_feature (1)..(145): NCBI GI NO: 5002348 NR Description: peroxidase 5 precursor [Phaseolus vulgaris]
MNVFDSVALLGAHTVGIASCGNFVDRVTNFQGTGLPDPSMDPTLAGRLRNTCAVPGGFAALDQSMPVTPVSFDNLFFGQIRERKGILLIDQLIASDPATSGVVLQYASNNELFKRQFAIAMVKMGAVDVLTGSAGEIRTNCRAFN

SEQ ID NO: 2582 - protein, 106 aa, Arabidopsis thaliana
  peptide (1)..(106): Ceres Seq. ID no. 12396457
  misc_feature (1)..(70): Pfam Name: Pfam Description:  Peroxidase
  misc_feature (1)..(106): NCBI GI NO: 21593692 NR Description: putative peroxidase [Arabidopsis thaliana]
  misc_feature (1)..(106): NCBI GI NO: 15228606 NR Description: peroxidase, putative; protein id: At3g03670
  misc_feature (1)..(106): NCBI GI NO: 15238030 NR Description: peroxidase, putative; protein id: At5g17820
  misc_feature (1)..(106): NCBI GI NO: 21593467 NR Description: peroxidase ATP13a [Arabidopsis thaliana]
  misc_feature (1)..(106): NCBI GI NO: 18416663 NR Description: peroxidase, putative; protein id: At4g26010
  misc_feature (1)..(106): NCBI GI NO: 7433094 NR Description: peroxidase homolog F20B18
  misc_feature (1)..(106): NCBI GI NO: 15218665 NR Description: peroxidase, putative; protein id: At1g34510.1
  misc_feature (1)..(106): NCBI GI NO: 21593262 NR Description: peroxidase [Arabidopsis thaliana]
  misc_feature (1)..(106): NCBI GI NO: 15240140 NR Description: peroxidase, putative; protein id: At5g06720
  misc_feature (1)..(106): NCBI GI NO: 5002348 NR Description: peroxidase 5 precursor [Phaseolus vulgaris]
MDPTLAGRLRNTCAVPGGFAALDQSMPVTPVSFDNLFFGQIRERKGILLIDQLIASDPATSGVVLQYASNNELFKRQFAIAMVKMGAVDVLTGSAGEIRTNCRAFN

SEQ ID NO: 2583 - DNA, 1881 bp, Arabidopsis thaliana
  misc_feature (1)..(1881): Ceres Seq. ID no. 12330296
aatcgccagtgtttacgaaagttcttgaaatttgaagagatctcacagatgagaagtgctataggaagaagattctcaaaccctaatggcttcaccattgcatccttagtcaaacaaactccatttctcacccaatccacatctcatttctcctcttcctccgactcctccggccgtggtcgtggacgcggttccggtgaagatggaggatttcccgccgctggaagaggacaattcggtgtaaatcgtgaaccggtggttcctggacgtgaaccgtcatctgccggaggttatggtcatggtcgtggtcgtccgatccaatctgattcgatttctcctgcgtttacgtcatttgtcaaatcagattctcctagtattggccgtggaagaggatccgttggatcagacaccgtttcacctttcgctgctgaacctcctcgccaatcgccgcctccaccgcagcaacaacagtctcaatcgcagcaacagcgttcacaaccacaacagcagcagccgcgttcgcaaccacagcagcagcctaatgatgaatctcagggaagtcctgtatttgtgaagctgcaggagatgcaggacgcaacttcgtctccaccaccaccagagtctaaacctggtcaagctgatccacctgataacatattcaatgcattaggaaacgaattttcacatcctagtggagcaggtcgaggaaagcctcttgtggaatctgctccaatccgacaagaagataaccgccaaattcgacgccctccgcctccaccgcagcagcagagagtacaacctcagcagaagcgggctccaacggtcaaagatggaactcctaagccgcaattgagtgcggaagaggctggaagaagagcaaggagtgagctttcgcgtggtgaagctgaaggaagcagtgtgggaggaagaggagggagagggagagggagaggaagaggagcaagagggagaggcagaggaagaggtggtgatggatggagagatgataagaaagaagaagaaggtgaacaagaggctatgcgtatatttgctggagattcagctgatggagagaagtttgctgagaaaatgggacctgaattgatgaaaacgcttgcggaaggttttgaggaaatttgcgaaaaggcgttgccttctactactcacgatgccattatagatgcttatgataccaatctcatgattgagtgtgagcctgaatacattatgccagactttggatcaaatcctgacattgatgagaaaccaccaatgtctctgcgtgagtgccttgagaaggtgaagcctttcatagtggcttacgaaggaatcaaggatcaagaagaatgggaggaagcaattaatgaagcgatgacacaggctccccttatgaaagagattgttgatcactacagtggtcctgatcgtgtaactgctaagaaacagaacgaggaactcgatagaattgctacaacgcttcccgcaagtgcacctgattccgtgaaacgatttgcagatcgtgcagctcttactcttaagagtaatccaggttggggatttgataagaaataccagttcatggacaagctcgttttagaggtgtcacaaagctacaaatagagaactcaggtttcaaacttcttaaaaaacttcatcgccggttgagtttatagatcgtactctagatcttgcctctacttaaaacggtacccatttcttttgaactagtactcaaaatttgggcgttagctttttcgtcatacgttttgagggtttccgtaataacggcattgttctttcgatctttgttactgaggagattgtattgtatcccttttcatcaatgggttattaagggtttaagcctgtttttggatgtgt

SEQ ID NO: 2584 - protein, 539 aa, Arabidopsis thaliana
  peptide (1)..(539): Ceres Seq. ID no. 12330297
  misc_feature (58)..(343): Pfam Name: Pfam Description:  High molecular weight glutenin subunit
  misc_feature (1)..(539): NCBI GI NO: 8671859 NR Description: Contains similarity to RNA-binding protein from Arabidopsisthaliana gi|2129727 and
  misc_feature (17)..(539): NCBI GI NO: 18404554 NR Description: Expressed protein; protein id: At1g53645
  misc_feature (17)..(539): NCBI GI NO: 21593693 NR Description: Contains similarity to RNA-binding protein from Arabidopsisthaliana gi|2129727 and
  misc_feature (62)..(311): NCBI GI NO: 19071871 NR Description: Nadrin-102 [Rattus norvegicus]
  misc_feature (62)..(311): NCBI GI NO: 13702292 NR Description: Nadrin E1 [Rattus norvegicus]
  misc_feature (62)..(273): NCBI GI NO: 11560044 NR Description: nadrin; neuron-specific GTPase activating protein
  misc_feature (62)..(273): NCBI GI NO: 13702294 NR Description: Nadrin E2 [Rattus norvegicus]
  misc_feature (290)..(346): NCBI GI NO: 18410994 NR Description: expressed protein; protein id: At1g76010
  misc_feature (58)..(104): NCBI GI NO: 18410994 NR Description: expressed protein; protein id: At1g76010
  misc_feature (290)..(346): NCBI GI NO: 25404999 NR Description: protein T4O12.22 [imported] - Arabidopsis thaliana
NRQCLRKFLKFEEISQMRSAIGRRFSNPNGFTIASLVKQTPFLTQSTSHFSSSSDSSGRGRGRGSGEDGGFPAAGRGQFGVNREPVVPGREPSSAGGYGHGRGRPIQSDSISPAFTSFVKSDSPSIGRGRGSVGSDTVSPFAAEPPRQSPPPPQQQQSQSQQQRSQPQQQQPRSQPQQQPNDESQGSPVFVKLQEMQDATSSPPPPESKPGQADPPDNIFNALGNEFSHPSGAGRGKPLVESAPIRQEDNRQIRRPPPPPQQQRVQPQQKRAPTVKDGTPKPQLSAEEAGRRARSELSRGEAEGSSVGGRGGRGRGRGRGARGRGRGRGGDGWRDDKKEEEGEQEAMRIFAGDSADGEKFAEKMGPELMKTLAEGFEEICEKALPSTTHDAIIDAYDTNLMIECEPEYIMPDFGSNPDIDEKPPMSLRECLEKVKPFIVAYEGIKDQEEWEEAINEAMTQAPLMKEIVDHYSGPDRVTAKKQNEELDRIATTLPASAPDSVKRFADRAALTLKSNPGWGFDKKYQFMDKLVLEVSQSYK

SEQ ID NO: 2585 - protein, 523 aa, Arabidopsis thaliana
  peptide (1)..(523): Ceres Seq. ID no. 12330298
  misc_feature (42)..(327): Pfam Name: Pfam Description:  High molecular weight glutenin subunit
  misc_feature (1)..(523): NCBI GI NO: 8671859 NR Description: Contains similarity to RNA-binding protein from Arabidopsisthaliana gi|2129727 and
  misc_feature (1)..(523): NCBI GI NO: 18404554 NR Description: Expressed protein; protein id: At1g53645
  misc_feature (1)..(523): NCBI GI NO: 21593693 NR Description: Contains similarity to RNA-binding protein from Arabidopsisthaliana gi|2129727 and
  misc_feature (46)..(295): NCBI GI NO: 19071871 NR Description: Nadrin-102 [Rattus norvegicus]
  misc_feature (46)..(295): NCBI GI NO: 13702292 NR Description: Nadrin E1 [Rattus norvegicus]
  misc_feature (46)..(257): NCBI GI NO: 11560044 NR Description: nadrin; neuron-specific GTPase activating protein
  misc_feature (46)..(257): NCBI GI NO: 13702294 NR Description: Nadrin E2 [Rattus norvegicus]
  misc_feature (274)..(330): NCBI GI NO: 18410994 NR Description: expressed protein; protein id: At1g76010
  misc_feature (42)..(88): NCBI GI NO: 18410994 NR Description: expressed protein; protein id: At1g76010
  misc_feature (274)..(330): NCBI GI NO: 25404999 NR Description: protein T4O12.22 [imported] - Arabidopsis thaliana
MRSAIGRRFSNPNGFTIASLVKQTPFLTQSTSHFSSSSDSSGRGRGRGSGEDGGFPAAGRGQFGVNREPVVPGREPSSAGGYGHGRGRPIQSDSISPAFTSFVKSDSPSIGRGRGSVGSDTVSPFAAEPPRQSPPPPQQQQSQSQQQRSQPQQQQPRSQPQQQPNDESQGSPVFVKLQEMQDATSSPPPPESKPGQADPPDNIFNALGNEFSHPSGAGRGKPLVESAPIRQEDNRQIRRPPPPPQQQRVQPQQKRAPTVKDGTPKPQLSAEEAGRRARSELSRGEAEGSSVGGRGGRGRGRGRGARGRGRGRGGDGWRDDKKEEEGEQEAMRIFAGDSADGEKFAEKMGPELMKTLAEGFEEICEKALPSTTHDAIIDAYDTNLMIECEPEYIMPDFGSNPDIDEKPPMSLRECLEKVKPFIVAYEGIKDQEEWEEAINEAMTQAPLMKEIVDHYSGPDRVTAKKQNEELDRIATTLPASAPDSVKRFADRAALTLKSNPGWGFDKKYQFMDKLVLEVSQSYK

SEQ ID NO: 2586 - protein, 344 aa, Arabidopsis thaliana
  peptide (1)..(344): Ceres Seq. ID no. 12330299
  misc_feature (1)..(148): Pfam Name: Pfam Description:  High molecular weight glutenin subunit
  misc_feature (1)..(344): NCBI GI NO: 8671859 NR Description: Contains similarity to RNA-binding protein from Arabidopsisthaliana gi|2129727 and
  misc_feature (1)..(344): NCBI GI NO: 18404554 NR Description: Expressed protein; protein id: At1g53645
  misc_feature (1)..(344): NCBI GI NO: 21593693 NR Description: Contains similarity to RNA-binding protein from Arabidopsisthaliana gi|2129727 and
  misc_feature (1)..(116): NCBI GI NO: 19071871 NR Description: Nadrin-102 [Rattus norvegicus]
  misc_feature (1)..(116): NCBI GI NO: 13702292 NR Description: Nadrin E1 [Rattus norvegicus]
  misc_feature (1)..(78): NCBI GI NO: 11560044 NR Description: nadrin; neuron-specific GTPase activating protein
  misc_feature (1)..(78): NCBI GI NO: 13702294 NR Description: Nadrin E2 [Rattus norvegicus]
  misc_feature (95)..(151): NCBI GI NO: 18410994 NR Description: expressed protein; protein id: At1g76010
  misc_feature (95)..(151): NCBI GI NO: 25404999 NR Description: protein T4O12.22 [imported] - Arabidopsis thaliana
  misc_feature (1)..(88): NCBI GI NO: 23480318 NR Description: Drosop hila melanogaster CG8797 gene product-related
MQDATSSPPPPESKPGQADPPDNIFNALGNEFSHPSGAGRGKPLVESAPIRQEDNRQIRRPPPPPQQQRVQPQQKRAPTVKDGTPKPQLSAEEAGRRARSELSRGEAEGSSVGGRGGRGRGRGRGARGRGRGRGGDGWRDDKKEEEGEQEAMRIFAGDSADGEKFAEKMGPELMKTLAEGFEEICEKALPSTTHDAIIDAYDTNLMIECEPEYIMPDFGSNPDIDEKPPMSLRECLEKVKPFIVAYEGIKDQEEWEEAINEAMTQAPLMKEIVDHYSGPDRVTAKKQNEELDRIATTLPASAPDSVKRFADRAALTLKSNPGWGFDKKYQFMDKLVLEVSQSYK

SEQ ID NO: 2587 - DNA, 1603 bp, Arabidopsis thaliana
  misc_feature (1)..(1603): Ceres Seq. ID no. 12335449
acttctactgtatcaagaagctccgttttgcttagccatagtgcgtctagggtttggttggtgggaagaaggttccgatcatggcgtcggtgtcgtcgtcggatcaaggacctaagacagaagcaggatgtagcggcggaggaggaggagagagctcggagacagtggcggcgagtgatcagatgttgttgtatagaggttttaagaaggcgaagaaggagagaggttgtacagctaaggagcgtattagtaaaatgcctccgtgcactgctggaaaaaggagttccatataccggggagtcaccagacatagatggacaggtcgttatgaagctcacctttgggataagagtacctggaaccaaaaccagaacaagaagggaaaacaagtttatctaggagcatatgatgatgaagaggctgctgctagagcttacgaccttgctgccttaaaatattggggtcctgggacacttataaattttccggtgactgattataccagggatttagaagaaatgcaaaatctctcaagggaagaataccttgcatctttacgtagaaaaagcagcggtttctctaggggaatagcgaaatatcgtggacttcaaagccgatgggacgcatcagccagtcgtatgcctggacctgaatacttcagtaacattcattacggggcaggtgatgatcgtggaacagaaggtgactttctaggtagcttttgtctggaaagaaagattgatctaacaggatacataaagtggtggggagccaacaagaaccgtcaaccagaatcttcatcaaaagcatcagaggatgcaaacgtcgaagatgctggtactgagcttaaaacactggaacacacatcccatgcaacagaaccatacaaggcgccaaaccttggcgtccttcgtggaactcagagaaaagaaaaagaaatatcatcaccatcaagctcttctgctttaagcatcttgtctcagtcgcctgccttcaagagcctagaggagaaagtgttgaagatccaagaaagctgcaataatgaaaacgatgagaatgcaaaccgtaacatcatcaatatggagaagtataacggcaaggcaatagagaaaccagttgtgagtcatggagttgctttaggcggtgctgctgctttgtctcttcagaaaagcatgtacccacttacctctctcttaacggctccattgctcaccaactacaatacattggatcctcttgcagaccctattctctggacaccatttcttccttcaggatcctctcttacttcagaggtgacaaagacagagaccagctgttccacgtacagctacctcccacaagagaaatgagccgttccctttagactttatgtatgccagattctccttttttgagatgaattcgtcgacttgacatctctttgtctcttttatggagaaaaagttgggaaaagtgtgacaatggtctgaagcaggaatgtacaggttttgttagtggttgtgtttttttttttttttccagtgtggaatatagaatcatgatattttgtgtaaaacagaaaaaagttatcattatagtatagaagtttgctcttaatatc

SEQ ID NO: 2588 - protein, 423 aa, Arabidopsis thaliana
  peptide (1)..(423): Ceres Seq. ID no. 12335450
  misc_feature (68)..(141): Pfam Name: Pfam Description:  AP2 domain
  misc_feature (1)..(423): NCBI GI NO: 21593696 NR Description: putative AP2 domain transcription factor
  misc_feature (1)..(423): NCBI GI NO: 18405784 NR Description: putative AP2 domain transcription factor
  misc_feature (1)..(423): NCBI GI NO: 30688760 NR Description: ovule development protein, putative
  misc_feature (1)..(423): NCBI GI NO: 26452593 NR Description: putative AP2 domain transcription factor
  misc_feature (1)..(423): NCBI GI NO: 25408750 NR Description: probable AP2 domain transcription factor
  misc_feature (13)..(192): NCBI GI NO: 15232481 NR Description: aintegumaenta-like protein; protein id: At3g54320
  misc_feature (23)..(199): NCBI GI NO: 26449695 NR Description: unknown protein [Arabidopsis thaliana]
  misc_feature (52)..(192): NCBI GI NO: 18394319 NR Description: ovule development protein, putative
  misc_feature (23)..(187): NCBI GI NO: 34221733 NR Description: putative AP2 domain transcription factor
  misc_feature (52)..(192): NCBI GI NO: 25518475 NR Description: hypothetical protein T24D18
MASVSSSDQGPKTEAGCSGGGGGESSETVAASDQMLLYRGFKKAKKERGCTAKERISKMPPCTAGKRSSIYRGVTRHRWTGRYEAHLWDKSTWNQNQNKKGKQVYLGAYDDEEAAARAYDLAALKYWGPGTLINFPVTDYTRDLEEMQNLSREEYLASLRRKSSGFSRGIAKYRGLQSRWDASASRMPGPEYFSNIHYGAGDDRGTEGDFLGSFCLERKIDLTGYIKWWGANKNRQPESSSKASEDANVEDAGTELKTLEHTSHATEPYKAPNLGVLRGTQRKEKEISSPSSSSALSILSQSPAFKSLEEKVLKIQESCNNENDENANRNIINMEKYNGKAIEKPVVSHGVALGGAAALSLQKSMYPLTSLLTAPLLTNYNTLDPLADPILWTPFLPSGSSLTSEVTKTETSCSTYSYLPQEK

SEQ ID NO: 2589 - protein, 389 aa, Arabidopsis thaliana
  peptide (1)..(389): Ceres Seq. ID no. 12335451
  misc_feature (34)..(107): Pfam Name: Pfam Description:  AP2 domain
  misc_feature (1)..(389): NCBI GI NO: 21593696 NR Description: putative AP2 domain transcription factor
  misc_feature (1)..(389): NCBI GI NO: 18405784 NR Description: putative AP2 domain transcription factor
  misc_feature (1)..(389): NCBI GI NO: 30688760 NR Description: ovule development protein, putative
  misc_feature (1)..(389): NCBI GI NO: 26452593 NR Description: putative AP2 domain transcription factor
  misc_feature (1)..(389): NCBI GI NO: 25408750 NR Description: probable AP2 domain transcription factor
  misc_feature (1)..(158): NCBI GI NO: 15232481 NR Description: aintegumaenta-like protein; protein id: At3g54320
  misc_feature (1)..(165): NCBI GI NO: 26449695 NR Description: unknown protein [Arabidopsis thaliana]
  misc_feature (18)..(158): NCBI GI NO: 18394319 NR Description: ovule development protein, putative
  misc_feature (1)..(153): NCBI GI NO: 34221733 NR Description: putative AP2 domain transcription factor
  misc_feature (18)..(158): NCBI GI NO: 25518475 NR Description: hypothetical protein T24D18
MLLYRGFKKAKKERGCTAKERISKMPPCTAGKRSSIYRGVTRHRWTGRYEAHLWDKSTWNQNQNKKGKQVYLGAYDDEEAAARAYDLAALKYWGPGTLINFPVTDYTRDLEEMQNLSREEYLASLRRKSSGFSRGIAKYRGLQSRWDASASRMPGPEYFSNIHYGAGDDRGTEGDFLGSFCLERKIDLTGYIKWWGANKNRQPESSSKASEDANVEDAGTELKTLEHTSHATEPYKAPNLGVLRGTQRKEKEISSPSSSSALSILSQSPAFKSLEEKVLKIQESCNNENDENANRNIINMEKYNGKAIEKPVVSHGVALGGAAALSLQKSMYPLTSLLTAPLLTNYNTLDPLADPILWTPFLPSGSSLTSEVTKTETSCSTYSYLPQEK

SEQ ID NO: 2590 - protein, 365 aa, Arabidopsis thaliana
  peptide (1)..(365): Ceres Seq. ID no. 12335452
  misc_feature (10)..(83): Pfam Name: Pfam Description:  AP2 domain
  misc_feature (1)..(365): NCBI GI NO: 21593696 NR Description: putative AP2 domain transcription factor
  misc_feature (1)..(365): NCBI GI NO: 18405784 NR Description: putative AP2 domain transcription factor
  misc_feature (1)..(365): NCBI GI NO: 30688760 NR Description: ovule development protein, putative
  misc_feature (1)..(365): NCBI GI NO: 26452593 NR Description: putative AP2 domain transcription factor
  misc_feature (1)..(365): NCBI GI NO: 25408750 NR Description: probable AP2 domain transcription factor
  misc_feature (1)..(134): NCBI GI NO: 15232481 NR Description: aintegumaenta-like protein; protein id: At3g54320
  misc_feature (1)..(141): NCBI GI NO: 26449695 NR Description: unknown protein [Arabidopsis thaliana]
  misc_feature (1)..(134): NCBI GI NO: 18394319 NR Description: ovule development protein, putative
  misc_feature (1)..(129): NCBI GI NO: 34221733 NR Description: putative AP2 domain transcription factor
  misc_feature (1)..(134): NCBI GI NO: 25518475 NR Description: hypothetical protein T24D18
MPPCTAGKRSSIYRGVTRHRWTGRYEAHLWDKSTWNQNQNKKGKQVYLGAYDDEEAAARAYDLAALKYWGPGTLINFPVTDYTRDLEEMQNLSREEYLASLRRKSSGFSRGIAKYRGLQSRWDASASRMPGPEYFSNIHYGAGDDRGTEGDFLGSFCLERKIDLTGYIKWWGANKNRQPESSSKASEDANVEDAGTELKTLEHTSHATEPYKAPNLGVLRGTQRKEKEISSPSSSSALSILSQSPAFKSLEEKVLKIQESCNNENDENANRNIINMEKYNGKAIEKPVVSHGVALGGAAALSLQKSMYPLTSLLTAPLLTNYNTLDPLADPILWTPFLPSGSSLTSEVTKTETSCSTYSYLPQEK

SEQ ID NO: 2591 - DNA, 850 bp, Arabidopsis thaliana
  misc_feature (1)..(850): Ceres Seq. ID no. 12738172
cgtatttggtcgtgcttgtgcaaatagggttgcagagataagcaaaccaggggagaaacagaaacctcttgagaaggatgcgggtgagaagactattgcatggctggacaggttgagaaactcaaacgggtctctacctacttcaactatcagattgaacatgcagaggattatgcagaacaacgcagctgtgttccgcacgcaagaaacattggaagaaggttgtcagttgattgacaaggcctgggaaagttttggggacgtccaggtgaaagatcggagtatgatatggaactcggatttgatagagacattggaactggagaaccttttgataaacgcatccataacaatgcattcagcagaagcacgaaaggaaagcagaggagcacatgctcgggaagacttcacgaaaagagaggatggagaatggatgaagcatacattgggatattgggaagatgagaaagtgagattggattataggcctgttcacatggacactctcgacgatgagatcgacactttccctcccaaagctcgtgtctattgatcgagcccatgtttttattttatctgttatcggaataataataataatcaggaaccccccaaaaaaagggaattaggagaagaagacggagttatgagctgatggagcacaaaggactgttctgaaactgggtttacgttttacaccagaaacgatgaaaataaattgatagaagaggaaaaaacactacaattcttattttctttatcagttcctgaaattgttacattctttgttacctgttaattacgccttggtgatattcatttttttttttaaatcaaaatgttcgaactc

SEQ ID NO: 2592 - protein, 183 aa, Arabidopsis thaliana
  peptide (1)..(183): Ceres Seq. ID no. 12738173
  misc_feature (51)..(183): Pfam Name: Pfam Description:  Fumarate reductase/ succinate dehydrogenase flavo protein C-terminaldomain
  misc_feature (1)..(183): NCBI GI NO: 15240075 NR Description: succinate dehydrogenase flavoprotein alpha subunit
  misc_feature (1)..(183): NCBI GI NO: 15224174 NR Description: putative succinate dehydrogenase flavoprotein subunit
  misc_feature (1)..(183): NCBI GI NO: 34394418 NR Description: putative succinate dehydrogenase flavoprotein alpha subunit
  misc_feature (1)..(183): NCBI GI NO: 21242816 NR Description: succinate dehydrogenase flavoprotein subunit
  misc_feature (1)..(183): NCBI GI NO: 15837674 NR Description: succinate dehydrogenase, flavoprotein subunit
  misc_feature (1)..(183): NCBI GI NO: 22996847 NR Description: hypothetical protein [Xylella fastidiosa Ann-1]
  misc_feature (1)..(183): NCBI GI NO: 21231574 NR Description: succinate dehydrogenase flavoprotein subunit
  misc_feature (1)..(183): NCBI GI NO: 28198269 NR Description: succinate dehydrogenase flavoprotein subunit
  misc_feature (1)..(183): NCBI GI NO: 23011974 NR Description: hypothetical protein
  misc_feature (1)..(183): NCBI GI NO: 22995327 NR Description: hypothetical protein [Xylella fastidiosa Dixon]
VFGRACANRVAEISKPGEKQKPLEKDAGEKTIAWLDRLRNSNGSLPTSTIRLNMQRIMQNNAAVFRTQETLEEGCQLIDKAWESFGDVQVKDRSMIWNSDLIETLELENLLINASITMHSAEARKESRGAHAREDFTKREDGEWMKHTLGYWEDEKVRLDYRPVHMDTLDDEIDTFPPKARVY

SEQ ID NO: 2593 - protein, 130 aa, Arabidopsis thaliana
  peptide (1)..(130): Ceres Seq. ID no. 12738174
  misc_feature (1)..(130): Pfam Name: Pfam Description:  Fumarate reductase/ succinate dehydrogenase flavo protein C-terminaldomain
  misc_feature (1)..(130): NCBI GI NO: 15240075 NR Description: succinate dehydrogenase flavoprotein alpha subunit
  misc_feature (1)..(130): NCBI GI NO: 15224174 NR Description: putative succinate dehydrogenase flavoprotein subunit
  misc_feature (1)..(130): NCBI GI NO: 34394418 NR Description: putative succinate dehydrogenase flavoprotein alpha subunit
  misc_feature (1)..(130): NCBI GI NO: 21242816 NR Description: succinate dehydrogenase flavoprotein subunit
  misc_feature (1)..(130): NCBI GI NO: 15837674 NR Description: succinate dehydrogenase, flavoprotein subunit
  misc_feature (1)..(130): NCBI GI NO: 22996847 NR Description: hypothetical protein [Xylella fastidiosa Ann-1]
  misc_feature (1)..(130): NCBI GI NO: 21231574 NR Description: succinate dehydrogenase flavoprotein subunit
  misc_feature (1)..(130): NCBI GI NO: 28198269 NR Description: succinate dehydrogenase flavoprotein subunit
  misc_feature (1)..(130): NCBI GI NO: 23011974 NR Description: hypothetical protein
  misc_feature (1)..(130): NCBI GI NO: 22995327 NR Description: hypothetical protein [Xylella fastidiosa Dixon]
MQRIMQNNAAVFRTQETLEEGCQLIDKAWESFGDVQVKDRSMIWNSDLIETLELENLLINASITMHSAEARKESRGAHAREDFTKREDGEWMKHTLGYWEDEKVRLDYRPVHMDTLDDEIDTFPPKARVY

SEQ ID NO: 2594 - protein, 126 aa, Arabidopsis thaliana
  peptide (1)..(126): Ceres Seq. ID no. 12738175
  misc_feature (1)..(126): Pfam Name: Pfam Description:  Fumarate reductase/ succinate dehydrogenase flavo protein C-terminaldomain
  misc_feature (1)..(126): NCBI GI NO: 15240075 NR Description: succinate dehydrogenase flavoprotein alpha subunit
  misc_feature (1)..(126): NCBI GI NO: 15224174 NR Description: putative succinate dehydrogenase flavoprotein subunit
  misc_feature (1)..(126): NCBI GI NO: 34394418 NR Description: putative succinate dehydrogenase flavoprotein alpha subunit
  misc_feature (1)..(126): NCBI GI NO: 21242816 NR Description: succinate dehydrogenase flavoprotein subunit
  misc_feature (1)..(126): NCBI GI NO: 15837674 NR Description: succinate dehydrogenase, flavoprotein subunit
  misc_feature (1)..(126): NCBI GI NO: 22996847 NR Description: hypothetical protein [Xylella fastidiosa Ann-1]
  misc_feature (1)..(126): NCBI GI NO: 21231574 NR Description: succinate dehydrogenase flavoprotein subunit
  misc_feature (1)..(126): NCBI GI NO: 28198269 NR Description: succinate dehydrogenase flavoprotein subunit
  misc_feature (1)..(126): NCBI GI NO: 23011974 NR Description: hypothetical protein
  misc_feature (1)..(126): NCBI GI NO: 22995327 NR Description: hypothetical protein [Xylella fastidiosa Dixon]
MQNNAAVFRTQETLEEGCQLIDKAWESFGDVQVKDRSMIWNSDLIETLELENLLINASITMHSAEARKESRGAHAREDFTKREDGEWMKHTLGYWEDEKVRLDYRPVHMDTLDDEIDTFPPKARVY

SEQ ID NO: 2595 - DNA, 787 bp, Arabidopsis thaliana
  misc_feature (1)..(787): Ceres Seq. ID no. 12739078
cgtaagatgatgtcagatctggaggaaagggagcgttctgctttttctcctaatccttccgctagagcttatgatgaagaagagagaatcgctaggaagcttaaggaggagatagataggatacgtgcaagacatgcgaagaagaaaagtggtttccaaactccagagagtaatgtagatgaaaagagaaaagaagaaagaagtggtgctggagctagtgttcaactcgataaagagaaaatgttgaaggtttcttgggaaaaaagtggtgaagggtatacagctggaaggctaagagaagtgttttctgagtttggtgaggttgaagatgttgttattaggagtaccaagaagaaatgttctgctcttattgtaatggctacaaaggatggagctgttgcagcgacgaggacattgtgtggcaatctttctaatccattgttggttgtacctcttcagaaagcagcccaaaccgattttctgacggctaagaaatctgcagaagcagaaccgcagagtaacatagtaggtgccggtcttcaagcttatgaagatgccgtcatgcaaagactgctacaggcggctatggaccagaaaaagcgaggggtttaagccacatgatcaagaacaaagctccttcaagaccaaagtgataaagaataaagctctgcttcatgattaagaattaagctccttatacattgtttgtgtacatccaatctcatatcagttgttgttgtagaatttaaaattctaactcttctcgaaaaaaaaaatgcttcgtacc

SEQ ID NO: 2596 - protein, 203 aa, Arabidopsis thaliana
  peptide (1)..(203): Ceres Seq. ID no. 12739079
  misc_feature (1)..(193): NCBI GI NO: 8809700 NR Description: dbj|BAA91724
  misc_feature (1)..(203): NCBI GI NO: 30689058 NR Description: DnaJ protein family [Arabidopsis thaliana]
RKMMSDLEERERSAFSPNPSARAYDEEERIARKLKEEIDRIRARHAKKKSGFQTPESNVDEKRKEERSGAGASVQLDKEKMLKVSWEKSGEGYTAGRLREVFSEFGEVEDVVIRSTKKKCSALIVMATKDGAVAATRTLCGNLSNPLLVVPLQKAAQTDFLTAKKSAEAEPQSNIVGAGLQAYEDAVMQRLLQAAMDQKKRGV

SEQ ID NO: 2597 - protein, 201 aa, Arabidopsis thaliana
  peptide (1)..(201): Ceres Seq. ID no. 12739080
  misc_feature (1)..(191): NCBI GI NO: 8809700 NR Description: dbj|BAA91724
  misc_feature (1)..(201): NCBI GI NO: 30689058 NR Description: DnaJ protein family [Arabidopsis thaliana]
MMSDLEERERSAFSPNPSARAYDEEERIARKLKEEIDRIRARHAKKKSGFQTPESNVDEKRKEERSGAGASVQLDKEKMLKVSWEKSGEGYTAGRLREVFSEFGEVEDVVIRSTKKKCSALIVMATKDGAVAATRTLCGNLSNPLLVVPLQKAAQTDFLTAKKSAEAEPQSNIVGAGLQAYEDAVMQRLLQAAMDQKKRGV

SEQ ID NO: 2598 - protein, 200 aa, Arabidopsis thaliana
  peptide (1)..(200): Ceres Seq. ID no. 12739081
  misc_feature (1)..(190): NCBI GI NO: 8809700 NR Description: dbj|BAA91724
  misc_feature (1)..(200): NCBI GI NO: 30689058 NR Description: DnaJ protein family [Arabidopsis thaliana]
MSDLEERERSAFSPNPSARAYDEEERIARKLKEEIDRIRARHAKKKSGFQTPESNVDEKRKEERSGAGASVQLDKEKMLKVSWEKSGEGYTAGRLREVFSEFGEVEDVVIRSTKKKCSALIVMATKDGAVAATRTLCGNLSNPLLVVPLQKAAQTDFLTAKKSAEAEPQSNIVGAGLQAYEDAVMQRLLQAAMDQKKRGV

SEQ ID NO: 2599 - DNA, 1260 bp, Arabidopsis thaliana
  misc_feature (1)..(1260): Ceres Seq. ID no. 12335589
atctccactctgctaaatccgacgagagacgacgatgccaagcggtggtaacggaacaagtaacggagtcgctaacgcgaattccaccggtaacgcaggaacaagcggaaacgttccgatatataagccataccgtcacctgaaaaccctagaaggtcacacggcggcgatctcttgcgtcaaattctccaacgacggcaatcttctcgcttccgcttccgtagacaaaaccatgatcctctggtcagcaacaaactactctctcattcatcgttacgaaggtcactctagtggtatctccgatctagcttggtcttctgattcgcattacacttgctctgcttctgatgattgtacgcttcgaatctgggacgctagatctccttatgaatgtcttaaggttcttagaggtcatacgaatttcgtcttctgtgttaatttcaatcctccttcgaatttgattgtgtctggatcgttcgatgagacgattcgtatttgggaggttaagactgggaagtgtgttaggatgattaaagctcattcgatgccgatttcgagtgtgcattttaatagagatggatcgttgattgtttcggcaagtcatgatggttcttgtaagatttgggatgctaaagaaggaacttgcttgaagactcttattgatgataaatctccggctgtttctttcgctaagttctcgcccaatggcaagtttatactcgttgctactctcgatagtactctcaagctgtcgaactatgcgacggggaagtttttgaaagtgtatacaggacatactaacaaagtgttctgtatcacatcggcgttttctgtaacgaatgggaagtacattgtgagtggatcagaggataattgtgtgtatctgtgggatcttcaagcgagaaatatactgcagagactagaaggccacacagacgcagtgatctcagtgagttgccatccggttcagaacgagatatcttcatcgggtaatcatttggataaaactatcaggatttggaaacaggatgcttgaaaaacatgaatatatgtgtatggaattaatggtaacaacaatagttgagattgtgaatctgtttgatctgaacacactattttgatgtttcggaatgggatgaaatctcttgcaagttggtgttaatatttatgacagagatatcatctatgttctctccccaatatgtggatgatacttactttaaaactaaagctttttaataagagctactaaactaaaag

SEQ ID NO: 2600 - protein, 333 aa, Arabidopsis thaliana
  peptide (1)..(333): Ceres Seq. ID no. 12335590
  misc_feature (1)..(333): NCBI GI NO: 15235470 NR Description: G-protein beta family; protein id: At4g02730
  misc_feature (120)..(332): NCBI GI NO: 34394218 NR Description: putative WD repeat domain 5 protein
  misc_feature (28)..(115): NCBI GI NO: 34394218 NR Description: putative WD repeat domain 5 protein
  misc_feature (17)..(332): NCBI GI NO: 30353827 NR Description: Unknown (protein for MGC:56591) [Danio rerio]
  misc_feature (13)..(332): NCBI GI NO: 6714707 NR Description: hypothetical protein [Homo sapiens]
  misc_feature (13)..(332): NCBI GI NO: 16554627 NR Description: WD repeat domain 5 protein; WD-repeat protein 5
  misc_feature (13)..(332): NCBI GI NO: 34853150 NR Description: similar to hypothetical protein
  misc_feature (1)..(332): NCBI GI NO: 20302740 NR Description: unknown [Branchiostoma floridae]
  misc_feature (1)..(332): NCBI GI NO: 17864654 NR Description: will die slowly CG17437-PA
  misc_feature (18)..(329): NCBI GI NO: 23199987 NR Description: WD repeat domain 5B [Homo sapiens]
MPSGGNGTSNGVANANSTGNAGTSGNVPIYKPYRHLKTLEGHTAAISCVKFSNDGNLLASASVDKTMILWSATNYSLIHRYEGHSSGISDLAWSSDSHYTCSASDDCTLRIWDARSPYECLKVLRGHTNFVFCVNFNPPSNLIVSGSFDETIRIWEVKTGKCVRMIKAHSMPISSVHFNRDGSLIVSASHDGSCKIWDAKEGTCLKTLIDDKSPAVSFAKFSPNGKFILVATLDSTLKLSNYATGKFLKVYTGHTNKVFCITSAFSVTNGKYIVSGSEDNCVYLWDLQARNILQRLEGHTDAVISVSCHPVQNEISSSGNHLDKTIRIWKQDA

SEQ ID NO: 2601 - protein, 267 aa, Arabidopsis thaliana
  peptide (1)..(267): Ceres Seq. ID no. 12335591
  misc_feature (1)..(267): NCBI GI NO: 15235470 NR Description: G-protein beta family; protein id: At4g02730
  misc_feature (54)..(266): NCBI GI NO: 34394218 NR Description: putative WD repeat domain 5 protein
  misc_feature (1)..(49): NCBI GI NO: 34394218 NR Description: putative WD repeat domain 5 protein
  misc_feature (1)..(266): NCBI GI NO: 30353827 NR Description: Unknown (protein for MGC:56591) [Danio rerio]
  misc_feature (1)..(266): NCBI GI NO: 6714707 NR Description: hypothetical protein [Homo sapiens]
  misc_feature (1)..(266): NCBI GI NO: 16554627 NR Description: WD repeat domain 5 protein; WD-repeat protein 5
  misc_feature (1)..(266): NCBI GI NO: 34853150 NR Description: similar to hypothetical protein
  misc_feature (1)..(266): NCBI GI NO: 20302740 NR Description: unknown [Branchiostoma floridae]
  misc_feature (1)..(266): NCBI GI NO: 17864654 NR Description: will die slowly CG17437-PA
  misc_feature (1)..(263): NCBI GI NO: 23199987 NR Description: WD repeat domain 5B [Homo sapiens]
MILWSATNYSLIHRYEGHSSGISDLAWSSDSHYTCSASDDCTLRIWDARSPYECLKVLRGHTNFVFCVNFNPPSNLIVSGSFDETIRIWEVKTGKCVRMIKAHSMPISSVHFNRDGSLIVSASHDGSCKIWDAKEGTCLKTLIDDKSPAVSFAKFSPNGKFILVATLDSTLKLSNYATGKFLKVYTGHTNKVFCITSAFSVTNGKYIVSGSEDNCVYLWDLQARNILQRLEGHTDAVISVSCHPVQNEISSSGNHLDKTIRIWKQDA

SEQ ID NO: 2602 - protein, 169 aa, Arabidopsis thaliana
  peptide (1)..(169): Ceres Seq. ID no. 12335592
  misc_feature (1)..(169): NCBI GI NO: 15235470 NR Description: G-protein beta family; protein id: At4g02730
  misc_feature (1)..(168): NCBI GI NO: 34394218 NR Description: putative WD repeat domain 5 protein
  misc_feature (1)..(168): NCBI GI NO: 30353827 NR Description: Unknown (protein for MGC:56591) [Danio rerio]
  misc_feature (1)..(168): NCBI GI NO: 6714707 NR Description: hypothetical protein [Homo sapiens]
  misc_feature (1)..(168): NCBI GI NO: 16554627 NR Description: WD repeat domain 5 protein; WD-repeat protein 5
  misc_feature (1)..(168): NCBI GI NO: 34853150 NR Description: similar to hypothetical protein
  misc_feature (1)..(168): NCBI GI NO: 20302740 NR Description: unknown [Branchiostoma floridae]
  misc_feature (1)..(168): NCBI GI NO: 17864654 NR Description: will die slowly CG17437-PA
  misc_feature (1)..(165): NCBI GI NO: 23199987 NR Description: WD repeat domain 5B [Homo sapiens]
  misc_feature (1)..(168): NCBI GI NO: 31196347 NR Description: ENSANGP00000012135 [Anopheles gambiae]
MIKAHSMPISSVHFNRDGSLIVSASHDGSCKIWDAKEGTCLKTLIDDKSPAVSFAKFSPNGKFILVATLDSTLKLSNYATGKFLKVYTGHTNKVFCITSAFSVTNGKYIVSGSEDNCVYLWDLQARNILQRLEGHTDAVISVSCHPVQNEISSSGNHLDKTIRIWKQDA

SEQ ID NO: 2603 - DNA, 799 bp, Arabidopsis thaliana
  misc_feature (1)..(799): Ceres Seq. ID no. 12338769
attacaagaatcattcgattctcttctatcatcatcttcttcttctccatcaaaattcaccaaaacatggaagctctaattcaccacttcactctcctctccgatcaagctcttgtcgacaaaacattcgacccttcaagaatcgaggacctcatgcgtctctttgaagtcgattcatacaaagcttgggcagctctcgaatccgaacagcaacaagaactcgaagaagctgaagaatctctccgtgaagctgaacttgaacttgatcggtaacattttcgtcttttcttgtatggaattttcatagatctggagagatctgatttttatggtttcttcagggatatggagtgggggatggaggagtataggcggacgttggaggagatggagaggatggaggcggcggactgaaagagcttgaggagaaagcggagactgctcggagaacggggaatttaatggagaaagcggcgacaattgccgcgaaacgacatattgcggcggcgatgggatcagccgccgcgtctatgagatcagcttggaagactgcagctggaaataaggttcatccatcttgatcgatgatgatgatgatgaatatgataagatgacgatgattgtgaaagtattggtccccatgttataggattagtaggtcaagaacattttaatgaataattatttcctttgataaacatatgggttactacttactattgccgaagaattatgaattataggtagtttctagtttatgtatctgtaatttgtaatcaatatatatttatgggattat

SEQ ID NO: 2604 - protein, 90 aa, Arabidopsis thaliana
  peptide (1)..(90): Ceres Seq. ID no. 12338770
  misc_feature (23)..(90): NCBI GI NO: 18406916 NR Description: expressed protein; protein id: At1g60870
  misc_feature (23)..(90): NCBI GI NO: 21553414 NR Description: unknown [Arabidopsis thaliana]
  misc_feature (52)..(90): NCBI GI NO: 23306438 NR Description: Unknown protein [Arabidopsis thaliana]
ITRIIRFSSIIIFFFSIKIHQNMEALIHHFTLLSDQALVDKTFDPSRIEDLMRLFEVDSYKAWAALESEQQQELEEAEESLREAELELDR

SEQ ID NO: 2605 - protein, 68 aa, Arabidopsis thaliana
  peptide (1)..(68): Ceres Seq. ID no. 12338771
  misc_feature (1)..(68): NCBI GI NO: 18406916 NR Description: expressed protein; protein id: At1g60870
  misc_feature (1)..(68): NCBI GI NO: 21553414 NR Description: unknown [Arabidopsis thaliana]
  misc_feature (30)..(68): NCBI GI NO: 23306438 NR Description: Unknown protein [Arabidopsis thaliana]
MEALIHHFTLLSDQALVDKTFDPSRIEDLMRLFEVDSYKAWAALESEQQQELEEAEESLREAELELDR

SEQ ID NO: 2606 - protein, 54 aa, Arabidopsis thaliana
  peptide (1)..(54): Ceres Seq. ID no. 12338772
YKNHSILFYHHLLLLHQNSPKHGSSNSPLHSPLRSSSCRQNIRPFKNRGPHASL

SEQ ID NO: 2607 - DNA, 1805 bp, Arabidopsis thaliana
  misc_feature (1)..(1805): Ceres Seq. ID no. 12558715
attcccacacagagaggtacaacaagactcgtcgctcttcgctttttcttctctctttctttctcttgccagtagtgtgatcttacgaagcttttagtagagaaaaagcatatacgctttgtctttcttaatcgactgataagtccttaggatcagatggaacaaatgggtggctactcaaaacaacaaggtccatttttagtttgattaagggatttggatctgagcttacttcatcaactttgtcggaatatacatttgctttgtgtggatttggaagttgtccctgaatggcgtccgaggatttgaatattgttgcggaatcaaagaaaggggaagagaatgttattgttgataattccaaggacatgaatagacctgagaatcttgacttatctactgagaaaactgatactgccaatgagaatggtccaaaagatgaagcttctaagctggtaaaggaagcagacctccctgagtctggtacttcagtgaagagtaaaacagctaaggataataaacctgttaagagaaagtcagggacgttttctcggagcccgagattcatgtctcagagctcttcatttccaactaaaggagcttatactgatattactagaaagagcattgatgccacaacatcaaagactagtcttaaacccgtcgttgctggtggatccaaaccaaaagccactccatcttcaagcagcggtgtttccgcaaagcgcaccagtttagtatctgcgcctctcaaaaagcaaactatgcctgtgaaaaccatttctaaggatgcagcttcaggccctacttccaaattaggagatgaaggttctaaatccatcaaagaagaaactgcggggaaggatgtcgaggaggctggatcaaccaccgctgtggtggcagataaagtatctaacccgttgaaagctgaaatggcaagcaaggacgacgaagacactcgttcaactaccacttcaacttctacacctcgtgggcggagaagcagtgttggatcggcatctggattttcgttcaggttggaggaacgggctgaaaaacggaaggagttttatatgaaactagaagagaagatccatgcaaaggaagtagagaagaccaatttgcaggcgaaatcaaaggagagccaggaagaagagatcaaaaggttgaggaagagcttgacgttcaaggctggtcccatgcccagtttctacaaagaacccccacctaaggttgaattgaagaagataccaactactcgtcctaagtctccaaagctaggacgcagaaagagtagcagtgatgcaacaggaggtgaagccgctcctcgcgtgacaaaaccaaaagactcatcatcatctacagtgaagaaaccaataacaaagtctcagccaaagcttgaaactcaagagaaatcagtgaaggccaaagaaaagaaaaagaaagtgaagaaagaagaagcagagaagagaggagaagaagagaaggctactgccgtggctgcgaaacctgaagagcagaaaccaaactccaataacatccaagtgaaggctgagataatggcgagtgaggttgtagtgggaggctgaagcaaagagagcattcagcagcgatgtctaatgtctgcttctttttttctttcttaaagcattaatgtgaatagagttgttgcattgcgtctacttttttaagagtttatacttcattccttcagtttattttttggaaaattaagcctcgattgcttcttaagatggtctcaaatgtgttgaactcaaatatgtatcacgagcatagatatgtgt

SEQ ID NO: 2608 - protein, 432 aa, Arabidopsis thaliana
  peptide (1)..(432): Ceres Seq. ID no. 12558716
  misc_feature (42)..(414): Pfam Name: Pfam Description:  Treacher Collins syndrome protein Treacle
  misc_feature (1)..(432): NCBI GI NO: 18403980 NR Description: expressed protein; protein id: At2g35880
  misc_feature (1)..(432): NCBI GI NO: 25408425 NR Description: hypothetical protein At2g35880
  misc_feature (131)..(422): NCBI GI NO: 18417986 NR Description: putative protein; protein id: At4g32330
  misc_feature (150)..(415): NCBI GI NO: 15224733 NR Description: unknown protein; protein id: At2g25480.1
  misc_feature (114)..(385): NCBI GI NO: 34897180 NR Description: unknown protein
  misc_feature (156)..(350): NCBI GI NO: 6175167 NR Description: unknown protein [Arabidopsis thaliana]
  misc_feature (156)..(350): NCBI GI NO: 18396961 NR Description: expressed protein; protein id: At3g04630
  misc_feature (156)..(350): NCBI GI NO: 21618286 NR Description: unknown [Arabidopsis thaliana]
  misc_feature (156)..(350): NCBI GI NO: 30679219 NR Description: expressed protein [Arabidopsis thaliana]
  misc_feature (107)..(391): NCBI GI NO: 9294199 NR Description: gb|AAF04893
MASEDLNIVAESKKGEENVIVDNSKDMNRPENLDLSTEKTDTANENGPKDEASKLVKEADLPESGTSVKSKTAKDNKPVKRKSGTFSRSPRFMSQSSSFPTKGAYTDITRKSIDATTSKTSLKPVVAGGSKPKATPSSSSGVSAKRTSLVSAPLKKQTMPVKTISKDAASGPTSKLGDEGSKSIKEETAGKDVEEAGSTTAVVADKVSNPLKAEMASKDDEDTRSTTTSTSTPRGRRSSVGSASGFSFRLEERAEKRKEFYMKLEEKIHAKEVEKTNLQAKSKESQEEEIKRLRKSLTFKAGPMPSFYKEPPPKVELKKIPTTRPKSPKLGRRKSSSDATGGEAAPRVTKPKDSSSSTVKKPITKSQPKLETQEKSVKAKEKKKKVKKEEAEKRGEEEKATAVAAKPEEQKPNSNNIQVKAEIMASEVVVGG

SEQ ID NO: 2609 - protein, 406 aa, Arabidopsis thaliana
  peptide (1)..(406): Ceres Seq. ID no. 12558717
  misc_feature (16)..(388): Pfam Name: Pfam Description:  Treacher Collins syndrome protein Treacle
  misc_feature (1)..(406): NCBI GI NO: 18403980 NR Description: expressed protein; protein id: At2g35880
  misc_feature (1)..(406): NCBI GI NO: 25408425 NR Description: hypothetical protein At2g35880
  misc_feature (105)..(396): NCBI GI NO: 18417986 NR Description: putative protein; protein id: At4g32330
  misc_feature (124)..(389): NCBI GI NO: 15224733 NR Description: unknown protein; protein id: At2g25480.1
  misc_feature (88)..(359): NCBI GI NO: 34897180 NR Description: unknown protein
  misc_feature (130)..(324): NCBI GI NO: 6175167 NR Description: unknown protein [Arabidopsis thaliana]
  misc_feature (130)..(324): NCBI GI NO: 18396961 NR Description: expressed protein; protein id: At3g04630
  misc_feature (130)..(324): NCBI GI NO: 21618286 NR Description: unknown [Arabidopsis thaliana]
  misc_feature (130)..(324): NCBI GI NO: 30679219 NR Description: expressed protein [Arabidopsis thaliana]
  misc_feature (81)..(365): NCBI GI NO: 9294199 NR Description: gb|AAF04893
MNRPENLDLSTEKTDTANENGPKDEASKLVKEADLPESGTSVKSKTAKDNKPVKRKSGTFSRSPRFMSQSSSFPTKGAYTDITRKSIDATTSKTSLKPVVAGGSKPKATPSSSSGVSAKRTSLVSAPLKKQTMPVKTISKDAASGPTSKLGDEGSKSIKEETAGKDVEEAGSTTAVVADKVSNPLKAEMASKDDEDTRSTTTSTSTPRGRRSSVGSASGFSFRLEERAEKRKEFYMKLEEKIHAKEVEKTNLQAKSKESQEEEIKRLRKSLTFKAGPMPSFYKEPPPKVELKKIPTTRPKSPKLGRRKSSSDATGGEAAPRVTKPKDSSSSTVKKPITKSQPKLETQEKSVKAKEKKKKVKKEEAEKRGEEEKATAVAAKPEEQKPNSNNIQVKAEIMASEVVVGG

SEQ ID NO: 2610 - protein, 340 aa, Arabidopsis thaliana
  peptide (1)..(340): Ceres Seq. ID no. 12558718
  misc_feature (1)..(322): Pfam Name: Pfam Description:  Treacher Collins syndrome protein Treacle
  misc_feature (1)..(340): NCBI GI NO: 18403980 NR Description: expressed protein; protein id: At2g35880
  misc_feature (1)..(340): NCBI GI NO: 25408425 NR Description: hypothetical protein At2g35880
  misc_feature (39)..(330): NCBI GI NO: 18417986 NR Description: putative protein; protein id: At4g32330
  misc_feature (58)..(323): NCBI GI NO: 15224733 NR Description: unknown protein; protein id: At2g25480.1
  misc_feature (22)..(293): NCBI GI NO: 34897180 NR Description: unknown protein
  misc_feature (64)..(258): NCBI GI NO: 6175167 NR Description: unknown protein [Arabidopsis thaliana]
  misc_feature (64)..(258): NCBI GI NO: 21618286 NR Description: unknown [Arabidopsis thaliana]
  misc_feature (64)..(258): NCBI GI NO: 18396961 NR Description: expressed protein; protein id: At3g04630
  misc_feature (64)..(258): NCBI GI NO: 30679219 NR Description: expressed protein [Arabidopsis thaliana]
  misc_feature (15)..(299): NCBI GI NO: 9294199 NR Description: gb|AAF04893
MSQSSSFPTKGAYTDITRKSIDATTSKTSLKPVVAGGSKPKATPSSSSGVSAKRTSLVSAPLKKQTMPVKTISKDAASGPTSKLGDEGSKSIKEETAGKDVEEAGSTTAVVADKVSNPLKAEMASKDDEDTRSTTTSTSTPRGRRSSVGSASGFSFRLEERAEKRKEFYMKLEEKIHAKEVEKTNLQAKSKESQEEEIKRLRKSLTFKAGPMPSFYKEPPPKVELKKIPTTRPKSPKLGRRKSSSDATGGEAAPRVTKPKDSSSSTVKKPITKSQPKLETQEKSVKAKEKKKKVKKEEAEKRGEEEKATAVAAKPEEQKPNSNNIQVKAEIMASEVVVGG

SEQ ID NO: 2611 - DNA, 1198 bp, Arabidopsis thaliana
  misc_feature (1)..(1198): Ceres Seq. ID no. 12338161
tttcaggcttggtgatctctgggattgttatgatgagatgagtgcgtatggctttggcacacaggttgatttaaacaatggcgaaaccgttatgcagtactacgtcccgtacctatccgctatccaaatccacactaacaaacccgccttgctttccaggaaccagaatgaggtggctgaatctgagagtagcgagggttggagcgatagtgagagtgaaaagttgttgtcaaggtcaatgagcaatgattcaagcaaaacatgggatgctgtctctgaagattcggttttcgatccggatggttcaccgttgctgaaagatagacttggtaaccttgactttaagtacattgaaagagatcctccgcacaagcggattcccttaaccgacaagataaacgtattggtggagaaatatccgggactcatgaccttaaggagtgtcgacatgtctcctgcaagttcgatggctgttgcgtggtacccgatataccacatcccaacctgcaggaacgagaaagatttgacgacaggcttcctaacttatcatactctatcttcgtcttttcaagataatgtggtggaaggagatcaaagcaacaacaatgaagaaacagagttttgtgaagattccgtaataaacaagagaatgccattgcctccgtttggtgtaacaacttacaaaatgcaaggagatctttgggggaagacggggtttgaccaggaccggttgctttatcttcaaagcgctgcggattcatggctgaaacagctcaatgttgatcaccatgactataacttcttccttaactcgagcttctaaagatcaatcgggtcgttcgtatgtttatccttctccaaaccttaaacaaaaaaaaaagacctcataaccctttttctttgttgttttcaagctccttttgtttctctgtgttttttgttctttttgtttttgtctggctcgttgtgttgttttaggtagcaaccgccatcgcggagttttttctccttttgcaagccaatcatggaagtttctaagaagaaaacagagcttttttttctttttttttaacggtgttgagaaaacaagaaagttgttttcttttcttgggtgagagatcatgtaaattgaccttgaacagaggactctgttttgtacttttctgtctaaaatatataaaaaaatctgtctttcttg

SEQ ID NO: 2612 - protein, 273 aa, Arabidopsis thaliana
  peptide (1)..(273): Ceres Seq. ID no. 12338162
  misc_feature (1)..(268): Pfam Name: DUF789 Pfam Description: Protein of unknown function
  misc_feature (1)..(273): NCBI GI NO: 15219407 NR Description: hypothetical protein; protein id: At1g73210.1
  misc_feature (1)..(273): NCBI GI NO: 27754726 NR Description: unknown protein [Arabidopsis thaliana]
  misc_feature (1)..(272): NCBI GI NO: 18394539 NR Description: expressed protein; protein id: At1g17830
  misc_feature (1)..(272): NCBI GI NO: 21593308 NR Description: unknown [Arabidopsis thaliana]
  misc_feature (1)..(268): NCBI GI NO: 22328289 NR Description: hypothetical protein; protein id: At4g03420
  misc_feature (1)..(268): NCBI GI NO: 25373431 NR Description: hypothetical protein AT4g03420
  misc_feature (1)..(272): NCBI GI NO: 18958013 NR Description: At1g03610/F21B7_13 [Arabidopsis thaliana]
  misc_feature (1)..(272): NCBI GI NO: 18379117 NR Description: expressed protein; protein id: At1g03610
  misc_feature (1)..(272): NCBI GI NO: 9280648 NR Description: F21B7.22 [Arabidopsis thaliana]
  misc_feature (71)..(234): NCBI GI NO: 30687867 NR Description: expressed protein [Arabidopsis thaliana]
FRLGDLWDCYDEMSAYGFGTQVDLNNGETVMQYYVPYLSAIQIHTNKPALLSRNQNEVAESESSEGWSDSESEKLLSRSMSNDSSKTWDAVSEDSVFDPDGSPLLKDRLGNLDFKYIERDPPHKRIPLTDKINVLVEKYPGLMTLRSVDMSPASSMAVAWYPIYHIPTCRNEKDLTTGFLTYHTLSSSFQDNVVEGDQSNNNEETEFCEDSVINKRMPLPPFGVTTYKMQGDLWGKTGFDQDRLLYLQSAADSWLKQLNVDHHDYNFFLNSSF

SEQ ID NO: 2613 - protein, 261 aa, Arabidopsis thaliana
  peptide (1)..(261): Ceres Seq. ID no. 12338163
  misc_feature (1)..(256): Pfam Name: DUF789 Pfam Description: Protein of unknown function
  misc_feature (1)..(261): NCBI GI NO: 15219407 NR Description: hypothetical protein; protein id: At1g73210.1
  misc_feature (1)..(261): NCBI GI NO: 27754726 NR Description: unknown protein [Arabidopsis thaliana]
  misc_feature (1)..(260): NCBI GI NO: 18394539 NR Description: expressed protein; protein id: At1g17830
  misc_feature (1)..(260): NCBI GI NO: 21593308 NR Description: unknown [Arabidopsis thaliana]
  misc_feature (1)..(256): NCBI GI NO: 22328289 NR Description: hypothetical protein; protein id: At4g03420
  misc_feature (1)..(256): NCBI GI NO: 25373431 NR Description: hypothetical protein AT4g03420
  misc_feature (1)..(260): NCBI GI NO: 18958013 NR Description: At1g03610/F21B7_13 [Arabidopsis thaliana]
  misc_feature (1)..(260): NCBI GI NO: 18379117 NR Description: expressed protein; protein id: At1g03610
  misc_feature (1)..(260): NCBI GI NO: 9280648 NR Description: F21B7.22 [Arabidopsis thaliana]
  misc_feature (59)..(222): NCBI GI NO: 30687867 NR Description: expressed protein [Arabidopsis thaliana]
MSAYGFGTQVDLNNGETVMQYYVPYLSAIQIHTNKPALLSRNQNEVAESESSEGWSDSESEKLLSRSMSNDSSKTWDAVSEDSVFDPDGSPLLKDRLGNLDFKYIERDPPHKRIPLTDKINVLVEKYPGLMTLRSVDMSPASSMAVAWYPIYHIPTCRNEKDLTTGFLTYHTLSSSFQDNVVEGDQSNNNEETEFCEDSVINKRMPLPPFGVTTYKMQGDLWGKTGFDQDRLLYLQSAADSWLKQLNVDHHDYNFFLNSSF

SEQ ID NO: 2614 - protein, 243 aa, Arabidopsis thaliana
  peptide (1)..(243): Ceres Seq. ID no. 12338164
  misc_feature (1)..(238): Pfam Name: DUF789 Pfam Description: Protein of unknown function
  misc_feature (1)..(243): NCBI GI NO: 15219407 NR Description: hypothetical protein; protein id: At1g73210.1
  misc_feature (1)..(243): NCBI GI NO: 27754726 NR Description: unknown protein [Arabidopsis thaliana]
  misc_feature (1)..(242): NCBI GI NO: 18394539 NR Description: expressed protein; protein id: At1g17830
  misc_feature (1)..(242): NCBI GI NO: 21593308 NR Description: unknown [Arabidopsis thaliana]
  misc_feature (1)..(238): NCBI GI NO: 22328289 NR Description: hypothetical protein; protein id: At4g03420
  misc_feature (1)..(238): NCBI GI NO: 25373431 NR Description: hypothetical protein AT4g03420
  misc_feature (1)..(242): NCBI GI NO: 18958013 NR Description: At1g03610/F21B7_13 [Arabidopsis thaliana]
  misc_feature (1)..(242): NCBI GI NO: 18379117 NR Description: expressed protein; protein id: At1g03610
  misc_feature (1)..(242): NCBI GI NO: 9280648 NR Description: F21B7.22 [Arabidopsis thaliana]
  misc_feature (41)..(204): NCBI GI NO: 30687867 NR Description: expressed protein [Arabidopsis thaliana]
MQYYVPYLSAIQIHTNKPALLSRNQNEVAESESSEGWSDSESEKLLSRSMSNDSSKTWDAVSEDSVFDPDGSPLLKDRLGNLDFKYIERDPPHKRIPLTDKINVLVEKYPGLMTLRSVDMSPASSMAVAWYPIYHIPTCRNEKDLTTGFLTYHTLSSSFQDNVVEGDQSNNNEETEFCEDSVINKRMPLPPFGVTTYKMQGDLWGKTGFDQDRLLYLQSAADSWLKQLNVDHHDYNFFLNSSF

SEQ ID NO: 2615 - DNA, 1176 bp, Arabidopsis thaliana
  misc_feature (1)..(1176): Ceres Seq. ID no. 13489416
atccaaagtccaaacacagcataaaagtagctctattgactttttttcttcctccaaactctttttacgtcaagcaatggaggatcttgatccaacctacatccaagcaccagagcatagatcagattcgaatttcatccctaaccaaccagaagaaatacccgtgattgatctctcgcgcctcgatgaccccgaagatgtccaaaacgttatctcagagatcggtgatgcttgtgaaaaatggggattttttcaggtgcttaatcatggtgtgccttctgacgcaaggcaacgtgtggagaagactgtgaagatgtttttcgatttgcctatggaagagaagataaaggtgaagagagacgatgtgaatcctgtagggtatcatgatggagaacacaccaagaacgttaaagattggaaagaagtgtttgatatttatttcaaagatccaatggtcattccttcaaccactgatcctgaagatgaaggcttaagacttgtttacaacaagtggcctcaatctccttctgatttcagggaagcatgtgaagtatatgcgagacacgctgaaaaattagcgttcaagctcttggaactgatttcgttaagcttaggcttgccaaaagagcgttttcatgactacttcaaagaacaaatgagttttttcaggataaatcgttatccaccatgtccaagacctgacctagctttaggtgttggtcaccacaaagatgccgacgttattagtctattggctcaagatgatgttggaggattacaagttagtcgtagatcggacggtgtttggtttccgattagacccgtccctaatgctcttgtcatcaatataggcaattgtatggagatatggacgaatgacaagtattggagtgctgaacatagagtggtggtgaacacaacaagagagagatactcgataccattcttcttgttgccttcacacgatgtggaagtgaagccattagaagaacttgtgagtcctgaaaaccctccaaaatacaaaggctataaatggggtaagttctacgtcagtaggaatagaagcgattttcgaaaactggaaatcgaaaacatccaaatcgatgacttcaaagttaaaacttaatatactatgtatcggcttttttttttgtttaccaagctatgatattaacc

SEQ ID NO: 2616 - protein, 374 aa, Arabidopsis thaliana
  peptide (1)..(374): Ceres Seq. ID no. 13489417
  misc_feature (218)..(319): Pfam Name: II Pfam Description: 2OG-Fe
  misc_feature (26)..(374): NCBI GI NO: 18402081 NR Description: flavonol synthase family [Arabidopsis thaliana]
  misc_feature (26)..(374): NCBI GI NO: 21593702 NR Description: unknown [Arabidopsis thaliana]
  misc_feature (26)..(289): NCBI GI NO: 30685157 NR Description: flavonol synthase family [Arabidopsis thaliana]
  misc_feature (26)..(371): NCBI GI NO: 18402079 NR Description: oxidoreductase, 2OG-Fe(II) oxygenase family
  misc_feature (29)..(179): NCBI GI NO: 40253917 NR Description: putative Isopenicillin N synthase and related dioxygenases
  misc_feature (244)..(373): NCBI GI NO: 40253917 NR Description: putative Isopenicillin N synthase and related dioxygenases
  misc_feature (67)..(274): NCBI GI NO: 18103924 NR Description: putative oxylase protein [Pinus pinaster]
  misc_feature (52)..(365): NCBI GI NO: 18402992 NR Description: oxidoreductase, 2OG-Fe(II) oxygenase family
  misc_feature (33)..(365): NCBI GI NO: 34907194 NR Description: putative ethylene-forming enzyme
  misc_feature (26)..(340): NCBI GI NO: 15229694 NR Description: oxidoreductase, 2OG-Fe(II) oxygenase family
SKVQTQHKSSSIDFFSSSKLFLRQAMEDLDPTYIQAPEHRSDSNFIPNQPEEIPVIDLSRLDDPEDVQNVISEIGDACEKWGFFQVLNHGVPSDARQRVEKTVKMFFDLPMEEKIKVKRDDVNPVGYHDGEHTKNVKDWKEVFDIYFKDPMVIPSTTDPEDEGLRLVYNKWPQSPSDFREACEVYARHAEKLAFKLLELISLSLGLPKERFHDYFKEQMSFFRINRYPPCPRPDLALGVGHHKDADVISLLAQDDVGGLQVSRRSDGVWFPIRPVPNALVINIGNCMEIWTNDKYWSAEHRVVVNTTRERYSIPFFLLPSHDVEVKPLEELVSPENPPKYKGYKWGKFYVSRNRSDFRKLEIENIQIDDFKVKT

SEQ ID NO: 2617 - protein, 349 aa, Arabidopsis thaliana
  peptide (1)..(349): Ceres Seq. ID no. 13489418
  misc_feature (193)..(294): Pfam Name: II Pfam Description: 2OG-Fe
  misc_feature (1)..(349): NCBI GI NO: 18402081 NR Description: flavonol synthase family [Arabidopsis thaliana]
  misc_feature (1)..(349): NCBI GI NO: 21593702 NR Description: unknown [Arabidopsis thaliana]
  misc_feature (1)..(264): NCBI GI NO: 30685157 NR Description: flavonol synthase family [Arabidopsis thaliana]
  misc_feature (1)..(346): NCBI GI NO: 18402079 NR Description: oxidoreductase, 2OG-Fe(II) oxygenase family
  misc_feature (4)..(154): NCBI GI NO: 40253917 NR Description: putative Isopenicillin N synthase and related dioxygenases
  misc_feature (219)..(348): NCBI GI NO: 40253917 NR Description: putative Isopenicillin N synthase and related dioxygenases
  misc_feature (42)..(249): NCBI GI NO: 18103924 NR Description: putative oxylase protein [Pinus pinaster]
  misc_feature (27)..(340): NCBI GI NO: 18402992 NR Description: oxidoreductase, 2OG-Fe(II) oxygenase family
  misc_feature (8)..(340): NCBI GI NO: 34907194 NR Description: putative ethylene-forming enzyme
  misc_feature (1)..(315): NCBI GI NO: 15229694 NR Description: oxidoreductase, 2OG-Fe(II) oxygenase family
MEDLDPTYIQAPEHRSDSNFIPNQPEEIPVIDLSRLDDPEDVQNVISEIGDACEKWGFFQVLNHGVPSDARQRVEKTVKMFFDLPMEEKIKVKRDDVNPVGYHDGEHTKNVKDWKEVFDIYFKDPMVIPSTTDPEDEGLRLVYNKWPQSPSDFREACEVYARHAEKLAFKLLELISLSLGLPKERFHDYFKEQMSFFRINRYPPCPRPDLALGVGHHKDADVISLLAQDDVGGLQVSRRSDGVWFPIRPVPNALVINIGNCMEIWTNDKYWSAEHRVVVNTTRERYSIPFFLLPSHDVEVKPLEELVSPENPPKYKGYKWGKFYVSRNRSDFRKLEIENIQIDDFKVKT

SEQ ID NO: 2618 - protein, 270 aa, Arabidopsis thaliana
  peptide (1)..(270): Ceres Seq. ID no. 13489419
  misc_feature (114)..(215): Pfam Name: II Pfam Description: 2OG-Fe
  misc_feature (1)..(270): NCBI GI NO: 18402081 NR Description: flavonol synthase family [Arabidopsis thaliana]
  misc_feature (1)..(270): NCBI GI NO: 21593702 NR Description: unknown [Arabidopsis thaliana]
  misc_feature (1)..(185): NCBI GI NO: 30685157 NR Description: flavonol synthase family [Arabidopsis thaliana]
  misc_feature (1)..(267): NCBI GI NO: 18402079 NR Description: oxidoreductase, 2OG-Fe(II) oxygenase family
  misc_feature (1)..(75): NCBI GI NO: 40253917 NR Description: putative Isopenicillin N synthase and related dioxygenases
  misc_feature (140)..(269): NCBI GI NO: 40253917 NR Description: putative Isopenicillin N synthase and related dioxygenases
  misc_feature (1)..(170): NCBI GI NO: 18103924 NR Description: putative oxylase protein [Pinus pinaster]
  misc_feature (1)..(261): NCBI GI NO: 18402992 NR Description: oxidoreductase, 2OG-Fe(II) oxygenase family
  misc_feature (1)..(261): NCBI GI NO: 34907194 NR Description: putative ethylene-forming enzyme
  misc_feature (1)..(236): NCBI GI NO: 15229694 NR Description: oxidoreductase, 2OG-Fe(II) oxygenase family
MFFDLPMEEKIKVKRDDVNPVGYHDGEHTKNVKDWKEVFDIYFKDPMVIPSTTDPEDEGLRLVYNKWPQSPSDFREACEVYARHAEKLAFKLLELISLSLGLPKERFHDYFKEQMSFFRINRYPPCPRPDLALGVGHHKDADVISLLAQDDVGGLQVSRRSDGVWFPIRPVPNALVINIGNCMEIWTNDKYWSAEHRVVVNTTRERYSIPFFLLPSHDVEVKPLEELVSPENPPKYKGYKWGKFYVSRNRSDFRKLEIENIQIDDFKVKT

SEQ ID NO: 2619 - DNA, 1819 bp, Arabidopsis thaliana
  misc_feature (1)..(1819): Ceres Seq. ID no. 12371294
acattctctccttcctcatcatcgttactctcgtgtttatctctccgacgtaaccatggatagcgatactctctcaggattattggaaaacgtcgccaaaaaattccccgatcgccgagctctctccgtttctggaaaattcaatctcactcacgcgcgtcttcacgatctaatcgaacgcgccgcttcacgccttgtctccgacgctggaatcaaacccggcgatgtcgttgctctcaccttccctaacaccgtcgagtttgttataatgtttttagcggtgataagagctagagccacggcggcgccgttgaacgcagcgtacacggcggaggaatttgagttttacctctccgattcagattcaaagctattgttaacctctaaagaaggaaacgcaccggctcaagaagcagcttcaaagctgaaaatctctcacgtcaccgctacgctgcttgacgctggctcggaccttgtactatccgttgcggattcagattccgtcgttgactcagcgacggaactcgttaatcacccggacgacggtgctctcttcctccacacttctggcactacgagccgtccaaagggtgtaccgcttacgcagctcaatctagcttcatccgtcaagaacattaaagctgtgtacaagcttactgagtctgattctacggtgattgttctccctctgttccatgttcatggattgttagctgggttgcttagctcgcttggagctggtgctgctgtaactcttccagctgctggtagattctcagcaacaacattttggccagatatgaagaagtataacgctacatggtatactgctgtgccgaccattcatcagatcatattggaccgccacgcgagccaccctgagacggaatatcctaaactccggttcatcaggagttgcagtgcttctttggctccggtgatattgtccaggcttgaggaagcgtttggagcaccggtgctcgaggcctatgcaatgacagaggcaacacatttgatgagctcaaaccccttaccagaggaaggtccacacaagcctgggtctgttgggaaaccggtaggtcaagaaatggcgatccttaatgagaaaggcgagatccaagagccaaataacaaaggagaggtttgtataagaggtccaaatgtgaccaagggttacaagaataacccagaagccaacaaggcaggtttcgagtttgggtggttccacactggtgatatcggttactttgataccgatgggtatttgcatctggtgggtcggatcaaagagcttattaaccgtggaggtgagaagatatctccaattgaagtggatgcagtactcttaacgcatcctgacgtttctcagggtgttgcattcggtgttcctgatgagaaatatggggaagagattaactgtgcggtgattccaagagaaggaactactgtaaccgaagaggacattaaagcgttttgtaagaagaatttggcagctttcaaggtgccaaagagagtgttcatcactgataacctccccaaaactgcctctggtaagattcagcgccgtatcgtcgcacaacatttccttgagaagccctgaaacacacagaaaacaccatcttgctcgaaaatcatcggtgatgagtcctagttttcacttttcacgcaaatggatatgcgttctctattattggttcttggtttaaaagttactttttatatgtttcatggtggtaaaggttatagattaaatcacaaaagtggaaataaaagtcgataagtgattattgaagtacaacaataaaggagagtttctttt

SEQ ID NO: 2620 - protein, 532 aa, Arabidopsis thaliana
  peptide (1)..(532): Ceres Seq. ID no. 12371295
  misc_feature (50)..(459): Pfam Name: Pfam Description:  AMP-binding enzyme
  misc_feature (19)..(532): NCBI GI NO: 15229062 NR Description: 4-coumarate-CoA ligase -like protein
  misc_feature (19)..(532): NCBI GI NO: 21593705 NR Description: 4-coumarate-CoA ligase-like protein
  misc_feature (19)..(532): NCBI GI NO: 16797908 NR Description: putative acyl-CoA synthetase [Capsicum annuum]
  misc_feature (19)..(529): NCBI GI NO: 32488701 NR Description: OSJNBa0088H09.2
  misc_feature (64)..(528): NCBI GI NO: 19076049 NR Description: putative coenzyme a synthetase
  misc_feature (56)..(532): NCBI GI NO: 28950137 NR Description: probable fatty acid transporter FAT2
  misc_feature (56)..(531): NCBI GI NO: 32421767 NR Description: hypothetical protein [Neurospora crassa]
  misc_feature (28)..(532): NCBI GI NO: 40741124 NR Description: hypothetical protein AN4397.2
  misc_feature (17)..(521): NCBI GI NO: 13475813 NR Description: similar to coenzyme a synthetase
  misc_feature (40)..(526): NCBI GI NO: 23129649 NR Description: hypothetical protein [Nostoc punctiforme]
HSLLPHHRYSRVYLSDVTMDSDTLSGLLENVAKKFPDRRALSVSGKFNLTHARLHDLIERAASRLVSDAGIKPGDVVALTFPNTVEFVIMFLAVIRARATAAPLNAAYTAEEFEFYLSDSDSKLLLTSKEGNAPAQEAASKLKISHVTATLLDAGSDLVLSVADSDSVVDSATELVNHPDDGALFLHTSGTTSRPKGVPLTQLNLASSVKNIKAVYKLTESDSTVIVLPLFHVHGLLAGLLSSLGAGAAVTLPAAGRFSATTFWPDMKKYNATWYTAVPTIHQIILDRHASHPETEYPKLRFIRSCSASLAPVILSRLEEAFGAPVLEAYAMTEATHLMSSNPLPEEGPHKPGSVGKPVGQEMAILNEKGEIQEPNNKGEVCIRGPNVTKGYKNNPEANKAGFEFGWFHTGDIGYFDTDGYLHLVGRIKELINRGGEKISPIEVDAVLLTHPDVSQGVAFGVPDEKYGEEINCAVIPREGTTVTEEDIKAFCKKNLAAFKVPKRVFITDNLPKTASGKIQRRIVAQHFLEKP

SEQ ID NO: 2621 - protein, 514 aa, Arabidopsis thaliana
  peptide (1)..(514): Ceres Seq. ID no. 12371296
  misc_feature (32)..(441): Pfam Name: Pfam Description:  AMP-binding enzyme
  misc_feature (1)..(514): NCBI GI NO: 15229062 NR Description: 4-coumarate-CoA ligase -like protein
  misc_feature (1)..(514): NCBI GI NO: 21593705 NR Description: 4-coumarate-CoA ligase-like protein
  misc_feature (1)..(514): NCBI GI NO: 16797908 NR Description: putative acyl-CoA synthetase [Capsicum annuum]
  misc_feature (1)..(511): NCBI GI NO: 32488701 NR Description: OSJNBa0088H09.2
  misc_feature (46)..(510): NCBI GI NO: 19076049 NR Description: putative coenzyme a synthetase
  misc_feature (38)..(514): NCBI GI NO: 28950137 NR Description: probable fatty acid transporter FAT2
  misc_feature (38)..(513): NCBI GI NO: 32421767 NR Description: hypothetical protein [Neurospora crassa]
  misc_feature (10)..(514): NCBI GI NO: 40741124 NR Description: hypothetical protein AN4397.2
  misc_feature (1)..(503): NCBI GI NO: 13475813 NR Description: similar to coenzyme a synthetase
  misc_feature (22)..(508): NCBI GI NO: 23129649 NR Description: hypothetical protein [Nostoc punctiforme]
MDSDTLSGLLENVAKKFPDRRALSVSGKFNLTHARLHDLIERAASRLVSDAGIKPGDVVALTFPNTVEFVIMFLAVIRARATAAPLNAAYTAEEFEFYLSDSDSKLLLTSKEGNAPAQEAASKLKISHVTATLLDAGSDLVLSVADSDSVVDSATELVNHPDDGALFLHTSGTTSRPKGVPLTQLNLASSVKNIKAVYKLTESDSTVIVLPLFHVHGLLAGLLSSLGAGAAVTLPAAGRFSATTFWPDMKKYNATWYTAVPTIHQIILDRHASHPETEYPKLRFIRSCSASLAPVILSRLEEAFGAPVLEAYAMTEATHLMSSNPLPEEGPHKPGSVGKPVGQEMAILNEKGEIQEPNNKGEVCIRGPNVTKGYKNNPEANKAGFEFGWFHTGDIGYFDTDGYLHLVGRIKELINRGGEKISPIEVDAVLLTHPDVSQGVAFGVPDEKYGEEINCAVIPREGTTVTEEDIKAFCKKNLAAFKVPKRVFITDNLPKTASGKIQRRIVAQHFLEKP

SEQ ID NO: 2622 - protein, 443 aa, Arabidopsis thaliana
  peptide (1)..(443): Ceres Seq. ID no. 12371297
  misc_feature (1)..(370): Pfam Name: Pfam Description:  AMP-binding enzyme
  misc_feature (1)..(443): NCBI GI NO: 15229062 NR Description: 4-coumarate-CoA ligase -like protein
  misc_feature (1)..(443): NCBI GI NO: 21593705 NR Description: 4-coumarate-CoA ligase-like protein
  misc_feature (1)..(443): NCBI GI NO: 16797908 NR Description: putative acyl-CoA synthetase [Capsicum annuum]
  misc_feature (1)..(440): NCBI GI NO: 32488701 NR Description: OSJNBa0088H09.2
  misc_feature (1)..(439): NCBI GI NO: 19076049 NR Description: putative coenzyme a synthetase
  misc_feature (1)..(443): NCBI GI NO: 28950137 NR Description: probable fatty acid transporter FAT2
  misc_feature (1)..(442): NCBI GI NO: 32421767 NR Description: hypothetical protein [Neurospora crassa]
  misc_feature (1)..(443): NCBI GI NO: 40741124 NR Description: hypothetical protein AN4397.2
  misc_feature (1)..(432): NCBI GI NO: 13475813 NR Description: similar to coenzyme a synthetase
  misc_feature (1)..(437): NCBI GI NO: 23129649 NR Description: hypothetical protein [Nostoc punctiforme]
MFLAVIRARATAAPLNAAYTAEEFEFYLSDSDSKLLLTSKEGNAPAQEAASKLKISHVTATLLDAGSDLVLSVADSDSVVDSATELVNHPDDGALFLHTSGTTSRPKGVPLTQLNLASSVKNIKAVYKLTESDSTVIVLPLFHVHGLLAGLLSSLGAGAAVTLPAAGRFSATTFWPDMKKYNATWYTAVPTIHQIILDRHASHPETEYPKLRFIRSCSASLAPVILSRLEEAFGAPVLEAYAMTEATHLMSSNPLPEEGPHKPGSVGKPVGQEMAILNEKGEIQEPNNKGEVCIRGPNVTKGYKNNPEANKAGFEFGWFHTGDIGYFDTDGYLHLVGRIKELINRGGEKISPIEVDAVLLTHPDVSQGVAFGVPDEKYGEEINCAVIPREGTTVTEEDIKAFCKKNLAAFKVPKRVFITDNLPKTASGKIQRRIVAQHFLEKP

SEQ ID NO: 2623 - DNA, 1153 bp, Arabidopsis thaliana
  misc_feature (1)..(1153): Ceres Seq. ID no. 13486623
gtcgacccacgcgtccgctccaagaggagagagagagaaagagattcaattatatgcagagagaaaaagaagccaattggttctctctctctctctctctctctctgattgattgatccagcgattcgtctggctggctcggtttccgcgggaaaaccttcttcttcgttgaccttacacgagttttgttgattcggcagggggatcgacgacggagatggcgattctgtacgccctcgtggctcgtggcacggtggttctttctgagttcaccgccacctctacgaatgcgagcaccatcgccaaacagatcctcgagaaggtccctggagacaacgacagcaacgtctcctactctcaggatcgttacgtcttccacgttaaacgcaccgatggcctcaccgttctctgtatggccgaagaaaccgccggaaggagaattccttttgcctttttggaggatattcaccagagattcgtacggacttatggcagggctgttcatacagcactagcttatgcaatgaatgaggaattctctagagttctcagtcagcagattgactattactctaatgatcctaatgccgataggattaatcgtattaagggtgaaatgaatcaggtgcggggtgtcatgatagaaaacattgacaaagtcctagatagaggtgaacgtttggagcttcttgtcgataaaaccgccaatatgcaggggaatacattccggttcagaaagcaagctcgtcgttttagaagcaacgtctggtggagaaactgcaagctcacggtcctcttaatactactactactggtgatcatatacattgcagtggcctttctctgccacggacctactctaccatcttgcatttaagtgcatctgtctcttaaggaatccatcccgattctgcgcgttgccacgactttttatctcctcatctgattgtaaaccttgtgttttcctgagcattttcatgtggcttaaaaagcttatgtttccaactcacgtatatgaaaaagtatacttatttatagagcaatgtaaaagctcattgctttgcgaagtgtgtgaatctttgttgacatcatgttctataaattacatacatagtggaaaagtgaacaggcttgctttgtctgatatgttcat

SEQ ID NO: 2624 - protein, 219 aa, Arabidopsis thaliana
  peptide (1)..(219): Ceres Seq. ID no. 13486624
  misc_feature (123)..(211): Pfam Name: Pfam Description:  Synaptobrevin
  misc_feature (1)..(219): NCBI GI NO: 15236687 NR Description: synaptobrevin-related protein
  misc_feature (1)..(219): NCBI GI NO: 15224711 NR Description: synaptobrevin -related [Arabidopsis thaliana]
  misc_feature (1)..(218): NCBI GI NO: 15238971 NR Description: synaptobrevin (VAMP713) [Arabidopsis thaliana]
  misc_feature (1)..(219): NCBI GI NO: 34898442 NR Description: ESTs AU082579
  misc_feature (1)..(218): NCBI GI NO: 15242224 NR Description: synaptobrevin-related protein
  misc_feature (1)..(218): NCBI GI NO: 37531190 NR Description: putative synaptobrevin-like protein
  misc_feature (1)..(212): NCBI GI NO: 28828593 NR Description: similar to Arabidopsis thaliana (Mouse-ear cress)
  misc_feature (1)..(219): NCBI GI NO: 33468929 NR Description: synaptobrevin like 1 [Mus musculus]
  misc_feature (1)..(219): NCBI GI NO: 5032137 NR Description: synaptobrevin-like 1 [Homo sapiens]
  misc_feature (1)..(219): NCBI GI NO: 16758296 NR Description: synaptobrevin-like 1 [Rattus norvegicus]
MAILYALVARGTVVLSEFTATSTNASTIAKQILEKVPGDNDSNVSYSQDRYVFHVKRTDGLTVLCMAEETAGRRIPFAFLEDIHQRFVRTYGRAVHTALAYAMNEEFSRVLSQQIDYYSNDPNADRINRIKGEMNQVRGVMIENIDKVLDRGERLELLVDKTANMQGNTFRFRKQARRFRSNVWWRNCKLTVLLILLLLVIIYIAVAFLCHGPTLPSCI

SEQ ID NO: 2625 - protein, 154 aa, Arabidopsis thaliana
  peptide (1)..(154): Ceres Seq. ID no. 13486625
  misc_feature (58)..(146): Pfam Name: Pfam Description:  Synaptobrevin
  misc_feature (1)..(154): NCBI GI NO: 15236687 NR Description: synaptobrevin-related protein
  misc_feature (1)..(154): NCBI GI NO: 15224711 NR Description: synaptobrevin -related [Arabidopsis thaliana]
  misc_feature (1)..(153): NCBI GI NO: 15238971 NR Description: synaptobrevin (VAMP713) [Arabidopsis thaliana]
  misc_feature (1)..(154): NCBI GI NO: 34898442 NR Description: ESTs AU082579
  misc_feature (1)..(153): NCBI GI NO: 15242224 NR Description: synaptobrevin-related protein
  misc_feature (1)..(153): NCBI GI NO: 37531190 NR Description: putative synaptobrevin-like protein
  misc_feature (1)..(147): NCBI GI NO: 28828593 NR Description: similar to Arabidopsis thaliana (Mouse-ear cress)
  misc_feature (1)..(154): NCBI GI NO: 33468929 NR Description: synaptobrevin like 1 [Mus musculus]
  misc_feature (1)..(154): NCBI GI NO: 5032137 NR Description: synaptobrevin-like 1 [Homo sapiens]
  misc_feature (1)..(154): NCBI GI NO: 16758296 NR Description: synaptobrevin-like 1 [Rattus norvegicus]
MAEETAGRRIPFAFLEDIHQRFVRTYGRAVHTALAYAMNEEFSRVLSQQIDYYSNDPNADRINRIKGEMNQVRGVMIENIDKVLDRGERLELLVDKTANMQGNTFRFRKQARRFRSNVWWRNCKLTVLLILLLLVIIYIAVAFLCHGPTLPSCI

SEQ ID NO: 2626 - protein, 117 aa, Arabidopsis thaliana
  peptide (1)..(117): Ceres Seq. ID no. 13486626
  misc_feature (21)..(109): Pfam Name: Pfam Description:  Synaptobrevin
  misc_feature (1)..(117): NCBI GI NO: 15236687 NR Description: synaptobrevin-related protein
  misc_feature (1)..(117): NCBI GI NO: 15224711 NR Description: synaptobrevin -related [Arabidopsis thaliana]
  misc_feature (1)..(116): NCBI GI NO: 15238971 NR Description: synaptobrevin (VAMP713) [Arabidopsis thaliana]
  misc_feature (1)..(117): NCBI GI NO: 34898442 NR Description: ESTs AU082579
  misc_feature (1)..(116): NCBI GI NO: 15242224 NR Description: synaptobrevin-related protein
  misc_feature (1)..(116): NCBI GI NO: 37531190 NR Description: putative synaptobrevin-like protein
  misc_feature (1)..(110): NCBI GI NO: 28828593 NR Description: similar to Arabidopsis thaliana (Mouse-ear cress)
  misc_feature (1)..(117): NCBI GI NO: 33468929 NR Description: synaptobrevin like 1 [Mus musculus]
  misc_feature (1)..(117): NCBI GI NO: 5032137 NR Description: synaptobrevin-like 1 [Homo sapiens]
  misc_feature (1)..(117): NCBI GI NO: 16758296 NR Description: synaptobrevin-like 1 [Rattus norvegicus]
MNEEFSRVLSQQIDYYSNDPNADRINRIKGEMNQVRGVMIENIDKVLDRGERLELLVDKTANMQGNTFRFRKQARRFRSNVWWRNCKLTVLLILLLLVIIYIAVAFLCHGPTLPSCI

SEQ ID NO: 2627 - DNA, 1369 bp, Arabidopsis thaliana
  misc_feature (1)..(1369): Ceres Seq. ID no. 12489536
aatctactgttctctctcctatctgggcaaaaatctcagacaaacctgcaaaattagggtatttgaggatatggattatgatcggtacaagttatttgttggtggtattgcgaaagagacaagtgaagaagctctgaagcattattttagcagatatggagctgtgttggaagctgttgtagctaaagagaaagtcactggaaaacctagaggttttgggtttgttcgctttgctaatgattgtgatgttgttaaagctcttagagacactcacttcattctcggtaaacccgttgatgtgagaaaggcgattaggaaacatgaaatataccaacagccgtttagcatgcagtttttggagagaaaaatgcaacagatgaatggtggtttgcgtgagatgtcgagtaatggtgtgacccataggtctaagaagatatttgttgggggtttgtcgtctaacacgactgaagaagagtttaagagttactttgagaggtttggtaggactactgatgtagttgtgatgcatgacggtgtgactaacaggccaaggggttttgggtttgttacttatgattcggaggactctgttgaggttgttatgcagagtaatttccatgagttgagtgataaacgcgtggaagtgaaacgggcaatacctaaagaaggaatccagagcaataacggtaatgctgttaatgttcctccttcctacagcagctttcaagcaacaccttatgtccctgagcaaaacggatatgggatggttttacagtatcctcctcctgtctttggttatcatcacaatgtccaagccgttcaatatccttatggttaccaattcacagcacaagtggctaacgtttcatggaacaatccgattatgcaacccaccggtttttactgtgctcctcctcatcctactactcctcccaccaacaatcttggttatatccaatacatgaacgggtttgatctttcgggtacgaacattaccgggtacaatcctctagcatgccctgtaacgggggatgcagctggtgcgctaatacatcagtttggagatttgaagcttgatgtccacagtcaagcccatcagagaatgaatggaggtaacatgggaataccattgcagaatggtacatatatatgacagttgcagttgcagaaataggctcacaaggctagtgaaattctttggactcttttaaatggttttttaggttcctcatctttcttcattaactcttttggtaaatgtgttggtttggtttggttaccttgtatattgtttaggtatttgattttaaccccaagacttatgtatcatatcttactgcatttgtaatatatcacactcatttcgttc

SEQ ID NO: 2628 - protein, 383 aa, Arabidopsis thaliana
  peptide (1)..(383): Ceres Seq. ID no. 12489537
  misc_feature (145)..(215): Pfam Name: a.k.a. RRM, RBD, or RNP domain Pfam Description: RNA recognition motif.
  misc_feature (24)..(383): NCBI GI NO: 15217975 NR Description: RRM-containing RNA-binding protein, putative
  misc_feature (24)..(376): NCBI GI NO: 25456498 NR Description: RNA binding protein
  misc_feature (27)..(269): NCBI GI NO: 7487039 NR Description: hypothetical protein T15N24
  misc_feature (27)..(269): NCBI GI NO: 18416794 NR Description: heterogeneous nuclear ribonucleoprotein
  misc_feature (24)..(269): NCBI GI NO: 9758187 NR Description: RNA-binding protein-like [Arabidopsis thaliana]
  misc_feature (24)..(269): NCBI GI NO: 22531168 NR Description: RNA-binding protein-like [Arabidopsis thaliana]
  misc_feature (24)..(269): NCBI GI NO: 30696616 NR Description: RNA recognition motif (RRM)-containing protein
  misc_feature (24)..(269): NCBI GI NO: 18423760 NR Description: heterogeneous nuclear ribonucleoprotein
  misc_feature (24)..(266): NCBI GI NO: 38175737 NR Description: putative heterogeneous nuclear ribonucleoprotein A1
  misc_feature (24)..(333): NCBI GI NO: 15292697 NR Description: putative RNA-binding protein
IYCSLSYLGKNLRQTCKIRVFEDMDYDRYKLFVGGIAKETSEEALKHYFSRYGAVLEAVVAKEKVTGKPRGFGFVRFANDCDVVKALRDTHFILGKPVDVRKAIRKHEIYQQPFSMQFLERKMQQMNGGLREMSSNGVTHRSKKIFVGGLSSNTTEEEFKSYFERFGRTTDVVVMHDGVTNRPRGFGFVTYDSEDSVEVVMQSNFHELSDKRVEVKRAIPKEGIQSNNGNAVNVPPSYSSFQATPYVPEQNGYGMVLQYPPPVFGYHHNVQAVQYPYGYQFTAQVANVSWNNPIMQPTGFYCAPPHPTTPPTNNLGYIQYMNGFDLSGTNITGYNPLACPVTGDAAGALIHQFGDLKLDVHSQAHQRMNGGNMGIPLQNGTYI

SEQ ID NO: 2629 - protein, 360 aa, Arabidopsis thaliana
  peptide (1)..(360): Ceres Seq. ID no. 12489538
  misc_feature (122)..(192): Pfam Name: a.k.a. RRM, RBD, or RNP domain Pfam Description: RNA recognition motif.
  misc_feature (1)..(360): NCBI GI NO: 15217975 NR Description: RRM-containing RNA-binding protein, putative
  misc_feature (1)..(353): NCBI GI NO: 25456498 NR Description: RNA binding protein
  misc_feature (4)..(246): NCBI GI NO: 7487039 NR Description: hypothetical protein T15N24
  misc_feature (4)..(246): NCBI GI NO: 18416794 NR Description: heterogeneous nuclear ribonucleoprotein
  misc_feature (1)..(246): NCBI GI NO: 9758187 NR Description: RNA-binding protein-like [Arabidopsis thaliana]
  misc_feature (1)..(246): NCBI GI NO: 30696616 NR Description: RNA recognition motif (RRM)-containing protein
  misc_feature (1)..(246): NCBI GI NO: 22531168 NR Description: RNA-binding protein-like [Arabidopsis thaliana]
  misc_feature (1)..(246): NCBI GI NO: 18423760 NR Description: heterogeneous nuclear ribonucleoprotein
  misc_feature (1)..(243): NCBI GI NO: 38175737 NR Description: putative heterogeneous nuclear ribonucleoprotein A1
  misc_feature (1)..(310): NCBI GI NO: 15292697 NR Description: putative RNA-binding protein
MDYDRYKLFVGGIAKETSEEALKHYFSRYGAVLEAVVAKEKVTGKPRGFGFVRFANDCDVVKALRDTHFILGKPVDVRKAIRKHEIYQQPFSMQFLERKMQQMNGGLREMSSNGVTHRSKKIFVGGLSSNTTEEEFKSYFERFGRTTDVVVMHDGVTNRPRGFGFVTYDSEDSVEVVMQSNFHELSDKRVEVKRAIPKEGIQSNNGNAVNVPPSYSSFQATPYVPEQNGYGMVLQYPPPVFGYHHNVQAVQYPYGYQFTAQVANVSWNNPIMQPTGFYCAPPHPTTPPTNNLGYIQYMNGFDLSGTNITGYNPLACPVTGDAAGALIHQFGDLKLDVHSQAHQRMNGGNMGIPLQNGTYI

SEQ ID NO: 2630 - protein, 268 aa, Arabidopsis thaliana
  peptide (1)..(268): Ceres Seq. ID no. 12489539
  misc_feature (30)..(100): Pfam Name: a.k.a. RRM, RBD, or RNP domain Pfam Description: RNA recognition motif.
  misc_feature (1)..(268): NCBI GI NO: 15217975 NR Description: RRM-containing RNA-binding protein, putative
  misc_feature (1)..(261): NCBI GI NO: 25456498 NR Description: RNA binding protein
  misc_feature (1)..(154): NCBI GI NO: 7487039 NR Description: hypothetical protein T15N24
  misc_feature (1)..(154): NCBI GI NO: 18416794 NR Description: heterogeneous nuclear ribonucleoprotein
  misc_feature (1)..(154): NCBI GI NO: 9758187 NR Description: RNA-binding protein-like [Arabidopsis thaliana]
  misc_feature (1)..(154): NCBI GI NO: 30696616 NR Description: RNA recognition motif (RRM)-containing protein
  misc_feature (1)..(154): NCBI GI NO: 22531168 NR Description: RNA-binding protein-like [Arabidopsis thaliana]
  misc_feature (1)..(154): NCBI GI NO: 18423760 NR Description: heterogeneous nuclear ribonucleoprotein
  misc_feature (1)..(151): NCBI GI NO: 38175737 NR Description: putative heterogeneous nuclear ribonucleoprotein A1
  misc_feature (1)..(218): NCBI GI NO: 15292697 NR Description: putative RNA-binding protein
MQFLERKMQQMNGGLREMSSNGVTHRSKKIFVGGLSSNTTEEEFKSYFERFGRTTDVVVMHDGVTNRPRGFGFVTYDSEDSVEVVMQSNFHELSDKRVEVKRAIPKEGIQSNNGNAVNVPPSYSSFQATPYVPEQNGYGMVLQYPPPVFGYHHNVQAVQYPYGYQFTAQVANVSWNNPIMQPTGFYCAPPHPTTPPTNNLGYIQYMNGFDLSGTNITGYNPLACPVTGDAAGALIHQFGDLKLDVHSQAHQRMNGGNMGIPLQNGTYI

SEQ ID NO: 2631 - DNA, 1146 bp, Arabidopsis thaliana
  misc_feature (1)..(1146): Ceres Seq. ID no. 12327345
aactttctcctcagggtatgctccaaattcccaacttggcctctctttttcatcttttgggtttttatgttcactcttctctgcttcattcctctttctacttccaggaaataaaaacttctaatcaaagagcaagagattaagaaatgtatgcagaaactagcttagctttccgattcatgcagagttcttcttctccagagattcaccaatttgaagacctctttaaatcctacaagctctctgatgaaatgaacaatcttgttgaggcaagtgagtatgattttggagaagagagtgacctattcaaagcccctgagccgattattgaagaaccaatgttagctgttgatcccctctctcaagagcttgttgaactcggtgatctcgggtcgttgcagagtgaccaacagcttatagacaaggctttctacgactgtgagcaggacctcctggtgaaatcagccatggagtctccgctctccgaggtactagacatcaagaacatctctttagtggcaaaaatggacaacgatgtgaagagtacgagtgtagtcgtctctgatgtcccaattccgaagagtgtgagctcgggaaacttgagctcaatggatatggtcgagcacaaggatgcggtgattcagggattccctgatttccctccagtggattatgggatgagaagagccttcagtgaaagcgatatacagacactggggactggaaatacgggtcttgttcagtctcagttggatcgaataatcataagttgcacctctgaggaccgccgtgagaagctttctcgatacaggaacaagaagagcaagcgaaatttcgggcgtaaaatcaagtatgcttgtaggaaggcacttgcagacagtcaaccgaggatccgaggaaggtttgcaaaaacagaggagatgcagaaatgatgaggactagttaggtctgatgcggtgttaagaatataatcccacccacctctcgttttgtatataagggggtttgtctgaataagcctagtaaggagtaaggattaggaagaaaaaacaagttgtagtagtcagtcactcaagtaatgatgcttatatatgttagatcttgtgaagttatgtatctctaaaagtttatatatagaagctgttt

SEQ ID NO: 2632 - protein, 261 aa, Arabidopsis thaliana
  peptide (1)..(261): Ceres Seq. ID no. 12327346
  misc_feature (219)..(258): Pfam Name: Pfam Description:  CCT motif
  misc_feature (1)..(261): NCBI GI NO: 15234310 NR Description: putative protein; protein id: At4g27900
  misc_feature (36)..(261): NCBI GI NO: 21593708 NR Description: unknown [Arabidopsis thaliana]
  misc_feature (1)..(258): NCBI GI NO: 18423511 NR Description: putative protein; protein id: At5g53420
  misc_feature (1)..(258): NCBI GI NO: 8843771 NR Description: gene_id:MYN8
  misc_feature (36)..(258): NCBI GI NO: 21536819 NR Description: unknown [Arabidopsis thaliana]
  misc_feature (190)..(258): NCBI GI NO: 26451419 NR Description: unknown protein [Arabidopsis thaliana]
  misc_feature (170)..(261): NCBI GI NO: 15238589 NR Description: putative protein; protein id: At5g59990.1
  misc_feature (178)..(261): NCBI GI NO: 15238070 NR Description: putative protein; protein id: At5g41380.1
  misc_feature (210)..(259): NCBI GI NO: 15222540 NR Description: hypothetical protein; protein id: At1g63820.1
  misc_feature (196)..(258): NCBI GI NO: 15225838 NR Description: hypothetical protein; protein id: At2g33350.1
MYAETSLAFRFMQSSSSPEIHQFEDLFKSYKLSDEMNNLVEASEYDFGEESDLFKAPEPIIEEPMLAVDPLSQELVELGDLGSLQSDQQLIDKAFYDCEQDLLVKSAMESPLSEVLDIKNISLVAKMDNDVKSTSVVVSDVPIPKSVSSGNLSSMDMVEHKDAVIQGFPDFPPVDYGMRRAFSESDIQTLGTGNTGLVQSQLDRIIISCTSEDRREKLSRYRNKKSKRNFGRKIKYACRKALADSQPRIRGRFAKTEEMQK

SEQ ID NO: 2633 - protein, 250 aa, Arabidopsis thaliana
  peptide (1)..(250): Ceres Seq. ID no. 12327347
  misc_feature (208)..(247): Pfam Name: Pfam Description:  CCT motif
  misc_feature (1)..(250): NCBI GI NO: 15234310 NR Description: putative protein; protein id: At4g27900
  misc_feature (25)..(250): NCBI GI NO: 21593708 NR Description: unknown [Arabidopsis thaliana]
  misc_feature (1)..(247): NCBI GI NO: 18423511 NR Description: putative protein; protein id: At5g53420
  misc_feature (1)..(247): NCBI GI NO: 8843771 NR Description: gene_id:MYN8
  misc_feature (25)..(247): NCBI GI NO: 21536819 NR Description: unknown [Arabidopsis thaliana]
  misc_feature (179)..(247): NCBI GI NO: 26451419 NR Description: unknown protein [Arabidopsis thaliana]
  misc_feature (159)..(250): NCBI GI NO: 15238589 NR Description: putative protein; protein id: At5g59990.1
  misc_feature (167)..(250): NCBI GI NO: 15238070 NR Description: putative protein; protein id: At5g41380.1
  misc_feature (199)..(248): NCBI GI NO: 15222540 NR Description: hypothetical protein; protein id: At1g63820.1
  misc_feature (185)..(247): NCBI GI NO: 15225838 NR Description: hypothetical protein; protein id: At2g33350.1
MQSSSSPEIHQFEDLFKSYKLSDEMNNLVEASEYDFGEESDLFKAPEPIIEEPMLAVDPLSQELVELGDLGSLQSDQQLIDKAFYDCEQDLLVKSAMESPLSEVLDIKNISLVAKMDNDVKSTSVVVSDVPIPKSVSSGNLSSMDMVEHKDAVIQGFPDFPPVDYGMRRAFSESDIQTLGTGNTGLVQSQLDRIIISCTSEDRREKLSRYRNKKSKRNFGRKIKYACRKALADSQPRIRGRFAKTEEMQK

SEQ ID NO: 2634 - protein, 226 aa, Arabidopsis thaliana
  peptide (1)..(226): Ceres Seq. ID no. 12327348
  misc_feature (184)..(223): Pfam Name: Pfam Description:  CCT motif
  misc_feature (1)..(226): NCBI GI NO: 15234310 NR Description: putative protein; protein id: At4g27900
  misc_feature (1)..(226): NCBI GI NO: 21593708 NR Description: unknown [Arabidopsis thaliana]
  misc_feature (1)..(223): NCBI GI NO: 18423511 NR Description: putative protein; protein id: At5g53420
  misc_feature (1)..(223): NCBI GI NO: 8843771 NR Description: gene_id:MYN8
  misc_feature (1)..(223): NCBI GI NO: 21536819 NR Description: unknown [Arabidopsis thaliana]
  misc_feature (155)..(223): NCBI GI NO: 26451419 NR Description: unknown protein [Arabidopsis thaliana]
  misc_feature (135)..(226): NCBI GI NO: 15238589 NR Description: putative protein; protein id: At5g59990.1
  misc_feature (143)..(226): NCBI GI NO: 15238070 NR Description: putative protein; protein id: At5g41380.1
  misc_feature (175)..(224): NCBI GI NO: 15222540 NR Description: hypothetical protein; protein id: At1g63820.1
  misc_feature (161)..(223): NCBI GI NO: 15225838 NR Description: hypothetical protein; protein id: At2g33350.1
MNNLVEASEYDFGEESDLFKAPEPIIEEPMLAVDPLSQELVELGDLGSLQSDQQLIDKAFYDCEQDLLVKSAMESPLSEVLDIKNISLVAKMDNDVKSTSVVVSDVPIPKSVSSGNLSSMDMVEHKDAVIQGFPDFPPVDYGMRRAFSESDIQTLGTGNTGLVQSQLDRIIISCTSEDRREKLSRYRNKKSKRNFGRKIKYACRKALADSQPRIRGRFAKTEEMQK

SEQ ID NO: 2635 - DNA, 1169 bp, Arabidopsis thaliana
  misc_feature (1)..(1169): Ceres Seq. ID no. 12322221
gttgcgttattcttctggataagagcttcgtgatggtttgaaacctctgagtgaagaagaagcgccatggctgggattaccagcagcaccgttggattcaacgccgtcttcaccggaataaccaaaacagtatcatcacattcactcttctctgttgattccaaactctgtagtcttcgtctctccaaaaccgaactgtctttcactaatctcactccttctcctcgccgtgctttcgccgtcacttgccgcttcggcggtggtggtggaggttatcgattctctggagacaatagaagaggtaggccgaaagaagctgaaattgatgaagctcttgatatctcctcaattaggtcagctactgttaggcttatcgatgggcaacaaaacatgcttggtttagtgtctaaagacgaagccgttcgaatggctgatgatgctgaacttgatctggttatactatcgcctgatgcagatcctccggttgttaaaatgatggactacagtaaatacagatacgaacagcaaaagaggaaaaaagatcagcaaaagaaaacaactcgcatggatttaaaggagcttaaaatgggttataatattgatcagcatgattattccgttcgtctaagggctgcccaaaagttcttgcaagatggtgacaaggttaaggtgattgtgagcatgaaaggacgagaaaacgagttcagaaatatcgctattgaactcctcagacgtttccaaaccgaaataggggagcttgcaactgaagagagcaaaaacttcagggacagaaatatgttcattatcttggtcccaaacaaagaaatgattcggaaaccacaagaaccacccacaagaaagaagaaaaaaacagcggaaaacgaagcttcagcttcagctgcagaaataacagctgagcctgagcctgagcctgagcctgagcctgaacctgagcctgagcctgagcctgagcctgagccagagcctctacagatcgattcttgagtttaaaatcttgtggtaggattttcagagctaaagtaaagttttgtatatttacttttctaccatgtctcaagagagccaagagctgtataacaaatagagttagtcctatttgaatgatgttcttcgtttgtagatcttttctctaatctatttttttgttt

SEQ ID NO: 2636 - protein, 312 aa, Arabidopsis thaliana
  peptide (1)..(312): Ceres Seq. ID no. 12322222
  misc_feature (166)..(252): Pfam Name: Pfam Description:  Translation initiation factor IF-3
  misc_feature (1)..(312): NCBI GI NO: 15224088 NR Description: putative chloroplast initiation factor 3
  misc_feature (1)..(283): NCBI GI NO: 18417644 NR Description: putative protein; protein id: At4g30690
  misc_feature (1)..(164): NCBI GI NO: 25407671 NR Description: hypothetical protein AT4g30690
  misc_feature (82)..(269): NCBI GI NO: 33241247 NR Description: Translation initiation factor 3
  misc_feature (82)..(284): NCBI GI NO: 33864629 NR Description: translation initiation factor IF-3
  misc_feature (95)..(252): NCBI GI NO: 17232115 NR Description: translation initiation factor IF-3
  misc_feature (95)..(252): NCBI GI NO: 20138475 NR Description: Translation initiation factor IF-3
  misc_feature (95)..(253): NCBI GI NO: 20808119 NR Description: Translation initiation factor IF3
  misc_feature (75)..(306): NCBI GI NO: 547710 NR Description: TRANSLATION INITIATION FACTOR IF-3
  misc_feature (95)..(252): NCBI GI NO: 23128110 NR Description: hypothetical protein [Nostoc punctiforme]
MAGITSSTVGFNAVFTGITKTVSSHSLFSVDSKLCSLRLSKTELSFTNLTPSPRRAFAVTCRFGGGGGGYRFSGDNRRGRPKEAEIDEALDISSIRSATVRLIDGQQNMLGLVSKDEAVRMADDAELDLVILSPDADPPVVKMMDYSKYRYEQQKRKKDQQKKTTRMDLKELKMGYNIDQHDYSVRLRAAQKFLQDGDKVKVIVSMKGRENEFRNIAIELLRRFQTEIGELATEESKNFRDRNMFIILVPNKEMIRKPQEPPTRKKKKTAENEASASAAEITAEPEPEPEPEPEPEPEPEPEPEPEPLQIDS

SEQ ID NO: 2637 - protein, 204 aa, Arabidopsis thaliana
  peptide (1)..(204): Ceres Seq. ID no. 12322223
  misc_feature (58)..(144): Pfam Name: Pfam Description:  Translation initiation factor IF-3
  misc_feature (1)..(204): NCBI GI NO: 15224088 NR Description: putative chloroplast initiation factor 3
  misc_feature (1)..(175): NCBI GI NO: 18417644 NR Description: putative protein; protein id: At4g30690
  misc_feature (1)..(56): NCBI GI NO: 25407671 NR Description: hypothetical protein AT4g30690
  misc_feature (1)..(161): NCBI GI NO: 33241247 NR Description: Translation initiation factor 3
  misc_feature (1)..(176): NCBI GI NO: 33864629 NR Description: translation initiation factor IF-3
  misc_feature (1)..(144): NCBI GI NO: 17232115 NR Description: translation initiation factor IF-3
  misc_feature (1)..(144): NCBI GI NO: 20138475 NR Description: Translation initiation factor IF-3
  misc_feature (1)..(145): NCBI GI NO: 20808119 NR Description: Translation initiation factor IF3
  misc_feature (1)..(198): NCBI GI NO: 547710 NR Description: TRANSLATION INITIATION FACTOR IF-3
  misc_feature (1)..(144): NCBI GI NO: 23128110 NR Description: hypothetical protein [Nostoc punctiforme]
MLGLVSKDEAVRMADDAELDLVILSPDADPPVVKMMDYSKYRYEQQKRKKDQQKKTTRMDLKELKMGYNIDQHDYSVRLRAAQKFLQDGDKVKVIVSMKGRENEFRNIAIELLRRFQTEIGELATEESKNFRDRNMFIILVPNKEMIRKPQEPPTRKKKKTAENEASASAAEITAEPEPEPEPEPEPEPEPEPEPEPEPLQIDS

SEQ ID NO: 2638 - protein, 192 aa, Arabidopsis thaliana
  peptide (1)..(192): Ceres Seq. ID no. 12322224
  misc_feature (46)..(132): Pfam Name: Pfam Description:  Translation initiation factor IF-3
  misc_feature (1)..(192): NCBI GI NO: 15224088 NR Description: putative chloroplast initiation factor 3
  misc_feature (1)..(163): NCBI GI NO: 18417644 NR Description: putative protein; protein id: At4g30690
  misc_feature (1)..(44): NCBI GI NO: 25407671 NR Description: hypothetical protein AT4g30690
  misc_feature (1)..(149): NCBI GI NO: 33241247 NR Description: Translation initiation factor 3
  misc_feature (1)..(164): NCBI GI NO: 33864629 NR Description: translation initiation factor IF-3
  misc_feature (1)..(132): NCBI GI NO: 17232115 NR Description: translation initiation factor IF-3
  misc_feature (1)..(132): NCBI GI NO: 20138475 NR Description: Translation initiation factor IF-3
  misc_feature (1)..(133): NCBI GI NO: 20808119 NR Description: Translation initiation factor IF3
  misc_feature (1)..(186): NCBI GI NO: 547710 NR Description: TRANSLATION INITIATION FACTOR IF-3
  misc_feature (1)..(132): NCBI GI NO: 23128110 NR Description: hypothetical protein [Nostoc punctiforme]
MADDAELDLVILSPDADPPVVKMMDYSKYRYEQQKRKKDQQKKTTRMDLKELKMGYNIDQHDYSVRLRAAQKFLQDGDKVKVIVSMKGRENEFRNIAIELLRRFQTEIGELATEESKNFRDRNMFIILVPNKEMIRKPQEPPTRKKKKTAENEASASAAEITAEPEPEPEPEPEPEPEPEPEPEPEPLQIDS

SEQ ID NO: 2639 - DNA, 1380 bp, Arabidopsis thaliana
  misc_feature (1)..(1380): Ceres Seq. ID no. 12462129
aataatcattcatcagggccctgtgttctctgagtcaagtcaggaactgatgaataaccctgtaccgtgtcagtcggtctctggtggcaattctggtggttatttgtttccttcttcctctggatactgcaatgtttcagctgtcttgcctcatggaaggaatttgcaaaaccagccacctgtttccaccgtgcctagagacagattggctatgcaggattgtcctttgatagctcaatcctcgttgattaatcatcaccctcaagagttcatagatccacttcatgagttctttgatttctctgatcatgttcctgttcagaatctacaagcagagagtagtggagtaagggtggactcatccgtggaacttcataagaaaagtgaatggcaagattgggcagatcagctgatttctgttgacgatggttctgagccaaattggtctgaacttcttggagattcaagttcccacaatccaaattcagagatacctacaccatttttggatgtaccaaggctagatataacagctaaccagcagcaacagatggtttcatcagaggaccagctcagcggcagaaactcatcatctagtgtagcaacatctaaacaacgtatgcgttggacaccagaacttcacgaggcattcgttgaagctgttaatcagcttggtggtagtgaacgagccacccctaaggctgttttgaagctcttgaataaccctggcttgaccatttatcatgtaaaaagccatttgcagaaatatagaacggcaaggtataaaccggagacttcggaagttacaggagaacctcaagagaagaagatgacatctattgaagatatcaaatctcttgacatgaaaacgagcgttgagatcacacaagctctacggttacaaatggaagtgcagaaacgtctccacgagcagctcgagatccaacggtcactgcagttacagattgaaaaacagggccggtacctacagatgatgttcgagaaacaacaaaagatacaagacaacaagagctcttcttcagaagcatcaccaaagcaatgcaatggttcatttgcagaagttgaagttggtcttgagacactaacaggggaccaaaatgaatctgcttcagcatcaaggaaacgtgtcagagaagattaaagcatgtttaatttgatctcgtttgacgaaacatgtttattgggaattaattgtggaaaccaactccagttttgttaaaagaatctgtttctttcttagctctgtattgttctagtttagaagcagttgatttggccttgcatggctgcaacactaactaaagagtaaagactaattgtgtatatctacatatacatttttggggacgatttgtgtcc

SEQ ID NO: 2640 - protein, 386 aa, Arabidopsis thaliana
  peptide (1)..(386): Ceres Seq. ID no. 12462130
  misc_feature (206)..(257): Pfam Name: Pfam Description:  Myb-like DNA-binding domain
  misc_feature (2)..(386): NCBI GI NO: 21954075 NR Description: unknown protein [Arabidopsis thaliana]
  misc_feature (12)..(386): NCBI GI NO: 21537366 NR Description: transfactor, putative [Arabidopsis thaliana]
  misc_feature (12)..(386): NCBI GI NO: 30692110 NR Description: expressed protein [Arabidopsis thaliana]
  misc_feature (17)..(386): NCBI GI NO: 30692105 NR Description: expressed protein [Arabidopsis thaliana]
  misc_feature (18)..(350): NCBI GI NO: 26452281 NR Description: putative transfactor [Arabidopsis thaliana]
  misc_feature (12)..(350): NCBI GI NO: 15229298 NR Description: transfactor, putative; protein id: At3g04450.1
  misc_feature (97)..(352): NCBI GI NO: 22329004 NR Description: putative protein; protein id: At4g28610
  misc_feature (97)..(352): NCBI GI NO: 7487685 NR Description: hypothetical protein T5F17
  misc_feature (7)..(360): NCBI GI NO: 6942190 NR Description: CDPK substrate protein 1; CSP1
  misc_feature (141)..(338): NCBI GI NO: 4519671 NR Description: transfactor [Nicotiana tabacum]
IIIHQGPVFSESSQELMNNPVPCQSVSGGNSGGYLFPSSSGYCNVSAVLPHGRNLQNQPPVSTVPRDRLAMQDCPLIAQSSLINHHPQEFIDPLHEFFDFSDHVPVQNLQAESSGVRVDSSVELHKKSEWQDWADQLISVDDGSEPNWSELLGDSSSHNPNSEIPTPFLDVPRLDITANQQQQMVSSEDQLSGRNSSSSVATSKQRMRWTPELHEAFVEAVNQLGGSERATPKAVLKLLNNPGLTIYHVKSHLQKYRTARYKPETSEVTGEPQEKKMTSIEDIKSLDMKTSVEITQALRLQMEVQKRLHEQLEIQRSLQLQIEKQGRYLQMMFEKQQKIQDNKSSSSEASPKQCNGSFAEVEVGLETLTGDQNESASASRKRVRED

SEQ ID NO: 2641 - protein, 370 aa, Arabidopsis thaliana
  peptide (1)..(370): Ceres Seq. ID no. 12462131
  misc_feature (190)..(241): Pfam Name: Pfam Description:  Myb-like DNA-binding domain
  misc_feature (1)..(370): NCBI GI NO: 21954075 NR Description: unknown protein [Arabidopsis thaliana]
  misc_feature (1)..(370): NCBI GI NO: 21537366 NR Description: transfactor, putative [Arabidopsis thaliana]
  misc_feature (1)..(370): NCBI GI NO: 30692110 NR Description: expressed protein [Arabidopsis thaliana]
  misc_feature (1)..(370): NCBI GI NO: 30692105 NR Description: expressed protein [Arabidopsis thaliana]
  misc_feature (2)..(334): NCBI GI NO: 26452281 NR Description: putative transfactor [Arabidopsis thaliana]
  misc_feature (1)..(334): NCBI GI NO: 15229298 NR Description: transfactor, putative; protein id: At3g04450.1
  misc_feature (81)..(336): NCBI GI NO: 22329004 NR Description: putative protein; protein id: At4g28610
  misc_feature (81)..(336): NCBI GI NO: 7487685 NR Description: hypothetical protein T5F17
  misc_feature (1)..(344): NCBI GI NO: 6942190 NR Description: CDPK substrate protein 1; CSP1
  misc_feature (125)..(322): NCBI GI NO: 4519671 NR Description: transfactor [Nicotiana tabacum]
MNNPVPCQSVSGGNSGGYLFPSSSGYCNVSAVLPHGRNLQNQPPVSTVPRDRLAMQDCPLIAQSSLINHHPQEFIDPLHEFFDFSDHVPVQNLQAESSGVRVDSSVELHKKSEWQDWADQLISVDDGSEPNWSELLGDSSSHNPNSEIPTPFLDVPRLDITANQQQQMVSSEDQLSGRNSSSSVATSKQRMRWTPELHEAFVEAVNQLGGSERATPKAVLKLLNNPGLTIYHVKSHLQKYRTARYKPETSEVTGEPQEKKMTSIEDIKSLDMKTSVEITQALRLQMEVQKRLHEQLEIQRSLQLQIEKQGRYLQMMFEKQQKIQDNKSSSSEASPKQCNGSFAEVEVGLETLTGDQNESASASRKRVRED

SEQ ID NO: 2642 - protein, 316 aa, Arabidopsis thaliana
  peptide (1)..(316): Ceres Seq. ID no. 12462132
  misc_feature (136)..(187): Pfam Name: Pfam Description:  Myb-like DNA-binding domain
  misc_feature (1)..(316): NCBI GI NO: 21954075 NR Description: unknown protein [Arabidopsis thaliana]
  misc_feature (1)..(316): NCBI GI NO: 21537366 NR Description: transfactor, putative [Arabidopsis thaliana]
  misc_feature (1)..(316): NCBI GI NO: 30692110 NR Description: expressed protein [Arabidopsis thaliana]
  misc_feature (1)..(316): NCBI GI NO: 30692105 NR Description: expressed protein [Arabidopsis thaliana]
  misc_feature (1)..(280): NCBI GI NO: 26452281 NR Description: putative transfactor [Arabidopsis thaliana]
  misc_feature (1)..(280): NCBI GI NO: 15229298 NR Description: transfactor, putative; protein id: At3g04450.1
  misc_feature (27)..(282): NCBI GI NO: 22329004 NR Description: putative protein; protein id: At4g28610
  misc_feature (27)..(282): NCBI GI NO: 7487685 NR Description: hypothetical protein T5F17
  misc_feature (1)..(290): NCBI GI NO: 6942190 NR Description: CDPK substrate protein 1; CSP1
  misc_feature (71)..(268): NCBI GI NO: 4519671 NR Description: transfactor [Nicotiana tabacum]
MQDCPLIAQSSLINHHPQEFIDPLHEFFDFSDHVPVQNLQAESSGVRVDSSVELHKKSEWQDWADQLISVDDGSEPNWSELLGDSSSHNPNSEIPTPFLDVPRLDITANQQQQMVSSEDQLSGRNSSSSVATSKQRMRWTPELHEAFVEAVNQLGGSERATPKAVLKLLNNPGLTIYHVKSHLQKYRTARYKPETSEVTGEPQEKKMTSIEDIKSLDMKTSVEITQALRLQMEVQKRLHEQLEIQRSLQLQIEKQGRYLQMMFEKQQKIQDNKSSSSEASPKQCNGSFAEVEVGLETLTGDQNESASASRKRVRED

SEQ ID NO: 2643 - DNA, 1636 bp, Arabidopsis thaliana
  misc_feature (1)..(1636): Ceres Seq. ID no. 13500074
ataattacttgtgattcttatttgtcttcttcaatatggcgagaagttctgttttgctatgtttaattctattggttacgttaggagttgtgataagtgtcacatttgccgacaacgttgaattgaaatcaaaagatctagagagcagtaagaaagataagaaggttgatcatgatagtacacacaaagagaagggaggtgaaaaggtagatggtgccggttctgatgatgaagacaacgataaaaaagaaaaaaagaaagagcatgatgtgcaaaaaaaggataaacaacatgaaaacaaagacaaggatgacgagaagaagcatgttgataagaagaagagcggtggtcatgataaagatgatgatgatgaaaagaagcacaaggataaaaagaaggatggacacaatgatgatgatgatagtgatgatgatacggatgatgacgatgacgatgatgatgatgatgatgatgatgatgaagttgatggagatgataatgagaaggagaaaattgggttatacgagctcaagaagggaaatctaactgtcaaattcacaaattggggtgcttcaatcatatctctccatttcccagacaaaaatggtaaaatggacgatattgttcttggctatgatagcgtcaaaacctacaagaccgacaaggtttatttcggagcaaccgttggccgagtagcaaatagaataggaaagggcaaattcaagttgaatggtaaagagtacaagacaagtgtcaacgatggaaaaaacacactccatggtggcaagaaagggtttggggatgttgtgtgggcagttgcaaaacaccagtacgatggcaagaaaccacacattgtcttcactcacacaagtcctgacggcgatcaagggtttccgggagaactcagtgtcacggtgacatataaacttgtcaaagacaatgaattgagtgtggtgatggaggcaaagcctaaggataaagcaactccggtgaacttagctcatcatagttattggaatcttggtggtcataattccggagatattttgtctgaagaaattcaaatcctcggctcgggttatacccccgtcgacggtgagctcattcccaccgggaaaatcaatccggtgaaaggaacagcatacgattttctccaactccgtcctattaaagataatatgaaggatcttaaaacaggatatgatataaattattgcttagatggtaaggcaaaaaagatgagaaaaatagttgaactcgtagataagaaatcagggaggaaaatggagttatccggaaaccaagcgggtttgcaattctataccggagggatgttaaaggatgtcaaagggaagaatggggcagtttaccaagctttcgggggattatgtttagaaacacaaagttatccagacgcattgaaccatcccaaatttccttcacagattgtcgagccagggaaaaaatacaaacacactatgctcttcaagttttctattgtttcatagattgttttagatgttgttacatgaacacccttggaaccatgtccaatgttcatgaacaagaaactaaatacattgtaatattttgtaacaatgcttaaattatcaaattatataaacctaacgtgaac

SEQ ID NO: 2644 - protein, 490 aa, Arabidopsis thaliana
  peptide (1)..(490): Ceres Seq. ID no. 13500075
  misc_feature (161)..(485): Pfam Name: Pfam Description:  Aldose 1-epimerase
  misc_feature (1)..(490): NCBI GI NO: 15242223 NR Description: aldose 1-epimerase family [Arabidopsis thaliana]
  misc_feature (193)..(490): NCBI GI NO: 26452398 NR Description: putative aldose 1-epimerase [Arabidopsis thaliana]
  misc_feature (158)..(487): NCBI GI NO: 15228261 NR Description: aldose 1-epimerase family [Arabidopsis thaliana]
  misc_feature (158)..(487): NCBI GI NO: 21537069 NR Description: aldose 1-epimerase-like protein
  misc_feature (159)..(488): NCBI GI NO: 15824567 NR Description: non-cell-autonomous protein pathway2
  misc_feature (159)..(488): NCBI GI NO: 15824565 NR Description: non-cell-autonomous protein pathway1
  misc_feature (159)..(488): NCBI GI NO: 7430313 NR Description: probable aldose 1-epimerase (EC 5
  misc_feature (157)..(488): NCBI GI NO: 40882679 NR Description: putative aldose 1-epimerase
  misc_feature (119)..(489): NCBI GI NO: 15232072 NR Description: aldose 1-epimerase family [Arabidopsis thaliana]
  misc_feature (199)..(447): NCBI GI NO: 6094558 NR Description: putative aldose 1-epimerase, 3' partial
MARSSVLLCLILLVTLGVVISVTFADNVELKSKDLESSKKDKKVDHDSTHKEKGGEKVDGAGSDDEDNDKKEKKKEHDVQKKDKQHENKDKDDEKKHVDKKKSGGHDKDDDDEKKHKDKKKDGHNDDDDSDDDTDDDDDDDDDDDDDDEVDGDDNEKEKIGLYELKKGNLTVKFTNWGASIISLHFPDKNGKMDDIVLGYDSVKTYKTDKVYFGATVGRVANRIGKGKFKLNGKEYKTSVNDGKNTLHGGKKGFGDVVWAVAKHQYDGKKPHIVFTHTSPDGDQGFPGELSVTVTYKLVKDNELSVVMEAKPKDKATPVNLAHHSYWNLGGHNSGDILSEEIQILGSGYTPVDGELIPTGKINPVKGTAYDFLQLRPIKDNMKDLKTGYDINYCLDGKAKKMRKIVELVDKKSGRKMELSGNQAGLQFYTGGMLKDVKGKNGAVYQAFGGLCLETQSYPDALNHPKFPSQIVEPGKKYKHTMLFKFSIVS

SEQ ID NO: 2645 - protein, 298 aa, Arabidopsis thaliana
  peptide (1)..(298): Ceres Seq. ID no. 13500076
  misc_feature (1)..(293): Pfam Name: Pfam Description:  Aldose 1-epimerase
  misc_feature (1)..(298): NCBI GI NO: 15242223 NR Description: aldose 1-epimerase family [Arabidopsis thaliana]
  misc_feature (1)..(298): NCBI GI NO: 26452398 NR Description: putative aldose 1-epimerase [Arabidopsis thaliana]
  misc_feature (1)..(295): NCBI GI NO: 15228261 NR Description: aldose 1-epimerase family [Arabidopsis thaliana]
  misc_feature (1)..(295): NCBI GI NO: 21537069 NR Description: aldose 1-epimerase-like protein
  misc_feature (1)..(296): NCBI GI NO: 15824567 NR Description: non-cell-autonomous protein pathway2
  misc_feature (1)..(296): NCBI GI NO: 15824565 NR Description: non-cell-autonomous protein pathway1
  misc_feature (1)..(296): NCBI GI NO: 7430313 NR Description: probable aldose 1-epimerase (EC 5
  misc_feature (1)..(296): NCBI GI NO: 40882679 NR Description: putative aldose 1-epimerase
  misc_feature (1)..(297): NCBI GI NO: 15232072 NR Description: aldose 1-epimerase family [Arabidopsis thaliana]
  misc_feature (7)..(255): NCBI GI NO: 6094558 NR Description: putative aldose 1-epimerase, 3' partial
MDDIVLGYDSVKTYKTDKVYFGATVGRVANRIGKGKFKLNGKEYKTSVNDGKNTLHGGKKGFGDVVWAVAKHQYDGKKPHIVFTHTSPDGDQGFPGELSVTVTYKLVKDNELSVVMEAKPKDKATPVNLAHHSYWNLGGHNSGDILSEEIQILGSGYTPVDGELIPTGKINPVKGTAYDFLQLRPIKDNMKDLKTGYDINYCLDGKAKKMRKIVELVDKKSGRKMELSGNQAGLQFYTGGMLKDVKGKNGAVYQAFGGLCLETQSYPDALNHPKFPSQIVEPGKKYKHTMLFKFSIVS

SEQ ID NO: 2646 - DNA, 715 bp, Arabidopsis thaliana
  misc_feature (1)..(715): Ceres Seq. ID no. 13487000
aagaataaaaaaaataaaaaccaaaaagcaaaagggataacacaaaacccctttcgtcttcccaattccaccaccacacagacaaagcacaccgaaaatggcggtttcttctcgaacattctccactttcctctgcatcaaaactacatctttccgcaacccctcaactcctttgtcctctctccggttcgcctctcacccggcggctaaacactgcttggtccgagcggtaacatctgcaacggaatcttcagagccaacagcaaccaataagagagtgccacgcggtatcatgaaacctagaccagtttcaccagagatgcaagacatcgtcgagcttcctgagattgctcgcacacaagctctgaagcgtatttgggcttacatcaaagaacatgaccttcaggacccacaaaacaagagagaaatactgtgtgatgagaagttgaagaagatattcgaaggaagagatcgggttgggttcctagagattgcaaagctcatcggtcctcacttcctctgatggattgtttccgcggaattttatttggatgattgtctatgttttgttgttgaactcttacggccatgaaaagagaagggtatttgaagttgaggaagacttagattagtaaattagggttttttttttttggttgtttcaatggatgttatgtagtcgttgcttcctaatgttgtttgcgttttcgtttcg

SEQ ID NO: 2647 - protein, 141 aa, Arabidopsis thaliana
  peptide (1)..(141): Ceres Seq. ID no. 15218715
  misc_feature (65)..(141): Pfam Name: Pfam Description:  SWIB/MDM2 domain
  misc_feature (1)..(141): NCBI GI NO: 21593713 NR Description: unknown [Arabidopsis thaliana]
  misc_feature (1)..(141): NCBI GI NO: 18397658 NR Description: expressed protein [Arabidopsis thaliana]
  misc_feature (1)..(141): NCBI GI NO: 19698859 NR Description: unknown protein [Arabidopsis thaliana]
  misc_feature (1)..(141): NCBI GI NO: 14423526 NR Description: putative protein [Arabidopsis thaliana]
  misc_feature (1)..(141): NCBI GI NO: 15235320 NR Description: expressed protein [Arabidopsis thaliana]
  misc_feature (1)..(141): NCBI GI NO: 21553903 NR Description: unknown [Arabidopsis thaliana]
  misc_feature (22)..(141): NCBI GI NO: 14488372 NR Description: hypothetical protein
  misc_feature (23)..(141): NCBI GI NO: 21593643 NR Description: unknown [Arabidopsis thaliana]
  misc_feature (18)..(140): NCBI GI NO: 33667910 NR Description: SWIb domain-containing protein [Solanum chacoense]
  misc_feature (23)..(141): NCBI GI NO: 18396594 NR Description: expressed protein [Arabidopsis thaliana]
MAVSSRTFSTFLCIKTTSFRNPSTPLSSLRFASHPAAKHCLVRAVTSATESSEPTATNKRVPRGIMKPRPVSPEMQDIVELPEIARTQALKRIWAYIKEHDLQDPQNKREILCDEKLKKIFEGRDRVGFLEIAKLIGPHFL

SEQ ID NO: 2648 - protein, 76 aa, Arabidopsis thaliana
  peptide (1)..(76): Ceres Seq. ID no. 15218716
  misc_feature (1)..(76): Pfam Name: Pfam Description:  SWIB/MDM2 domain
  misc_feature (1)..(76): NCBI GI NO: 21593713 NR Description: unknown [Arabidopsis thaliana]
  misc_feature (1)..(76): NCBI GI NO: 18397658 NR Description: expressed protein [Arabidopsis thaliana]
  misc_feature (1)..(76): NCBI GI NO: 19698859 NR Description: unknown protein [Arabidopsis thaliana]
  misc_feature (1)..(76): NCBI GI NO: 14423526 NR Description: putative protein [Arabidopsis thaliana]
  misc_feature (1)..(76): NCBI GI NO: 15235320 NR Description: expressed protein [Arabidopsis thaliana]
  misc_feature (1)..(76): NCBI GI NO: 21553903 NR Description: unknown [Arabidopsis thaliana]
  misc_feature (1)..(76): NCBI GI NO: 14488372 NR Description: hypothetical protein
  misc_feature (1)..(76): NCBI GI NO: 21593643 NR Description: unknown [Arabidopsis thaliana]
  misc_feature (1)..(75): NCBI GI NO: 33667910 NR Description: SWIb domain-containing protein [Solanum chacoense]
  misc_feature (1)..(76): NCBI GI NO: 18396594 NR Description: expressed protein [Arabidopsis thaliana]
MKPRPVSPEMQDIVELPEIARTQALKRIWAYIKEHDLQDPQNKREILCDEKLKKIFEGRDRVGFLEIAKLIGPHFL

SEQ ID NO: 2649 - DNA, 1459 bp, Arabidopsis thaliana
  misc_feature (1)..(1459): Ceres Seq. ID no. 13494018
atatttgattccttttctctctcatacgatctgcacaccactactaagaacaacagagctagagagacttgcaataattgtaaaacatgattggaacaagcttccccgaggatcttgattgtggcaacttctttgacaacatggatgatctcatggactttcccggtggagatatcgatgtcggtttcggcataggtgactccgactctttccctaccatctggaccactcatcacgacacgtggcccgccgcttctgatcctctcttctcttccaacaccaactctgattcatcacctgagctctatgttccgtttgaggacattgttaaggtggaaagacctccaacctttgtagaggaaacattggttgagaagaaggaagattcgttttcgacaaacactgattcatcatcttctcatagccaattcaggagctcaagtccagtgtcggttctcgagagcagctcctcctcgtctaaaaccaccaacacaacctcccttgttctccctggaaagcacggtcgtccacgcacaaaacgccctcgtccacctgtccaggataaagatagagtcaaagacaatgtgtgcggtggtgactcgcgcctcatcattagaataccgaaacagtttctctctgatcacaacaagatgatcaacaagaagaagaagaagaaggccaagattacttcttcctcttcttcgtccgggattgatcttgaagtcaatggaaacaacgtcgattcgtattcttcagagcaatatccgcttaggaaatgtatgcactgtgaggtcaccaagactccacagtggaggcttggtccaatgggtccaaagacactttgcaatgcgtgcggtgtacgttacaaatcagggaggcttttcccggagtaccgtccagctgctagtccaacatttactccagctcttcactcaaactcacacaagaaagtggctgaaatgagaaacaagagatgcagtgatggtagctacataaccgaagagaatgatctgcaaggactgattccgaacaatgcctacattggcgtagactaaaacctagagaagatgattcgatttccatgcgttgaagtgattagatatgccaggagtaggaaagagtcagtgagaagaaaagtttttagctttagaagagatgaaggaagagagcaatcaattggagggattaaaagttagatgagaattgattgtgtttgtattattttgtatttgtagtgtgaatgggcaaaaaactcttgaaacagaggaaaagtaagttgaggaagagcagaagattttgaagacattagagaatcattaggtgttgagtattacattaaatcttcctcttcttcttttgttctttcaattctttgtatttttattgtgaggattctcttttttttttttttttttgtagttgatttgtttattgtatctgataaaaagaatgttacttg

SEQ ID NO: 2650 - protein, 322 aa, Arabidopsis thaliana
  peptide (1)..(322): Ceres Seq. ID no. 13494019
  misc_feature (1)..(322): NCBI GI NO: 15233101 NR Description: GATA zinc finger protein [Arabidopsis thaliana]
  misc_feature (2)..(301): NCBI GI NO: 37572451 NR Description: AG-motif binding protein-5 [Nicotiana tabacum]
  misc_feature (2)..(301): NCBI GI NO: 37572443 NR Description: AG-motif binding protein-1 [Nicotiana tabacum]
  misc_feature (115)..(295): NCBI GI NO: 12711287 NR Description: GATA-1 zinc finger protein [Nicotiana tabacum]
  misc_feature (93)..(301): NCBI GI NO: 15451574 NR Description: Putative GATA-1 zinc finger protein [Oryza sativa]
  misc_feature (19)..(296): NCBI GI NO: 15239503 NR Description: GATA zinc finger protein [Arabidopsis thaliana]
  misc_feature (115)..(295): NCBI GI NO: 15223085 NR Description: GATA zinc finger protein [Arabidopsis thaliana]
  misc_feature (193)..(295): NCBI GI NO: 15223086 NR Description: GATA zinc finger protein [Arabidopsis thaliana]
  misc_feature (79)..(296): NCBI GI NO: 37572447 NR Description: AG-motif binding protein-3 [Nicotiana tabacum]
  misc_feature (229)..(296): NCBI GI NO: 37572449 NR Description: AG-motif binding protein-4 [Nicotiana tabacum]
MIGTSFPEDLDCGNFFDNMDDLMDFPGGDIDVGFGIGDSDSFPTIWTTHHDTWPAASDPLFSSNTNSDSSPELYVPFEDIVKVERPPTFVEETLVEKKEDSFSTNTDSSSSHSQFRSSSPVSVLESSSSSSKTTNTTSLVLPGKHGRPRTKRPRPPVQDKDRVKDNVCGGDSRLIIRIPKQFLSDHNKMINKKKKKKAKITSSSSSSGIDLEVNGNNVDSYSSEQYPLRKCMHCEVTKTPQWRLGPMGPKTLCNACGVRYKSGRLFPEYRPAASPTFTPALHSNSHKKVAEMRNKRCSDGSYITEENDLQGLIPNNAYIGVD

SEQ ID NO: 2651 - protein, 304 aa, Arabidopsis thaliana
  peptide (1)..(304): Ceres Seq. ID no. 13494020
  misc_feature (1)..(304): NCBI GI NO: 15233101 NR Description: GATA zinc finger protein [Arabidopsis thaliana]
  misc_feature (1)..(283): NCBI GI NO: 37572451 NR Description: AG-motif binding protein-5 [Nicotiana tabacum]
  misc_feature (1)..(283): NCBI GI NO: 37572443 NR Description: AG-motif binding protein-1 [Nicotiana tabacum]
  misc_feature (97)..(277): NCBI GI NO: 12711287 NR Description: GATA-1 zinc finger protein [Nicotiana tabacum]
  misc_feature (75)..(283): NCBI GI NO: 15451574 NR Description: Putative GATA-1 zinc finger protein [Oryza sativa]
  misc_feature (1)..(278): NCBI GI NO: 15239503 NR Description: GATA zinc finger protein [Arabidopsis thaliana]
  misc_feature (97)..(277): NCBI GI NO: 15223085 NR Description: GATA zinc finger protein [Arabidopsis thaliana]
  misc_feature (175)..(277): NCBI GI NO: 15223086 NR Description: GATA zinc finger protein [Arabidopsis thaliana]
  misc_feature (61)..(278): NCBI GI NO: 37572447 NR Description: AG-motif binding protein-3 [Nicotiana tabacum]
  misc_feature (211)..(278): NCBI GI NO: 37572449 NR Description: AG-motif binding protein-4 [Nicotiana tabacum]
MDDLMDFPGGDIDVGFGIGDSDSFPTIWTTHHDTWPAASDPLFSSNTNSDSSPELYVPFEDIVKVERPPTFVEETLVEKKEDSFSTNTDSSSSHSQFRSSSPVSVLESSSSSSKTTNTTSLVLPGKHGRPRTKRPRPPVQDKDRVKDNVCGGDSRLIIRIPKQFLSDHNKMINKKKKKKAKITSSSSSSGIDLEVNGNNVDSYSSEQYPLRKCMHCEVTKTPQWRLGPMGPKTLCNACGVRYKSGRLFPEYRPAASPTFTPALHSNSHKKVAEMRNKRCSDGSYITEENDLQGLIPNNAYIGVD

SEQ ID NO: 2652 - protein, 300 aa, Arabidopsis thaliana
  peptide (1)..(300): Ceres Seq. ID no. 13494021
  misc_feature (1)..(300): NCBI GI NO: 15233101 NR Description: GATA zinc finger protein [Arabidopsis thaliana]
  misc_feature (1)..(279): NCBI GI NO: 37572451 NR Description: AG-motif binding protein-5 [Nicotiana tabacum]
  misc_feature (1)..(279): NCBI GI NO: 37572443 NR Description: AG-motif binding protein-1 [Nicotiana tabacum]
  misc_feature (93)..(273): NCBI GI NO: 12711287 NR Description: GATA-1 zinc finger protein [Nicotiana tabacum]
  misc_feature (71)..(279): NCBI GI NO: 15451574 NR Description: Putative GATA-1 zinc finger protein [Oryza sativa]
  misc_feature (1)..(274): NCBI GI NO: 15239503 NR Description: GATA zinc finger protein [Arabidopsis thaliana]
  misc_feature (93)..(273): NCBI GI NO: 15223085 NR Description: GATA zinc finger protein [Arabidopsis thaliana]
  misc_feature (171)..(273): NCBI GI NO: 15223086 NR Description: GATA zinc finger protein [Arabidopsis thaliana]
  misc_feature (57)..(274): NCBI GI NO: 37572447 NR Description: AG-motif binding protein-3 [Nicotiana tabacum]
  misc_feature (207)..(274): NCBI GI NO: 37572449 NR Description: AG-motif binding protein-4 [Nicotiana tabacum]
MDFPGGDIDVGFGIGDSDSFPTIWTTHHDTWPAASDPLFSSNTNSDSSPELYVPFEDIVKVERPPTFVEETLVEKKEDSFSTNTDSSSSHSQFRSSSPVSVLESSSSSSKTTNTTSLVLPGKHGRPRTKRPRPPVQDKDRVKDNVCGGDSRLIIRIPKQFLSDHNKMINKKKKKKAKITSSSSSSGIDLEVNGNNVDSYSSEQYPLRKCMHCEVTKTPQWRLGPMGPKTLCNACGVRYKSGRLFPEYRPAASPTFTPALHSNSHKKVAEMRNKRCSDGSYITEENDLQGLIPNNAYIGVD

SEQ ID NO: 2653 - DNA, 1183 bp, Arabidopsis thaliana
  misc_feature (1)..(1183): Ceres Seq. ID no. 12321994
atctctgcaacttcctctgtttctgattaccaaacgtcgtcaatacatttcttcaaattacgtttcttttattctttcgttactctcaacaaattttgatatctgattggtgttgattccaagtaagaaagatcaaaactttaggtaaagtatggatatgggtttccatgaaaatgagcaaaatcaagaatttgcgaatctaatggagattggatctgggcattacgggtgttcacattatagaagacgatgcaagattagagcaccatgttgtgatgagatttttgattgcagacattgccacaacgaagctaaggattctcttcatattgaacagcatcatagacatgagcttcctcgacatgaagtttcaaaggtcatatgctcgctttgtgagacagaacaagacgttcagcaaaactgctccaattgtggtgtatgtatggggaagtacttctgttcaaaatgcaagttcttcgacgatgatctttccaagaagcaatatcactgtgatgagtgtgggatttgcaggaccggaggagaagaaaactttttccattgcaaaagatgccgatgttgctactccaaaattatggaggacaaacaccaatgtgttgaaggcgctatgcatcacaattgcccggtttgttttgagtatctgtttgattcaacaagagatatcactgtcctacgatgtggtcacactatgcatctagaatgcacgaaagatatggggctacataaccgatacacatgccctgtatgctccaaatccatatgtgacatgtctaatctgtggaagaaacttgatgaagaggttgctgcatacccaatgccaaagatgtatgaaaacaagatggtatggattctctgcaatgactgcggctcaaacacgaacgttcggtttcatttgatcgcgcataaatgcagtagctgtggttcctacaatacaagacagacacagagaggctctgatagtcactcttgctcctctggaatgcctcaggttgttggttcaaccggttaatttttaaccagagctggttttggtgtctgaatttcccatgaggagattatttgtactttctatagtttggtatcagtcaatgcctttggttgttaacaattatatcatcacagattcaaaagctgctttgagccaatccaacttgcaagtctagac

SEQ ID NO: 2654 - protein, 291 aa, Arabidopsis thaliana
  peptide (1)..(291): Ceres Seq. ID no. 12321995
  misc_feature (27)..(110): Pfam Name: Pfam Description:  CHY zinc finger
  misc_feature (1)..(291): NCBI GI NO: 15237169 NR Description: PGPD14 protein; protein id: At5g22920
  misc_feature (18)..(291): NCBI GI NO: 21593716 NR Description: PGPD14 protein [Arabidopsis thaliana]
  misc_feature (9)..(287): NCBI GI NO: 4105798 NR Description: PGPD14 [Petunia x hybrida]
  misc_feature (18)..(273): NCBI GI NO: 37535002 NR Description: putative PGPD14 protein
  misc_feature (18)..(269): NCBI GI NO: 34910658 NR Description: putative PGPD14 protein
  misc_feature (18)..(268): NCBI GI NO: 15238890 NR Description: putative protein; protein id: At5g18650
  misc_feature (19)..(275): NCBI GI NO: 30102616 NR Description: At3g62970 [Arabidopsis thaliana]
  misc_feature (19)..(275): NCBI GI NO: 30695702 NR Description: expressed protein [Arabidopsis thaliana]
  misc_feature (19)..(275): NCBI GI NO: 11358168 NR Description: hypothetical protein T20O10
  misc_feature (23)..(269): NCBI GI NO: 34876576 NR Description: similar to androgen receptor N-terminal-interacting protein
MDMGFHENEQNQEFANLMEIGSGHYGCSHYRRRCKIRAPCCDEIFDCRHCHNEAKDSLHIEQHHRHELPRHEVSKVICSLCETEQDVQQNCSNCGVCMGKYFCSKCKFFDDDLSKKQYHCDECGICRTGGEENFFHCKRCRCCYSKIMEDKHQCVEGAMHHNCPVCFEYLFDSTRDITVLRCGHTMHLECTKDMGLHNRYTCPVCSKSICDMSNLWKKLDEEVAAYPMPKMYENKMVWILCNDCGSNTNVRFHLIAHKCSSCGSYNTRQTQRGSDSHSCSSGMPQVVGSTG

SEQ ID NO: 2655 - protein, 289 aa, Arabidopsis thaliana
  peptide (1)..(289): Ceres Seq. ID no. 12321996
  misc_feature (25)..(108): Pfam Name: Pfam Description:  CHY zinc finger
  misc_feature (1)..(289): NCBI GI NO: 15237169 NR Description: PGPD14 protein; protein id: At5g22920
  misc_feature (16)..(289): NCBI GI NO: 21593716 NR Description: PGPD14 protein [Arabidopsis thaliana]
  misc_feature (7)..(285): NCBI GI NO: 4105798 NR Description: PGPD14 [Petunia x hybrida]
  misc_feature (16)..(271): NCBI GI NO: 37535002 NR Description: putative PGPD14 protein
  misc_feature (16)..(267): NCBI GI NO: 34910658 NR Description: putative PGPD14 protein
  misc_feature (16)..(266): NCBI GI NO: 15238890 NR Description: putative protein; protein id: At5g18650
  misc_feature (17)..(273): NCBI GI NO: 30102616 NR Description: At3g62970 [Arabidopsis thaliana]
  misc_feature (17)..(273): NCBI GI NO: 30695702 NR Description: expressed protein [Arabidopsis thaliana]
  misc_feature (17)..(273): NCBI GI NO: 11358168 NR Description: hypothetical protein T20O10
  misc_feature (21)..(267): NCBI GI NO: 34876576 NR Description: similar to androgen receptor N-terminal-interacting protein
MGFHENEQNQEFANLMEIGSGHYGCSHYRRRCKIRAPCCDEIFDCRHCHNEAKDSLHIEQHHRHELPRHEVSKVICSLCETEQDVQQNCSNCGVCMGKYFCSKCKFFDDDLSKKQYHCDECGICRTGGEENFFHCKRCRCCYSKIMEDKHQCVEGAMHHNCPVCFEYLFDSTRDITVLRCGHTMHLECTKDMGLHNRYTCPVCSKSICDMSNLWKKLDEEVAAYPMPKMYENKMVWILCNDCGSNTNVRFHLIAHKCSSCGSYNTRQTQRGSDSHSCSSGMPQVVGSTG

SEQ ID NO: 2656 - protein, 274 aa, Arabidopsis thaliana
  peptide (1)..(274): Ceres Seq. ID no. 12321997
  misc_feature (10)..(93): Pfam Name: Pfam Description:  CHY zinc finger
  misc_feature (1)..(274): NCBI GI NO: 15237169 NR Description: PGPD14 protein; protein id: At5g22920
  misc_feature (1)..(274): NCBI GI NO: 21593716 NR Description: PGPD14 protein [Arabidopsis thaliana]
  misc_feature (1)..(270): NCBI GI NO: 4105798 NR Description: PGPD14 [Petunia x hybrida]
  misc_feature (1)..(256): NCBI GI NO: 37535002 NR Description: putative PGPD14 protein
  misc_feature (1)..(252): NCBI GI NO: 34910658 NR Description: putative PGPD14 protein
  misc_feature (1)..(251): NCBI GI NO: 15238890 NR Description: putative protein; protein id: At5g18650
  misc_feature (2)..(258): NCBI GI NO: 30102616 NR Description: At3g62970 [Arabidopsis thaliana]
  misc_feature (2)..(258): NCBI GI NO: 30695702 NR Description: expressed protein [Arabidopsis thaliana]
  misc_feature (2)..(258): NCBI GI NO: 11358168 NR Description: hypothetical protein T20O10
  misc_feature (6)..(252): NCBI GI NO: 34876576 NR Description: similar to androgen receptor N-terminal-interacting protein
MEIGSGHYGCSHYRRRCKIRAPCCDEIFDCRHCHNEAKDSLHIEQHHRHELPRHEVSKVICSLCETEQDVQQNCSNCGVCMGKYFCSKCKFFDDDLSKKQYHCDECGICRTGGEENFFHCKRCRCCYSKIMEDKHQCVEGAMHHNCPVCFEYLFDSTRDITVLRCGHTMHLECTKDMGLHNRYTCPVCSKSICDMSNLWKKLDEEVAAYPMPKMYENKMVWILCNDCGSNTNVRFHLIAHKCSSCGSYNTRQTQRGSDSHSCSSGMPQVVGSTG

SEQ ID NO: 2657 - DNA, 1278 bp, Arabidopsis thaliana
  misc_feature (1)..(1278): Ceres Seq. ID no. 13509213
tcgacccacgcgtccggtaattaacttctaacttgaggggcttttcattatctcctcctcgtcgtcctccctccatttttcttcacgtctggttttctctctcttttcctctatcttttcctctatctctctcctctctttgtctctctcgcttctgtgatttgggctttttcagatgggaaatgcgaacggcaaagacgaagacgccgccgccggtagcggtggtgcagatgttacctcgtcctcggcgagatctaatggcggcgatccttctgcacgcagtcgtcaccgtcgtccttcttcagactctatgagcagttctcctcccggaagtcctgctcgatctccatctcctttcttattcgctcctcaggttcccgtggctccattgcagagagcaaacgcccctccttctcctaataacatccaatggaaccaatcacagagagtttttgataatcccccagagcaaggaatccctaccatcattacatggaaccaaggaggtaatgatgtgacggtggaaggatcatgggacaattggagatcaaggaagaagctgcagaaatcaggaaaagaccactcgattctctttgtccttccatctggcatataccattacaaggtgattgtggacggtgaatccaaatacatcccagatttaccctttgtagcagacgaagttggcaatgtctgtaacattctcgatgttcataactttgtgccagaaaacccagaaagcatagtggagtttgaggcgccaccatcacctgatcatagctacggtcaaaccctaccagccgcagaagattacgcgaaagagccactggcggtgccacctcagcttcatctaacacttcttggcactactgaagagacagccatagccacaaagcctcaacatgtggtgcttaaccatgtgttcatagagcaaggatggactcctcaatccatagtagctttgggtttaacccacaggttcgagtctaagtacataactgttgtcctctacaaaccgctcacacggtaaccctaaaaattcagtgccacattgttctctctctttctttttttttcatctctcaattatgtgaaaacatgttctttgttcatagtgactagtgagtgcccaacatttgagtttattaacctctttcttacctggtttgtggtgcttgtgtacaaagcttctctcattgtaacgattgttgttttattttctgcaaaaactgtaaaatacattcgctaataatggctataagaagcttatctgctagc

SEQ ID NO: 2658 - protein, 284 aa, Arabidopsis thaliana
  peptide (1)..(284): Ceres Seq. ID no. 13509214
  misc_feature (196)..(282): Pfam Name: Pfam Description:  5'-AMP-activated protein kinase
  misc_feature (1)..(284): NCBI GI NO: 6686782 NR Description: AKIN gamma [Arabidopsis thaliana]
  misc_feature (1)..(284): NCBI GI NO: 15242175 NR Description: AMPKBI
  misc_feature (1)..(284): NCBI GI NO: 5702015 NR Description: GAL83 protein [Solanum tuberosum]
  misc_feature (1)..(284): NCBI GI NO: 6686784 NR Description: AKIN beta2 [Arabidopsis thaliana]
  misc_feature (23)..(242): NCBI GI NO: 29725558 NR Description: SNF1 kinase complex anchoring protein
  misc_feature (38)..(284): NCBI GI NO: 15234895 NR Description: kinase like protein [Arabidopsis thaliana]
  misc_feature (47)..(284): NCBI GI NO: 22324436 NR Description: AKIN beta1-like protein
  misc_feature (62)..(284): NCBI GI NO: 11935162 NR Description: SNF1-related kinase complex anchoring protein SIP1
  misc_feature (29)..(282): NCBI GI NO: 4885561 NR Description: protein kinase
  misc_feature (69)..(282): NCBI GI NO: 12018316 NR Description: AMP-activated protein kinase beta-2 regulatory subunit
MGNANGKDEDAAAGSGGADVTSSSARSNGGDPSARSRHRRPSSDSMSSSPPGSPARSPSPFLFAPQVPVAPLQRANAPPSPNNIQWNQSQRVFDNPPEQGIPTIITWNQGGNDVTVEGSWDNWRSRKKLQKSGKDHSILFVLPSGIYHYKVIVDGESKYIPDLPFVADEVGNVCNILDVHNFVPENPESIVEFEAPPSPDHSYGQTLPAAEDYAKEPLAVPPQLHLTLLGTTEETAIATKPQHVVLNHVFIEQGWTPQSIVALGLTHRFESKYITVVLYKPLTR

SEQ ID NO: 2659 - protein, 239 aa, Arabidopsis thaliana
  peptide (1)..(239): Ceres Seq. ID no. 13509215
  misc_feature (151)..(237): Pfam Name: Pfam Description:  5'-AMP-activated protein kinase
  misc_feature (1)..(239): NCBI GI NO: 6686782 NR Description: AKIN gamma [Arabidopsis thaliana]
  misc_feature (1)..(239): NCBI GI NO: 15242175 NR Description: AMPKBI
  misc_feature (1)..(239): NCBI GI NO: 5702015 NR Description: GAL83 protein [Solanum tuberosum]
  misc_feature (1)..(239): NCBI GI NO: 6686784 NR Description: AKIN beta2 [Arabidopsis thaliana]
  misc_feature (1)..(197): NCBI GI NO: 29725558 NR Description: SNF1 kinase complex anchoring protein
  misc_feature (1)..(239): NCBI GI NO: 15234895 NR Description: kinase like protein [Arabidopsis thaliana]
  misc_feature (2)..(239): NCBI GI NO: 22324436 NR Description: AKIN beta1-like protein
  misc_feature (17)..(239): NCBI GI NO: 11935162 NR Description: SNF1-related kinase complex anchoring protein SIP1
  misc_feature (1)..(237): NCBI GI NO: 4885561 NR Description: protein kinase
  misc_feature (24)..(237): NCBI GI NO: 12018316 NR Description: AMP-activated protein kinase beta-2 regulatory subunit
MSSSPPGSPARSPSPFLFAPQVPVAPLQRANAPPSPNNIQWNQSQRVFDNPPEQGIPTIITWNQGGNDVTVEGSWDNWRSRKKLQKSGKDHSILFVLPSGIYHYKVIVDGESKYIPDLPFVADEVGNVCNILDVHNFVPENPESIVEFEAPPSPDHSYGQTLPAAEDYAKEPLAVPPQLHLTLLGTTEETAIATKPQHVVLNHVFIEQGWTPQSIVALGLTHRFESKYITVVLYKPLTR

SEQ ID NO: 2660 - DNA, 2094 bp, Arabidopsis thaliana
  misc_feature (1)..(2094): Ceres Seq. ID no. 13495750
caaagcctaaaaaaatccgaccttttttgttttctctctctagaagtctctctgtttccatctttctctctctctagctcttcttcctcgtttctggcttttctgggaattttgctctatttgccccaattgttcgcttgaattacgaatccgatatcgccgatcgtcgtagatctgcgttgatattgtccggctgagtaaacagagtgaacgaaaaccaaaaacagagagggggtttaaaaatcctgaagaaaatcgcatgaatttgtttggaagcctgattttttcatcttcgatttcgagccacttcacgacttgtcttctcatctttattcttcatttctctccccagcttaatagtaataataataataataatagtaatcgtaattccaataatctcgagagtaatcgtttgatcaattgaaaaaaaaatcatggagtccaggaaaaactctgatcgtcaaatgcgtagagctaattgcttttcagctggtgagaggatgaagacaaggtcgccctccgtgattgtgatcggaggtggtttcggtgggatttcagctgctcgcactcttcaggatgcttcctttcaggttatggtactggagtcccgtgacagaattggtggacgagttcacactgattactcatttggttttcctgttgatcttggtgcatcatggctgcatggagtatgcaaggagaatcctctcgcaccagttattggaagacttggactgcccttgtatcgtactagcggtgacaattccgtcctgtatgatcatgatctcgagagctatgctctgtttgatatggatggcaaccaagttcctcaagaattggtaactcagattggcgtaacgtttgagcgtattttggaagagatcaataaagtcagggatgagcaggatgctgacatttcaatttctcaggctttctcaattgtcttttctaggaaacccgagctgaggttagaggggcttgcacacaacgtacttcaatggtatgtatgccgcatggaaggatggtttgccgcagatgctgaaaccatctctgcaaagtgttgggaccaggaggaattgttgcctggtggacacggtcttatggttagagggtatcgtcctgtcatcaatactctggcgaaaggtcttgatatccgagtaggccacagggttactaagattgtcaggcggtacaatggagtgaaggtaacgacagaaaacgggcaaacttttgttgcggatgctgcagtcattgctgtccctcttggagttttaaaatcgggaaccataaagttcgaacctaagctacctgagtggaaacaagaagcaatcaacgacctaggagtaggtattgagaacaagatcatactacattttgagaaagtcttttggccgaaagtagagtttctaggagtggtagctgaaacctcctacggttgcagttattttttgaacctgcacaaggccacgggtcatccggttctggtttacatgccggctggtcagcttgccaaagacattgagaaaatgtctgatgaagcagctgcaaatttcgccgtcttgcaactccagagaattcttcccgatgcattgcctccggtacagtatctcgtgtcgaggtggggatctgatgtgaattcaatgggatcttatagctatgatatcgtgggcaaacctcatgatctctacgagaggcttagggttccagtggataacttattctttgccggtgaagcgacgagctcgagcttcccgggctcggttcacggcgcttattcaactggattgatggcagctgaagattgtaggatgcgagttctggagcggtatggtgagttggatctgttccagcctgtgatgggcgaggaaggacctgcctctgtacctcttcttatatctcgtctctaaactccatcagttatcgtttactagaaggaacctcaagtgatgattgtcttaatatgaaactaaaattattctcgtgtcggatcgtttaaaacattcccagtcttattttctcagtgtttttaattcaataaattggaacattatatccttgtgatattatttatatatgataatcatctttaac

SEQ ID NO: 2661 - protein, 490 aa, Arabidopsis thaliana
  peptide (1)..(490): Ceres Seq. ID no. 15222960
  misc_feature (37)..(458): Pfam Name: Pfam Description:  Flavin containing amine oxidoreductase
  misc_feature (1)..(490): NCBI GI NO: 15224204 NR Description: amine oxidase family [Arabidopsis thaliana]
  misc_feature (1)..(490): NCBI GI NO: 18650598 NR Description: At2g43020/MFL8.12 [Arabidopsis thaliana]
  misc_feature (1)..(490): NCBI GI NO: 21553762 NR Description: putative amine oxidase [Arabidopsis thaliana]
  misc_feature (1)..(490): NCBI GI NO: 15231622 NR Description: amine oxidase family [Arabidopsis thaliana]
  misc_feature (14)..(490): NCBI GI NO: 38344167 NR Description: OSJNBa0053K19.6
  misc_feature (1)..(490): NCBI GI NO: 15218830 NR Description: amine oxidase family [Arabidopsis thaliana]
  misc_feature (1)..(490): NCBI GI NO: 13877615 NR Description: putative protein kinase gb|AAD22129
  misc_feature (1)..(392): NCBI GI NO: 25404949 NR Description: protein F1E22.18 [imported] - Arabidopsis thaliana
  misc_feature (357)..(490): NCBI GI NO: 25404949 NR Description: protein F1E22.18 [imported] - Arabidopsis thaliana
  misc_feature (27)..(456): NCBI GI NO: 38505628 NR Description: slr5093 [Synechocystis sp. PCC 6803]
MESRKNSDRQMRRANCFSAGERMKTRSPSVIVIGGGFGGISAARTLQDASFQVMVLESRDRIGGRVHTDYSFGFPVDLGASWLHGVCKENPLAPVIGRLGLPLYRTSGDNSVLYDHDLESYALFDMDGNQVPQELVTQIGVTFERILEEINKVRDEQDADISISQAFSIVFSRKPELRLEGLAHNVLQWYVCRMEGWFAADAETISAKCWDQEELLPGGHGLMVRGYRPVINTLAKGLDIRVGHRVTKIVRRYNGVKVTTENGQTFVADAAVIAVPLGVLKSGTIKFEPKLPEWKQEAINDLGVGIENKIILHFEKVFWPKVEFLGVVAETSYGCSYFLNLHKATGHPVLVYMPAGQLAKDIEKMSDEAAANFAVLQLQRILPDALPPVQYLVSRWGSDVNSMGSYSYDIVGKPHDLYERLRVPVDNLFFAGEATSSSFPGSVHGAYSTGLMAAEDCRMRVLERYGELDLFQPVMGEEGPASVPLLISRL

SEQ ID NO: 2662 - protein, 480 aa, Arabidopsis thaliana
  peptide (1)..(480): Ceres Seq. ID no. 15222961
  misc_feature (27)..(448): Pfam Name: Pfam Description:  Flavin containing amine oxidoreductase
  misc_feature (1)..(480): NCBI GI NO: 15224204 NR Description: amine oxidase family [Arabidopsis thaliana]
  misc_feature (1)..(480): NCBI GI NO: 18650598 NR Description: At2g43020/MFL8.12 [Arabidopsis thaliana]
  misc_feature (1)..(480): NCBI GI NO: 21553762 NR Description: putative amine oxidase [Arabidopsis thaliana]
  misc_feature (1)..(480): NCBI GI NO: 15231622 NR Description: amine oxidase family [Arabidopsis thaliana]
  misc_feature (4)..(480): NCBI GI NO: 38344167 NR Description: OSJNBa0053K19.6
  misc_feature (1)..(480): NCBI GI NO: 15218830 NR Description: amine oxidase family [Arabidopsis thaliana]
  misc_feature (1)..(480): NCBI GI NO: 13877615 NR Description: putative protein kinase gb|AAD22129
  misc_feature (1)..(382): NCBI GI NO: 25404949 NR Description: protein F1E22.18 [imported] - Arabidopsis thaliana
  misc_feature (347)..(480): NCBI GI NO: 25404949 NR Description: protein F1E22.18 [imported] - Arabidopsis thaliana
  misc_feature (17)..(446): NCBI GI NO: 38505628 NR Description: slr5093 [Synechocystis sp. PCC 6803]
MRRANCFSAGERMKTRSPSVIVIGGGFGGISAARTLQDASFQVMVLESRDRIGGRVHTDYSFGFPVDLGASWLHGVCKENPLAPVIGRLGLPLYRTSGDNSVLYDHDLESYALFDMDGNQVPQELVTQIGVTFERILEEINKVRDEQDADISISQAFSIVFSRKPELRLEGLAHNVLQWYVCRMEGWFAADAETISAKCWDQEELLPGGHGLMVRGYRPVINTLAKGLDIRVGHRVTKIVRRYNGVKVTTENGQTFVADAAVIAVPLGVLKSGTIKFEPKLPEWKQEAINDLGVGIENKIILHFEKVFWPKVEFLGVVAETSYGCSYFLNLHKATGHPVLVYMPAGQLAKDIEKMSDEAAANFAVLQLQRILPDALPPVQYLVSRWGSDVNSMGSYSYDIVGKPHDLYERLRVPVDNLFFAGEATSSSFPGSVHGAYSTGLMAAEDCRMRVLERYGELDLFQPVMGEEGPASVPLLISRL

SEQ ID NO: 2663 - protein, 468 aa, Arabidopsis thaliana
  peptide (1)..(468): Ceres Seq. ID no. 15222962
  misc_feature (15)..(436): Pfam Name: Pfam Description:  Flavin containing amine oxidoreductase
  misc_feature (1)..(468): NCBI GI NO: 15224204 NR Description: amine oxidase family [Arabidopsis thaliana]
  misc_feature (1)..(468): NCBI GI NO: 18650598 NR Description: At2g43020/MFL8.12 [Arabidopsis thaliana]
  misc_feature (1)..(468): NCBI GI NO: 21553762 NR Description: putative amine oxidase [Arabidopsis thaliana]
  misc_feature (1)..(468): NCBI GI NO: 15231622 NR Description: amine oxidase family [Arabidopsis thaliana]
  misc_feature (1)..(468): NCBI GI NO: 38344167 NR Description: OSJNBa0053K19.6
  misc_feature (1)..(468): NCBI GI NO: 15218830 NR Description: amine oxidase family [Arabidopsis thaliana]
  misc_feature (1)..(468): NCBI GI NO: 13877615 NR Description: putative protein kinase gb|AAD22129
  misc_feature (1)..(370): NCBI GI NO: 25404949 NR Description: protein F1E22.18 [imported] - Arabidopsis thaliana
  misc_feature (335)..(468): NCBI GI NO: 25404949 NR Description: protein F1E22.18 [imported] - Arabidopsis thaliana
  misc_feature (5)..(434): NCBI GI NO: 38505628 NR Description: slr5093 [Synechocystis sp. PCC 6803]
MKTRSPSVIVIGGGFGGISAARTLQDASFQVMVLESRDRIGGRVHTDYSFGFPVDLGASWLHGVCKENPLAPVIGRLGLPLYRTSGDNSVLYDHDLESYALFDMDGNQVPQELVTQIGVTFERILEEINKVRDEQDADISISQAFSIVFSRKPELRLEGLAHNVLQWYVCRMEGWFAADAETISAKCWDQEELLPGGHGLMVRGYRPVINTLAKGLDIRVGHRVTKIVRRYNGVKVTTENGQTFVADAAVIAVPLGVLKSGTIKFEPKLPEWKQEAINDLGVGIENKIILHFEKVFWPKVEFLGVVAETSYGCSYFLNLHKATGHPVLVYMPAGQLAKDIEKMSDEAAANFAVLQLQRILPDALPPVQYLVSRWGSDVNSMGSYSYDIVGKPHDLYERLRVPVDNLFFAGEATSSSFPGSVHGAYSTGLMAAEDCRMRVLERYGELDLFQPVMGEEGPASVPLLISRL

SEQ ID NO: 2664 - DNA, 1616 bp, Arabidopsis thaliana; identical to SEQ ID NO: 1516
  misc_feature (1)..(1616): Ceres Seq. ID no. 13493832

SEQ ID NO: 2665 - protein, 468 aa, Arabidopsis thaliana; identical to SEQ ID NO: 1517
  peptide (1)..(468): Ceres Seq. ID no. 13493833
  misc_feature (129)..(433): Pfam Name: Pfam Description:  Dehydrogenase E1 component
  misc_feature (41)..(468): NCBI GI NO: 15223294 NR Description: pyruvate dehydrogenase E1 alpha subunit
  misc_feature (41)..(457): NCBI GI NO: 6715645 NR Description: T25K16.8 [Arabidopsis thaliana]
  misc_feature (119)..(468): NCBI GI NO: 38344868 NR Description: OSJNBa0020P07.11
  misc_feature (102)..(442): NCBI GI NO: 23041416 NR Description: hypothetical protein
  misc_feature (102)..(442): NCBI GI NO: 17230200 NR Description: pyruvate dehydrogenase E1 component
  misc_feature (113)..(442): NCBI GI NO: 23128827 NR Description: hypothetical protein [Nostoc punctiforme]
  misc_feature (113)..(442): NCBI GI NO: 16331186 NR Description: pyruvate dehydrogenase E1 component, alpha subunit
  misc_feature (112)..(442): NCBI GI NO: 11465733 NR Description: pyruvate dehydrogenase E1 component alpha subunit
  misc_feature (119)..(442): NCBI GI NO: 22298712 NR Description: pyruvate dehydrogenase E1 component, alpha subunit
  misc_feature (119)..(442): NCBI GI NO: 33861844 NR Description: Pyruvate dehydrogenase E1 alpha subunit

SEQ ID NO: 2666 - protein, 428 aa, Arabidopsis thaliana; identical to SEQ ID NO: 1518
  peptide (1)..(428): Ceres Seq. ID no. 13493834
  misc_feature (89)..(393): Pfam Name: Pfam Description:  Dehydrogenase E1 component
  misc_feature (1)..(428): NCBI GI NO: 15223294 NR Description: pyruvate dehydrogenase E1 alpha subunit
  misc_feature (1)..(417): NCBI GI NO: 6715645 NR Description: T25K16.8 [Arabidopsis thaliana]
  misc_feature (79)..(428): NCBI GI NO: 38344868 NR Description: OSJNBa0020P07.11
  misc_feature (62)..(402): NCBI GI NO: 23041416 NR Description: hypothetical protein
  misc_feature (62)..(402): NCBI GI NO: 17230200 NR Description: pyruvate dehydrogenase E1 component
  misc_feature (73)..(402): NCBI GI NO: 23128827 NR Description: hypothetical protein [Nostoc punctiforme]
  misc_feature (73)..(402): NCBI GI NO: 16331186 NR Description: pyruvate dehydrogenase E1 component, alpha subunit
  misc_feature (72)..(402): NCBI GI NO: 11465733 NR Description: pyruvate dehydrogenase E1 component alpha subunit
  misc_feature (79)..(402): NCBI GI NO: 22298712 NR Description: pyruvate dehydrogenase E1 component, alpha subunit
  misc_feature (79)..(402): NCBI GI NO: 33861844 NR Description: Pyruvate dehydrogenase E1 alpha subunit

SEQ ID NO: 2667 - protein, 338 aa, Arabidopsis thaliana; identical to SEQ ID NO: 1519
  peptide (1)..(338): Ceres Seq. ID no. 13493835
  misc_feature (1)..(303): Pfam Name: Pfam Description:  Dehydrogenase E1 component
  misc_feature (1)..(338): NCBI GI NO: 15223294 NR Description: pyruvate dehydrogenase E1 alpha subunit
  misc_feature (1)..(327): NCBI GI NO: 6715645 NR Description: T25K16.8 [Arabidopsis thaliana]
  misc_feature (1)..(338): NCBI GI NO: 38344868 NR Description: OSJNBa0020P07.11
  misc_feature (1)..(312): NCBI GI NO: 23041416 NR Description: hypothetical protein
  misc_feature (1)..(312): NCBI GI NO: 17230200 NR Description: pyruvate dehydrogenase E1 component
  misc_feature (1)..(312): NCBI GI NO: 23128827 NR Description: hypothetical protein [Nostoc punctiforme]
  misc_feature (1)..(312): NCBI GI NO: 16331186 NR Description: pyruvate dehydrogenase E1 component, alpha subunit
  misc_feature (1)..(312): NCBI GI NO: 11465733 NR Description: pyruvate dehydrogenase E1 component alpha subunit
  misc_feature (1)..(312): NCBI GI NO: 22298712 NR Description: pyruvate dehydrogenase E1 component, alpha subunit
  misc_feature (1)..(312): NCBI GI NO: 33861844 NR Description: Pyruvate dehydrogenase E1 alpha subunit

SEQ ID NO: 2668 - DNA, 1167 bp, Arabidopsis thaliana; identical to SEQ ID NO: 1315
  misc_feature (1)..(1167): Ceres Seq. ID no. 12321925
  misc_feature (506)..(506): n is a, c, t, g, unknown, or other
  misc_feature (517)..(517): n is a, c, t, g, unknown, or other

SEQ ID NO: 2669 - protein, 199 aa, Arabidopsis thaliana; identical to SEQ ID NO: 1316
  peptide (1)..(199): Ceres Seq. ID no. 12321926
  misc_feature (4)..(184): Pfam Name: Pfam Description:  ADP-ribosylation factor family
  misc_feature (1)..(199): NCBI GI NO: 15237901 NR Description: ADP-ribosylation factor -like protein
  misc_feature (1)..(199): NCBI GI NO: 15228464 NR Description: putative ADP-ribosylation factor
  misc_feature (1)..(198): NCBI GI NO: 37537196 NR Description: putative ADP-ribosylation factor
  misc_feature (1)..(195): NCBI GI NO: 34897926 NR Description: Similar to Drosophila melanogaster ADP-ribosylation factor1
  misc_feature (1)..(186): NCBI GI NO: 3182915 NR Description: ADP-RIBOSYLATION FACTOR
  misc_feature (1)..(188): NCBI GI NO: 32401087 NR Description: ADP-ribosylation factor 1 [Aiptasia pulchella]
  misc_feature (1)..(186): NCBI GI NO: 17136866 NR Description: ADP ribosylation factor 79F CG8385-PB
  misc_feature (1)..(186): NCBI GI NO: 31240205 NR Description: ENSANGP00000015770 [Anopheles gambiae]
  misc_feature (1)..(186): NCBI GI NO: 17551730 NR Description: ADP-Ribosylation Factor related ARF-1 (20
  misc_feature (1)..(186): NCBI GI NO: 39584902 NR Description: Hypothetical protein CBG09004
  misc_feature (86)..(86): Xaa is any aa, unknown or other
  misc_feature (89)..(89): Xaa is any aa, unknown or other

SEQ ID NO: 2670 - protein, 182 aa, Arabidopsis thaliana; identical to SEQ ID NO: 1317
  peptide (1)..(182): Ceres Seq. ID no. 12321927
  misc_feature (1)..(167): Pfam Name: Pfam Description:  ADP-ribosylation factor family
  misc_feature (1)..(182): NCBI GI NO: 15237901 NR Description: ADP-ribosylation factor -like protein
  misc_feature (1)..(182): NCBI GI NO: 15228464 NR Description: putative ADP-ribosylation factor
  misc_feature (1)..(181): NCBI GI NO: 37537196 NR Description: putative ADP-ribosylation factor
  misc_feature (1)..(178): NCBI GI NO: 34897926 NR Description: Similar to Drosophila melanogaster ADP-ribosylation factor1
  misc_feature (1)..(169): NCBI GI NO: 3182915 NR Description: ADP-RIBOSYLATION FACTOR
  misc_feature (1)..(171): NCBI GI NO: 32401087 NR Description: ADP-ribosylation factor 1 [Aiptasia pulchella]
  misc_feature (1)..(169): NCBI GI NO: 17136866 NR Description: ADP ribosylation factor 79F CG8385-PB
  misc_feature (1)..(169): NCBI GI NO: 31240205 NR Description: ENSANGP00000015770 [Anopheles gambiae]
  misc_feature (1)..(169): NCBI GI NO: 17551730 NR Description: ADP-Ribosylation Factor related ARF-1 (20
  misc_feature (1)..(169): NCBI GI NO: 39584902 NR Description: Hypothetical protein CBG09004
  misc_feature (69)..(69): Xaa is any aa, unknown or other
  misc_feature (72)..(72): Xaa is any aa, unknown or other

SEQ ID NO: 2671 - protein, 178 aa, Arabidopsis thaliana; identical to SEQ ID NO: 1318
  peptide (1)..(178): Ceres Seq. ID no. 12321928
  misc_feature (1)..(163): Pfam Name: Pfam Description:  ADP-ribosylation factor family
  misc_feature (1)..(178): NCBI GI NO: 15237901 NR Description: ADP-ribosylation factor -like protein
  misc_feature (1)..(178): NCBI GI NO: 15228464 NR Description: putative ADP-ribosylation factor
  misc_feature (1)..(177): NCBI GI NO: 37537196 NR Description: putative ADP-ribosylation factor
  misc_feature (1)..(174): NCBI GI NO: 34897926 NR Description: Similar to Drosophila melanogaster ADP-ribosylation factor1
  misc_feature (1)..(165): NCBI GI NO: 3182915 NR Description: ADP-RIBOSYLATION FACTOR
  misc_feature (1)..(167): NCBI GI NO: 32401087 NR Description: ADP-ribosylation factor 1 [Aiptasia pulchella]
  misc_feature (1)..(165): NCBI GI NO: 17136866 NR Description: ADP ribosylation factor 79F CG8385-PB
  misc_feature (1)..(165): NCBI GI NO: 31240205 NR Description: ENSANGP00000015770 [Anopheles gambiae]
  misc_feature (1)..(165): NCBI GI NO: 17551730 NR Description: ADP-Ribosylation Factor related ARF-1 (20
  misc_feature (1)..(165): NCBI GI NO: 39584902 NR Description: Hypothetical protein CBG09004
  misc_feature (65)..(65): Xaa is any aa, unknown or other
  misc_feature (68)..(68): Xaa is any aa, unknown or other

SEQ ID NO: 2672 - DNA, 692 bp, Arabidopsis thaliana
  misc_feature (1)..(692): Ceres Seq. ID no. 12331275
aacttgtcacctgcagagaaagaaagaagccctagattttgtcaaaaggcggttgcagaacaaaaaaccatggccggaattggaccgataactcaggattgggagccggtggtgatccgtaagaaacccgctaacgccgctgccaagcgcgacgagaaaactgtcaacgccgctcgtcgatccggcgccgatatcgagaccgtcagaaaattcaatgctggaaccaacaaggcggcatcaagcggcacatctctgaacacaaaaatgcttgatgatgacactgagaaccttactcatgaacgtgtgcctactgagctaaagaaagccattatgcaagccaggacagacaagaagctaacccagtcccaacttgctcaaatcatcaatgagaagccacaagtgattcaagagtatgagtctggcaaagctatacccaaccagcaaatcctttctaagctggagagagcgcttggagctaagcttcgtggaaagaagtgagccaagttctactgatgtagcaagtaacaagaatcaatgctttcgtctaatgccgtaactttgccaagaagaatattttctgattgtaagaaagcaaaaccgtttgaatgtttgtttcgttgatggaatctctatctcataaactcatatcaatataataacttgggtcttttcatcacatagttgaactgctt

SEQ ID NO: 2673 - protein, 165 aa, Arabidopsis thaliana
  peptide (1)..(165): Ceres Seq. ID no. 12331276
  misc_feature (110)..(164): Pfam Name: Pfam Description:  Helix-turn-helix
  misc_feature (24)..(165): NCBI GI NO: 18406032 NR Description: expressed protein; protein id: At2g42680
  misc_feature (24)..(165): NCBI GI NO: 15231105 NR Description: transcriptional coactivator - like protein
  misc_feature (24)..(165): NCBI GI NO: 7488897 NR Description: hypothetical protein - castor bean
  misc_feature (24)..(165): NCBI GI NO: 38637102 NR Description: putative ethylene-responsive transcriptional coactivator
  misc_feature (30)..(165): NCBI GI NO: 8895787 NR Description: multiprotein bridging factor 1 [Solanum tuberosum]
  misc_feature (28)..(165): NCBI GI NO: 20086364 NR Description: putative multiprotein bridging factor 1
  misc_feature (28)..(164): NCBI GI NO: 15230125 NR Description: ethylene-responsive transcriptional coactivator
  misc_feature (30)..(164): NCBI GI NO: 21553721 NR Description: ethylene-responsive transcriptional coactivator
  misc_feature (28)..(164): NCBI GI NO: 19225065 NR Description: ethylene-responsive transciptional coactivator-like
  misc_feature (24)..(164): NCBI GI NO: 5669634 NR Description: ethylene-responsive transcriptional coactivator
NLSPAEKERSPRFCQKAVAEQKTMAGIGPITQDWEPVVIRKKPANAAAKRDEKTVNAARRSGADIETVRKFNAGTNKAASSGTSLNTKMLDDDTENLTHERVPTELKKAIMQARTDKKLTQSQLAQIINEKPQVIQEYESGKAIPNQQILSKLERALGAKLRGKK

SEQ ID NO: 2674 - protein, 142 aa, Arabidopsis thaliana
  peptide (1)..(142): Ceres Seq. ID no. 12331277
  misc_feature (87)..(141): Pfam Name: Pfam Description:  Helix-turn-helix
  misc_feature (1)..(142): NCBI GI NO: 18406032 NR Description: expressed protein; protein id: At2g42680
  misc_feature (1)..(142): NCBI GI NO: 15231105 NR Description: transcriptional coactivator - like protein
  misc_feature (1)..(142): NCBI GI NO: 7488897 NR Description: hypothetical protein - castor bean
  misc_feature (1)..(142): NCBI GI NO: 38637102 NR Description: putative ethylene-responsive transcriptional coactivator
  misc_feature (7)..(142): NCBI GI NO: 8895787 NR Description: multiprotein bridging factor 1 [Solanum tuberosum]
  misc_feature (5)..(142): NCBI GI NO: 20086364 NR Description: putative multiprotein bridging factor 1
  misc_feature (5)..(141): NCBI GI NO: 15230125 NR Description: ethylene-responsive transcriptional coactivator
  misc_feature (7)..(141): NCBI GI NO: 21553721 NR Description: ethylene-responsive transcriptional coactivator
  misc_feature (5)..(141): NCBI GI NO: 19225065 NR Description: ethylene-responsive transciptional coactivator-like
  misc_feature (1)..(141): NCBI GI NO: 5669634 NR Description: ethylene-responsive transcriptional coactivator
MAGIGPITQDWEPVVIRKKPANAAAKRDEKTVNAARRSGADIETVRKFNAGTNKAASSGTSLNTKMLDDDTENLTHERVPTELKKAIMQARTDKKLTQSQLAQIINEKPQVIQEYESGKAIPNQQILSKLERALGAKLRGKK

SEQ ID NO: 2675 - DNA, 2181 bp, Arabidopsis thaliana
  misc_feature (1)..(2181): Ceres Seq. ID no. 13646180
aaataccctaatcacattttgtaacaataatacaattatacattaaaactctccgacgatgcctcaggcaccgatgccagagttctctagctcggtgaagctcaagtacgtgaaacttggttaccaatatttggttaaccatttcttgagttttcttttgatcccgatcatggctattgtcgccgttgagcttcttcggatgggtcctgaagagatccttaatgtttggaattcactccagtttgacctagttcaggttctatgttcttccttctttgtcatcttcatctccactgtttacttcatgtccaagccacgcaccatctacctcgttgactattcttgttacaagccacctgtcacgtgtcgtgtccccttcgcaactttcatggaacactctcgtttgatcctcaaggacaagcctaagagcgtcgagttccaaatgagaatccttgaacgttctggcctcggtgaggagacttgtctccctccggctattcattatattcctcccacaccaaccatggacgcggctagaagcgaggctcagatggttatcttcgaggccatggacgatcttttcaagaaaaccggtcttaaacctaaagacgtcgacatccttatcgtcaactgctctcttttctctcccacaccatcgctctcagctatggtcatcaacaaatataagcttaggagtaatatcaagagcttcaatctttcggggatgggctgcagcgcgggcctgatctcagttgatctagcccgcgacttgctccaagttcatcccaattcaaatgcaatcatcgtcagcacggagatcataacgcctaattactatcaaggcaacgagagagccatgttgttacccaattgtctcttccgcatgggtgcggcagccatacacatgtcaaaccgccggtctgaccggtggcgagccaaatacaagctttcccacctcgtccggacacaccgtggcgctgacgacaagtctttctactgtgtctacgaacaggaagacaaagaaggacacgttggcatcaacttgtccaaagatctcatggccatcgccggtgaagccctcaaggcaaacatcaccacaataggtcctttggtcctaccggcgtcagaacaacttctcttcctcacgtccctaatcggacgtaaaatcttcaacccgaaatggaaaccatacataccggatttcaagctggccttcgaacacttttgcattcacgcaggaggcagagcggtgatcgacgagctccaaaagaatctacaactatcaggagaacacgttgaggcctcaagaatgacactacatcgttttggtaacacgtcatcttcatcgttatggtacgagcttagctacatcgagtctaaagggagaatgaggagaggcgatcgcgtttggcaaatcgcgtttgggagtggtttcaagtgtaactctgccgtgtggaaatgtaaccgtacgattaagacacctaaggacggaccatggtccgattgtatcgaccgttaccctgtctttattcccgaagttgtcaaactctaaactgaaaacgtctttgaacggtttagtaacggtttgattttgtgttacggtttaggtttatttggtctcgggatttggtttaaaggggattgagaaatgggaagttagagagaagaaaaagcaaagcataaatgtttgtatttaattgctctgcatatacttaaatctctgcttttcatttggggtattttttagtttctcgtgctgtaattaataacttgtggtgtactcaaataagaatatttctctctgttttattatttttaaattggagaataaacttctttgtttccaaaaaaaaaaaaaaaaaacgatgacaagaccaacgtcaaggccgcctggggtaaggtcggcgcgcacgctggcgagtatggtgcggaggccctggagaggatgttcctgtccttccccaccaccaagacctacttcccgcacttcgacctgagccacggctctgcccaggttaagggccacggcaagaaggtggccgacgcgctgaccaacgccgtggcgcacgtggacgacatgcccaacgcgctgtccgccctgagcgacctgcacgcgcacaagcttcgggtggacccggtcaacttcaagctcctaagccactgcctgctggtgagcccatc

SEQ ID NO: 2676 - protein, 497 aa, Arabidopsis thaliana
  peptide (1)..(497): Ceres Seq. ID no. 13646181
  misc_feature (330)..(470): Pfam Name: Pfam Description:  Chalcone and stilbene synthases
  misc_feature (1)..(497): NCBI GI NO: 15221431 NR Description: very-long-chain fatty acid condensing enzyme
  misc_feature (1)..(497): NCBI GI NO: 17979464 NR Description: At1g68530/T26J14_10 [Arabidopsis thaliana]
  misc_feature (6)..(497): NCBI GI NO: 21593111 NR Description: very-long-chain fatty acid condensing enzyme CUT1
  misc_feature (6)..(497): NCBI GI NO: 15222592 NR Description: very-long-chain fatty acid condensing enzyme
  misc_feature (6)..(497): NCBI GI NO: 21618184 NR Description: fatty acid condensing enzyme CUT1, putative
  misc_feature (6)..(497): NCBI GI NO: 28393607 NR Description: putative fatty acid condensing enzyme CUT1
  misc_feature (1)..(349): NCBI GI NO: 30697701 NR Description: very-long-chain fatty acid condensing enzyme
  misc_feature (6)..(489): NCBI GI NO: 15226724 NR Description: very-long-chain fatty acid condensing enzyme
  misc_feature (6)..(489): NCBI GI NO: 15223556 NR Description: very-long-chain fatty acid condensing enzyme
  misc_feature (6)..(492): NCBI GI NO: 29417540 NR Description: beta-ketoacyl-CoA-synthase [Marchantia polymorpha]
MPQAPMPEFSSSVKLKYVKLGYQYLVNHFLSFLLIPIMAIVAVELLRMGPEEILNVWNSLQFDLVQVLCSSFFVIFISTVYFMSKPRTIYLVDYSCYKPPVTCRVPFATFMEHSRLILKDKPKSVEFQMRILERSGLGEETCLPPAIHYIPPTPTMDAARSEAQMVIFEAMDDLFKKTGLKPKDVDILIVNCSLFSPTPSLSAMVINKYKLRSNIKSFNLSGMGCSAGLISVDLARDLLQVHPNSNAIIVSTEIITPNYYQGNERAMLLPNCLFRMGAAAIHMSNRRSDRWRAKYKLSHLVRTHRGADDKSFYCVYEQEDKEGHVGINLSKDLMAIAGEALKANITTIGPLVLPASEQLLFLTSLIGRKIFNPKWKPYIPDFKLAFEHFCIHAGGRAVIDELQKNLQLSGEHVEASRMTLHRFGNTSSSSLWYELSYIESKGRMRRGDRVWQIAFGSGFKCNSAVWKCNRTIKTPKDGPWSDCIDRYPVFIPEVVKL

SEQ ID NO: 2677 - protein, 492 aa, Arabidopsis thaliana
  peptide (1)..(492): Ceres Seq. ID no. 13646182
  misc_feature (325)..(465): Pfam Name: Pfam Description:  Chalcone and stilbene synthases
  misc_feature (1)..(492): NCBI GI NO: 15221431 NR Description: very-long-chain fatty acid condensing enzyme
  misc_feature (1)..(492): NCBI GI NO: 17979464 NR Description: At1g68530/T26J14_10 [Arabidopsis thaliana]
  misc_feature (1)..(492): NCBI GI NO: 21593111 NR Description: very-long-chain fatty acid condensing enzyme CUT1
  misc_feature (1)..(492): NCBI GI NO: 15222592 NR Description: very-long-chain fatty acid condensing enzyme
  misc_feature (1)..(492): NCBI GI NO: 21618184 NR Description: fatty acid condensing enzyme CUT1, putative
  misc_feature (1)..(492): NCBI GI NO: 28393607 NR Description: putative fatty acid condensing enzyme CUT1
  misc_feature (1)..(344): NCBI GI NO: 30697701 NR Description: very-long-chain fatty acid condensing enzyme
  misc_feature (1)..(484): NCBI GI NO: 15226724 NR Description: very-long-chain fatty acid condensing enzyme
  misc_feature (1)..(484): NCBI GI NO: 15223556 NR Description: very-long-chain fatty acid condensing enzyme
  misc_feature (1)..(487): NCBI GI NO: 29417540 NR Description: beta-ketoacyl-CoA-synthase [Marchantia polymorpha]
MPEFSSSVKLKYVKLGYQYLVNHFLSFLLIPIMAIVAVELLRMGPEEILNVWNSLQFDLVQVLCSSFFVIFISTVYFMSKPRTIYLVDYSCYKPPVTCRVPFATFMEHSRLILKDKPKSVEFQMRILERSGLGEETCLPPAIHYIPPTPTMDAARSEAQMVIFEAMDDLFKKTGLKPKDVDILIVNCSLFSPTPSLSAMVINKYKLRSNIKSFNLSGMGCSAGLISVDLARDLLQVHPNSNAIIVSTEIITPNYYQGNERAMLLPNCLFRMGAAAIHMSNRRSDRWRAKYKLSHLVRTHRGADDKSFYCVYEQEDKEGHVGINLSKDLMAIAGEALKANITTIGPLVLPASEQLLFLTSLIGRKIFNPKWKPYIPDFKLAFEHFCIHAGGRAVIDELQKNLQLSGEHVEASRMTLHRFGNTSSSSLWYELSYIESKGRMRRGDRVWQIAFGSGFKCNSAVWKCNRTIKTPKDGPWSDCIDRYPVFIPEVVKL

SEQ ID NO: 2678 - protein, 460 aa, Arabidopsis thaliana
  peptide (1)..(460): Ceres Seq. ID no. 13646183
  misc_feature (293)..(433): Pfam Name: Pfam Description:  Chalcone and stilbene synthases
  misc_feature (1)..(460): NCBI GI NO: 15221431 NR Description: very-long-chain fatty acid condensing enzyme
  misc_feature (1)..(460): NCBI GI NO: 17979464 NR Description: At1g68530/T26J14_10 [Arabidopsis thaliana]
  misc_feature (1)..(460): NCBI GI NO: 21593111 NR Description: very-long-chain fatty acid condensing enzyme CUT1
  misc_feature (1)..(460): NCBI GI NO: 15222592 NR Description: very-long-chain fatty acid condensing enzyme
  misc_feature (1)..(460): NCBI GI NO: 21618184 NR Description: fatty acid condensing enzyme CUT1, putative
  misc_feature (1)..(460): NCBI GI NO: 28393607 NR Description: putative fatty acid condensing enzyme CUT1
  misc_feature (1)..(312): NCBI GI NO: 30697701 NR Description: very-long-chain fatty acid condensing enzyme
  misc_feature (1)..(452): NCBI GI NO: 15226724 NR Description: very-long-chain fatty acid condensing enzyme
  misc_feature (1)..(452): NCBI GI NO: 15223556 NR Description: very-long-chain fatty acid condensing enzyme
  misc_feature (1)..(455): NCBI GI NO: 29417540 NR Description: beta-ketoacyl-CoA-synthase [Marchantia polymorpha]
MAIVAVELLRMGPEEILNVWNSLQFDLVQVLCSSFFVIFISTVYFMSKPRTIYLVDYSCYKPPVTCRVPFATFMEHSRLILKDKPKSVEFQMRILERSGLGEETCLPPAIHYIPPTPTMDAARSEAQMVIFEAMDDLFKKTGLKPKDVDILIVNCSLFSPTPSLSAMVINKYKLRSNIKSFNLSGMGCSAGLISVDLARDLLQVHPNSNAIIVSTEIITPNYYQGNERAMLLPNCLFRMGAAAIHMSNRRSDRWRAKYKLSHLVRTHRGADDKSFYCVYEQEDKEGHVGINLSKDLMAIAGEALKANITTIGPLVLPASEQLLFLTSLIGRKIFNPKWKPYIPDFKLAFEHFCIHAGGRAVIDELQKNLQLSGEHVEASRMTLHRFGNTSSSSLWYELSYIESKGRMRRGDRVWQIAFGSGFKCNSAVWKCNRTIKTPKDGPWSDCIDRYPVFIPEVVKL

SEQ ID NO: 2679 - DNA, 1338 bp, Arabidopsis thaliana
  misc_feature (1)..(1338): Ceres Seq. ID no. 13496332
aaaagaaaaatcgaaaaaaaaaaactctccgactcggaagaagagggagagagatgaagaagccggtcggagccgagaagaagagggttaaacgatcatcgggatctgcatctacttccgttagagattctggttctgattctcaacctaggaagcaagctgtgaagaaggatagttttcagttgtttgctgagaaagttagagaccacaagggattagaatccagatgggctgttatggagcaagcacgagttgaatactttagagggaaagattttgtgagctttatgaagaataaccctgactttaaagatattctggaagaagataaagaccttgacacagacgatattgccaatgttttgttgggaaagaaccttttggtccgctgtgatcgtgttactaaaactcttcgtcccgggaagaaaaagctctctacttggcctgctcatttggagattttccgtgacgatcaatctttctctgaaaatgatgccttttttgcatggacgttcgaaaaacggcatccgctatggcaaacgcttttgtccttcttctggcctgtattgactcttgcaatttgtttgtttcctgtgtatccacaccgttgcaaactaattgtactctactcatgtgcgggcattcttctgatgattctctccttacttttcgtgagagcagttgctttcggtgctatgtggattcttttgggaaagcgtgtctggttcttccccaacattctagctgaggaagccacattgaaggaactgttccgtttctggccaaagaaagacgaggaagaaccgcccaagtggacatctcgacttttctacacagtagtggctattgttgttgtcatgctgcttaggcgtcatgcccctgatgaagctgctcgggccaggtaccaaagaaggatgtccaacatcattgatgatgtccttgagtggtcaccaaagctagcactttctggtttgatggagaatcagcaacctgtaaacatcacagatgcggcaaacaactcctcagattcagcaggaggtcccgaccagactgaagaggtcgacctagatgaaactcaaggcgaggacctagacgaaacgcaaggcaaggaggaagctgaaggttggactgactctgatcttaaaacataaaaaaaccaaaatatagaaacgaaagttcattgtaacaataagtcaacttaagtgaccaagacgaggtgagttctttataagaaagtcttgaaagattttgtggtactccattactcctttacattttgacacaatctggaatttagctctcaatcacagttttgtattccaaacttcaattccagct

SEQ ID NO: 2680 - protein, 382 aa, Arabidopsis thaliana
  peptide (1)..(382): Ceres Seq. ID no. 13496333
  misc_feature (81)..(273): Pfam Name: Pfam Description:  Translocation protein Sec62
  misc_feature (18)..(382): NCBI GI NO: 18402801 NR Description: expressed protein [Arabidopsis thaliana]
  misc_feature (18)..(382): NCBI GI NO: 21593719 NR Description: unknown [Arabidopsis thaliana]
  misc_feature (84)..(364): NCBI GI NO: 23509583 NR Description: translocation protein sec62, putative
KKNRKKKTLRLGRRGREMKKPVGAEKKRVKRSSGSASTSVRDSGSDSQPRKQAVKKDSFQLFAEKVRDHKGLESRWAVMEQARVEYFRGKDFVSFMKNNPDFKDILEEDKDLDTDDIANVLLGKNLLVRCDRVTKTLRPGKKKLSTWPAHLEIFRDDQSFSENDAFFAWTFEKRHPLWQTLLSFFWPVLTLAICLFPVYPHRCKLIVLYSCAGILLMILSLLFVRAVAFGAMWILLGKRVWFFPNILAEEATLKELFRFWPKKDEEEPPKWTSRLFYTVVAIVVVMLLRRHAPDEAARARYQRRMSNIIDDVLEWSPKLALSGLMENQQPVNITDAANNSSDSAGGPDQTEEVDLDETQGEDLDETQGKEEAEGWTDSDLKT

SEQ ID NO: 2681 - protein, 365 aa, Arabidopsis thaliana
  peptide (1)..(365): Ceres Seq. ID no. 13496334
  misc_feature (64)..(256): Pfam Name: Pfam Description:  Translocation protein Sec62
  misc_feature (1)..(365): NCBI GI NO: 18402801 NR Description: expressed protein [Arabidopsis thaliana]
  misc_feature (1)..(365): NCBI GI NO: 21593719 NR Description: unknown [Arabidopsis thaliana]
  misc_feature (67)..(347): NCBI GI NO: 23509583 NR Description: translocation protein sec62, putative
MKKPVGAEKKRVKRSSGSASTSVRDSGSDSQPRKQAVKKDSFQLFAEKVRDHKGLESRWAVMEQARVEYFRGKDFVSFMKNNPDFKDILEEDKDLDTDDIANVLLGKNLLVRCDRVTKTLRPGKKKLSTWPAHLEIFRDDQSFSENDAFFAWTFEKRHPLWQTLLSFFWPVLTLAICLFPVYPHRCKLIVLYSCAGILLMILSLLFVRAVAFGAMWILLGKRVWFFPNILAEEATLKELFRFWPKKDEEEPPKWTSRLFYTVVAIVVVMLLRRHAPDEAARARYQRRMSNIIDDVLEWSPKLALSGLMENQQPVNITDAANNSSDSAGGPDQTEEVDLDETQGEDLDETQGKEEAEGWTDSDLKT

SEQ ID NO: 2682 - protein, 304 aa, Arabidopsis thaliana
  peptide (1)..(304): Ceres Seq. ID no. 13496335
  misc_feature (3)..(195): Pfam Name: Pfam Description:  Translocation protein Sec62
  misc_feature (1)..(304): NCBI GI NO: 18402801 NR Description: expressed protein [Arabidopsis thaliana]
  misc_feature (1)..(304): NCBI GI NO: 21593719 NR Description: unknown [Arabidopsis thaliana]
  misc_feature (6)..(286): NCBI GI NO: 23509583 NR Description: translocation protein sec62, putative
MEQARVEYFRGKDFVSFMKNNPDFKDILEEDKDLDTDDIANVLLGKNLLVRCDRVTKTLRPGKKKLSTWPAHLEIFRDDQSFSENDAFFAWTFEKRHPLWQTLLSFFWPVLTLAICLFPVYPHRCKLIVLYSCAGILLMILSLLFVRAVAFGAMWILLGKRVWFFPNILAEEATLKELFRFWPKKDEEEPPKWTSRLFYTVVAIVVVMLLRRHAPDEAARARYQRRMSNIIDDVLEWSPKLALSGLMENQQPVNITDAANNSSDSAGGPDQTEEVDLDETQGEDLDETQGKEEAEGWTDSDLKT

SEQ ID NO: 2683 - DNA, 968 bp, Arabidopsis thaliana
  misc_feature (1)..(968): Ceres Seq. ID no. 12331278
actcttttggccttatccgaaatctttttgtgggcagaaacgtttgtgtcttaggccaatctctgtgtctctctgtccagagagaaatggcagcatcatcagtactactctcgtgcttcaaatcccatcatcaaccaaaccttctccatggctgcaactactcatctaaccaaacactcctcagattcaacttttcaaccccaaaacctctcctgatctcctcacggagctgctcacgacgattcagagtcttgtcagagaccatcaccgtcaaattggaagaggaggagaaggatgatggtgcaagtgctgttcttgatcctcctgccgccgttaacactaagctctacttcggtaacttgccttacaatgttgacagtgcaactctggctcaaatcattcaagatttcgctaaccctgagctcgttgaggttctttacaacagagataccggacagagtcgtggattcgccttcgttaccatgagcaatgtcgaagattgcaacatcatcatcgataacctcgatggaactgagtatcttggtcgtgctttgaaagtgaactttgcagacaaaccaaagcctaacaaagaacctctgtatccagaaacagagcacaagctctttgttggtaacttatcatggactgttacttccgagtcattagctggagcgtttcgagaatgtggagatgtggttggggctagagttgtgtttgatggagatacaggaagatcacggggttatggctttgtatgttactcttccaaagcagaaatggaaaccgctcttgaatcgcttgacggatttgagctggagggtcgggcgattcgagtaaaccttgctcaagggaagaaattttgatatcatacaacaacattgtgtaatcattttgagttttatacattagagttatgtttatattgattgaactaattaactcaaaagatcaataaaactttttatgct

SEQ ID NO: 2684 - protein, 286 aa, Arabidopsis thaliana
  peptide (1)..(286): Ceres Seq. ID no. 12331279
  misc_feature (115)..(186): Pfam Name: a.k.a. RRM, RBD, or RNP domain Pfam Description: RNA recognition motif.
  misc_feature (29)..(286): NCBI GI NO: 15218972 NR Description: chloroplast RNA-binding protein, putative
  misc_feature (72)..(285): NCBI GI NO: 1076509 NR Description: RNA-binding protein RNP1 precursor - kidney bean
  misc_feature (86)..(285): NCBI GI NO: 7446361 NR Description: RNA-binding protein - fava bean (fragment)
  misc_feature (29)..(94): NCBI GI NO: 30696379 NR Description: 29 kDa ribonucleoprotein, chloroplast
  misc_feature (30)..(197): NCBI GI NO: 21617920 NR Description: putative RNA-binding protein
  misc_feature (205)..(284): NCBI GI NO: 21617920 NR Description: putative RNA-binding protein
  misc_feature (30)..(197): NCBI GI NO: 15228102 NR Description: chloroplast RNA-binding protein cp29, putative
  misc_feature (205)..(284): NCBI GI NO: 15228102 NR Description: chloroplast RNA-binding protein cp29, putative
  misc_feature (54)..(284): NCBI GI NO: 12230584 NR Description: 29 kDa ribonucleoprotein A, chloroplast precursor
  misc_feature (67)..(284): NCBI GI NO: 34913270 NR Description: putative ribonucleoprotein
SFGLIRNLFVGRNVCVLGQSLCLSVQREMAASSVLLSCFKSHHQPNLLHGCNYSSNQTLLRFNFSTPKPLLISSRSCSRRFRVLSETITVKLEEEEKDDGASAVLDPPAAVNTKLYFGNLPYNVDSATLAQIIQDFANPELVEVLYNRDTGQSRGFAFVTMSNVEDCNIIIDNLDGTEYLGRALKVNFADKPKPNKEPLYPETEHKLFVGNLSWTVTSESLAGAFRECGDVVGARVVFDGDTGRSRGYGFVCYSSKAEMETALESLDGFELEGRAIRVNLAQGKKF

SEQ ID NO: 2685 - protein, 258 aa, Arabidopsis thaliana
  peptide (1)..(258): Ceres Seq. ID no. 12331280
  misc_feature (87)..(158): Pfam Name: a.k.a. RRM, RBD, or RNP domain Pfam Description: RNA recognition motif.
  misc_feature (1)..(258): NCBI GI NO: 15218972 NR Description: chloroplast RNA-binding protein, putative
  misc_feature (44)..(257): NCBI GI NO: 1076509 NR Description: RNA-binding protein RNP1 precursor - kidney bean
  misc_feature (58)..(257): NCBI GI NO: 7446361 NR Description: RNA-binding protein - fava bean (fragment)
  misc_feature (1)..(66): NCBI GI NO: 30696379 NR Description: 29 kDa ribonucleoprotein, chloroplast
  misc_feature (2)..(169): NCBI GI NO: 21617920 NR Description: putative RNA-binding protein
  misc_feature (177)..(256): NCBI GI NO: 21617920 NR Description: putative RNA-binding protein
  misc_feature (2)..(169): NCBI GI NO: 15228102 NR Description: chloroplast RNA-binding protein cp29, putative
  misc_feature (177)..(256): NCBI GI NO: 15228102 NR Description: chloroplast RNA-binding protein cp29, putative
  misc_feature (26)..(256): NCBI GI NO: 12230584 NR Description: 29 kDa ribonucleoprotein A, chloroplast precursor
  misc_feature (39)..(256): NCBI GI NO: 34913270 NR Description: putative ribonucleoprotein
MAASSVLLSCFKSHHQPNLLHGCNYSSNQTLLRFNFSTPKPLLISSRSCSRRFRVLSETITVKLEEEEKDDGASAVLDPPAAVNTKLYFGNLPYNVDSATLAQIIQDFANPELVEVLYNRDTGQSRGFAFVTMSNVEDCNIIIDNLDGTEYLGRALKVNFADKPKPNKEPLYPETEHKLFVGNLSWTVTSESLAGAFRECGDVVGARVVFDGDTGRSRGYGFVCYSSKAEMETALESLDGFELEGRAIRVNLAQGKKF

SEQ ID NO: 2686 - DNA, 889 bp, Arabidopsis thaliana
  misc_feature (1)..(889): Ceres Seq. ID no. 13491579
aagcaaaaaaaaaaaaaaacagagcaaaatggccgtagttttacgtggaggcatcaccggaggatttcttcaccatcgtcgtgacgcttcatccgtcatcacaagaagaatctcatccgtcaaagccgcaggaggaggcatcaacccaacggtggctgttgaacgtgccacgtggctacctggactaaaccctcctccttatcttgatggaaatttagctggagattacgggtttgacccactcgggttaggagaggatccggaaagcttgaagtggtatgttcaagcagagcttgttcactctcgtttcgctatgctcggtgttgcaggaatactcttcactgatctccttcggaccacagggattcgtaatttaccggtttggtatgaagctggagctgtgaaatttgattttgctagtacaaaaactctcatagttgtacagtttctacttatggggtttgctgagactaaaaggtatatggattttgtctctccgggatcacaagccaaagaaggatcgtttttctttggacttgaagcagcactcgaggggctcgagcctggatatcccggaggaccgcttttaaacccattaggccttgctaaggatgttcaaaatgctcatgactggaagcttaaggagatcaagaacggtcgtctagcgatgatggcgatgctcgggttctttgttcaagcctctgtgactcacactggccctattgataaccttgttgagcatctctctaatccatggcataagaccatcattcaaaccctcttcacctctacatcttaggtacattcttttgtaatgaaaaattcgattattcgacaagtgtatcaatacctttatttcatttaagagtacaacaaatctgttctaatc

SEQ ID NO: 2687 - protein, 265 aa, Arabidopsis thaliana
  peptide (1)..(265): Ceres Seq. ID no. 13491580
  misc_feature (63)..(234): Pfam Name: Pfam Description:  Chlorophyll A-B binding protein
  misc_feature (10)..(265): NCBI GI NO: 15220077 NR Description: light-harvesting chlorophyll a/b binding protein
  misc_feature (10)..(265): NCBI GI NO: 25299023 NR Description: chlorophyll a/b-binding protein Lhca5
  misc_feature (10)..(265): NCBI GI NO: 21593722 NR Description: light-harvesting complex protein
  misc_feature (30)..(253): NCBI GI NO: 27542569 NR Description: light-harvesting complex I protein
  misc_feature (33)..(253): NCBI GI NO: 40714515 NR Description: light-harvesting chlorophyll-a/b protein of photosystem I
  misc_feature (30)..(253): NCBI GI NO: 40714521 NR Description: light-harvesting chlorophyll-a/b protein of photosystem I
  misc_feature (53)..(253): NCBI GI NO: 5902596 NR Description: light harvesting complex a protein
  misc_feature (46)..(260): NCBI GI NO: 322392 NR Description: chlorophyll a/b-binding protein type 4
  misc_feature (46)..(260): NCBI GI NO: 322393 NR Description: chlorophyll a/b-binding protein type 4
  misc_feature (29)..(260): NCBI GI NO: 100196 NR Description: chlorophyll a/b-binding protein (cab-11) - tomato
SKKKKKQSKMAVVLRGGITGGFLHHRRDASSVITRRISSVKAAGGGINPTVAVERATWLPGLNPPPYLDGNLAGDYGFDPLGLGEDPESLKWYVQAELVHSRFAMLGVAGILFTDLLRTTGIRNLPVWYEAGAVKFDFASTKTLIVVQFLLMGFAETKRYMDFVSPGSQAKEGSFFFGLEAALEGLEPGYPGGPLLNPLGLAKDVQNAHDWKLKEIKNGRLAMMAMLGFFVQASVTHTGPIDNLVEHLSNPWHKTIIQTLFTSTS

SEQ ID NO: 2688 - protein, 256 aa, Arabidopsis thaliana
  peptide (1)..(256): Ceres Seq. ID no. 13491581
  misc_feature (54)..(225): Pfam Name: Pfam Description:  Chlorophyll A-B binding protein
  misc_feature (1)..(256): NCBI GI NO: 15220077 NR Description: light-harvesting chlorophyll a/b binding protein
  misc_feature (1)..(256): NCBI GI NO: 25299023 NR Description: chlorophyll a/b-binding protein Lhca5
  misc_feature (1)..(256): NCBI GI NO: 21593722 NR Description: light-harvesting complex protein
  misc_feature (21)..(244): NCBI GI NO: 27542569 NR Description: light-harvesting complex I protein
  misc_feature (24)..(244): NCBI GI NO: 40714515 NR Description: light-harvesting chlorophyll-a/b protein of photosystem I
  misc_feature (21)..(244): NCBI GI NO: 40714521 NR Description: light-harvesting chlorophyll-a/b protein of photosystem I
  misc_feature (44)..(244): NCBI GI NO: 5902596 NR Description: light harvesting complex a protein
  misc_feature (37)..(251): NCBI GI NO: 322392 NR Description: chlorophyll a/b-binding protein type 4
  misc_feature (37)..(251): NCBI GI NO: 322393 NR Description: chlorophyll a/b-binding protein type 4
  misc_feature (20)..(251): NCBI GI NO: 100196 NR Description: chlorophyll a/b-binding protein (cab-11) - tomato
MAVVLRGGITGGFLHHRRDASSVITRRISSVKAAGGGINPTVAVERATWLPGLNPPPYLDGNLAGDYGFDPLGLGEDPESLKWYVQAELVHSRFAMLGVAGILFTDLLRTTGIRNLPVWYEAGAVKFDFASTKTLIVVQFLLMGFAETKRYMDFVSPGSQAKEGSFFFGLEAALEGLEPGYPGGPLLNPLGLAKDVQNAHDWKLKEIKNGRLAMMAMLGFFVQASVTHTGPIDNLVEHLSNPWHKTIIQTLFTSTS

SEQ ID NO: 2689 - protein, 161 aa, Arabidopsis thaliana
  peptide (1)..(161): Ceres Seq. ID no. 13491582
  misc_feature (1)..(130): Pfam Name: Pfam Description:  Chlorophyll A-B binding protein
  misc_feature (1)..(161): NCBI GI NO: 15220077 NR Description: light-harvesting chlorophyll a/b binding protein
  misc_feature (1)..(161): NCBI GI NO: 25299023 NR Description: chlorophyll a/b-binding protein Lhca5
  misc_feature (1)..(161): NCBI GI NO: 21593722 NR Description: light-harvesting complex protein
  misc_feature (1)..(149): NCBI GI NO: 27542569 NR Description: light-harvesting complex I protein
  misc_feature (1)..(149): NCBI GI NO: 40714515 NR Description: light-harvesting chlorophyll-a/b protein of photosystem I
  misc_feature (1)..(149): NCBI GI NO: 40714521 NR Description: light-harvesting chlorophyll-a/b protein of photosystem I
  misc_feature (1)..(149): NCBI GI NO: 5902596 NR Description: light harvesting complex a protein
  misc_feature (1)..(156): NCBI GI NO: 322392 NR Description: chlorophyll a/b-binding protein type 4
  misc_feature (1)..(156): NCBI GI NO: 322393 NR Description: chlorophyll a/b-binding protein type 4
  misc_feature (1)..(156): NCBI GI NO: 100196 NR Description: chlorophyll a/b-binding protein (cab-11) - tomato
MLGVAGILFTDLLRTTGIRNLPVWYEAGAVKFDFASTKTLIVVQFLLMGFAETKRYMDFVSPGSQAKEGSFFFGLEAALEGLEPGYPGGPLLNPLGLAKDVQNAHDWKLKEIKNGRLAMMAMLGFFVQASVTHTGPIDNLVEHLSNPWHKTIIQTLFTSTS

SEQ ID NO: 2690 - DNA, 1189 bp, Arabidopsis thaliana
  misc_feature (1)..(1189): Ceres Seq. ID no. 12599958
  misc_feature (520)..(520): n is a, c, t, g, unknown, or other
  misc_feature (525)..(525): n is a, c, t, g, unknown, or other
  misc_feature (510)..(510): n is a, c, t, g, unknown, or other
cagaaaaattttggacttattttcgatatgtttaggggaaaaatatttgtgttatcattattttctatttacgtcctctcatcagcggctgaaaaaaatacatcattttctgcgctttttgcttttggtgattcagtcttagatacgggaaacaataattttcttcttactcttctcaaaggaaattattggccatatggtttgagttttgactataaatttccgacgggaagattcggaaatggaagagttttcaccgatatagttgccgaagtttacagatcaaaagacttgtaccagcttatagcaagattcgtcgcatcagttctgaagaccttaagactggcgtttgttttgcatcaggtggttcaggaattgacgatcttacatcccgaacactgagagttttatcggcaggtgaccaagtaaaagactttaaagactatttgaagaaactaagaagagtagtgaaacgtaagaaaaaagtaaaagaaatagtttcaaaacccnggggcccccnttttngggtgtttcttatttctgaaggaaataatgatcttggatactttgtcgctcccgctcttcttcgattacagtccacaacaacatacaccagtaaaatggttgtttggaccagaaagtttctaaaagatttatatgatcttggagcgagaaaatttgcggtgatgggagtgatgcctgtgggatgtttgcctatccatcgagcctcattcggtggggtattcggatggtgtaacttcctcttgaatagagttacggaggacttcaacatgaaattgcagaaaggtcttacaagttacgcagtagaatatgatttcaaagatgcaaagtttgtttacgtcgacatatacggtactcttatggatcttgtcaaaaatcctatggcctatgggtttacagaagcgaaaaaagcttgttgttgtatgccgaatgcaataataccatgcttccatccagataaatacgtcttctatgactttgctcacccttcccagaaagcctacgaagtaatatctaaacctattgtctatcagatagcgaaaggccttgcctagctaattccttatttcctacaatgttttattataatctttgaaaattatcaccatatcgataaatatatgtaaatgtataagattcatgacaatctattcgtttttcttattgg

SEQ ID NO: 2691 - protein, 151 aa, Arabidopsis thaliana
  peptide (1)..(151): Ceres Seq. ID no. 12599959
  misc_feature (1)..(142): Pfam Name: Pfam Description:  GDSL-like Lipase/Acylhydrolase
  misc_feature (1)..(151): NCBI GI NO: 15222904 NR Description: family II extracellular lipase 6
  misc_feature (1)..(151): NCBI GI NO: 25404995 NR Description: protein T4O12.15 [imported] - Arabidopsis thaliana
  misc_feature (1)..(151): NCBI GI NO: 8778809 NR Description: T4O12.14 [Arabidopsis thaliana]
  misc_feature (1)..(151): NCBI GI NO: 18410967 NR Description: family II extracellular lipase 5
  misc_feature (1)..(151): NCBI GI NO: 15222902 NR Description: family II extracellular lipase 4
  misc_feature (1)..(151): NCBI GI NO: 15054388 NR Description: family II lipase EXL4 [Arabidopsis thaliana]
  misc_feature (1)..(151): NCBI GI NO: 25404994 NR Description: protein T4O12.13 [imported] - Arabidopsis thaliana
  misc_feature (1)..(151): NCBI GI NO: 15220775 NR Description: hypothetical protein; protein id: At1g23500.1
  misc_feature (1)..(151): NCBI GI NO: 15219505 NR Description: putative lipase/acylhydrolase
  misc_feature (1)..(151): NCBI GI NO: 15242657 NR Description: lipase/acylhydrolase-like protein
MVVWTRKFLKDLYDLGARKFAVMGVMPVGCLPIHRASFGGVFGWCNFLLNRVTEDFNMKLQKGLTSYAVEYDFKDAKFVYVDIYGTLMDLVKNPMAYGFTEAKKACCCMPNAIIPCFHPDKYVFYDFAHPSQKAYEVISKPIVYQIAKGLA

SEQ ID NO: 2692 - protein, 133 aa, Arabidopsis thaliana
  peptide (1)..(133): Ceres Seq. ID no. 12599960
  misc_feature (39)..(112): Pfam Name: Pfam Description:  GDSL-like Lipase/Acylhydrolase
  misc_feature (10)..(95): NCBI GI NO: 8778809 NR Description: T4O12.14 [Arabidopsis thaliana]
  misc_feature (15)..(95): NCBI GI NO: 18410967 NR Description: family II extracellular lipase 5
  misc_feature (17)..(91): NCBI GI NO: 15222902 NR Description: family II extracellular lipase 4
  misc_feature (17)..(91): NCBI GI NO: 15054388 NR Description: family II lipase EXL4 [Arabidopsis thaliana]
  misc_feature (33)..(91): NCBI GI NO: 25404994 NR Description: protein T4O12.13 [imported] - Arabidopsis thaliana
  misc_feature (38)..(91): NCBI GI NO: 25404994 NR Description: protein T4O12.13 [imported] - Arabidopsis thaliana
  misc_feature (3)..(98): NCBI GI NO: 15220775 NR Description: hypothetical protein; protein id: At1g23500.1
  misc_feature (10)..(98): NCBI GI NO: 15219505 NR Description: putative lipase/acylhydrolase
  misc_feature (23)..(91): NCBI GI NO: 15242657 NR Description: lipase/acylhydrolase-like protein
  misc_feature (15)..(116): NCBI GI NO: 25511649 NR Description: T20H2.9 protein - Arabidopsis thaliana
QKNFGLIFDMFRGKIFVLSLFSIYVLSSAAEKNTSFSALFAFGDSVLDTGNNNFLLTLLKGNYWPYGLSFDYKFPTGRFGNGRVFTDIVAEVYRSKDLYQLIARFVASVLKTLRLAFVLHQVVQELTILHPEH

SEQ ID NO: 2693 - protein, 129 aa, Arabidopsis thaliana
  peptide (1)..(129): Ceres Seq. ID no. 12599961
  misc_feature (1)..(120): Pfam Name: Pfam Description:  GDSL-like Lipase/Acylhydrolase
  misc_feature (1)..(129): NCBI GI NO: 15222904 NR Description: family II extracellular lipase 6
  misc_feature (1)..(129): NCBI GI NO: 25404995 NR Description: protein T4O12.15 [imported] - Arabidopsis thaliana
  misc_feature (1)..(129): NCBI GI NO: 8778809 NR Description: T4O12.14 [Arabidopsis thaliana]
  misc_feature (1)..(129): NCBI GI NO: 18410967 NR Description: family II extracellular lipase 5
  misc_feature (1)..(129): NCBI GI NO: 15222902 NR Description: family II extracellular lipase 4
  misc_feature (1)..(129): NCBI GI NO: 15054388 NR Description: family II lipase EXL4 [Arabidopsis thaliana]
  misc_feature (1)..(129): NCBI GI NO: 25404994 NR Description: protein T4O12.13 [imported] - Arabidopsis thaliana
  misc_feature (1)..(129): NCBI GI NO: 15220775 NR Description: hypothetical protein; protein id: At1g23500.1
  misc_feature (1)..(129): NCBI GI NO: 15219505 NR Description: putative lipase/acylhydrolase
  misc_feature (1)..(129): NCBI GI NO: 15242657 NR Description: lipase/acylhydrolase-like protein
MGVMPVGCLPIHRASFGGVFGWCNFLLNRVTEDFNMKLQKGLTSYAVEYDFKDAKFVYVDIYGTLMDLVKNPMAYGFTEAKKACCCMPNAIIPCFHPDKYVFYDFAHPSQKAYEVISKPIVYQIAKGLA

SEQ ID NO: 2694 - DNA, 1225 bp, Arabidopsis thaliana
  misc_feature (1)..(1225): Ceres Seq. ID no. 12384468
aacccaagatctctccttcttgtttccccagatctgaaatttcaaaagctacccaattttaactcaagactctgaacaacacatctagatccatttccatggcgagcgcctggaaaaaagacaagaaccaaaaacttttatcaccaaagacactaatctcacttcttgtcctttccattatcttcctctcttctctcttcttcttcttctctaactcctctctccaatactccaatccaaatctctccatcaattccccatacccaatccctccttttgattgcttcaaatgtccacaatcaaaacccataatcgcaaacgtcgtcgagaatctcaagtacccttttgtttactctctcgctgatctcggtaatctcccggagaaaccacataagaacattgttaggctacttaaaggtaagccctttaggaaaccagatatctccgcaacgattcaggaggtattggatagtatgagagctagtggtaaaaatgggattgttgttgatgttggagctaatgttggtatggctagctttgctgctgcggttatggggtttaaagttcttgcctttgagcctgtttttgagaatttacagaggatttgtgatgggatttggtttaatagagtttcttctttggttactgtgtttgaagctgctgcttctgacagaacaggggatattaccttccataagttggtaggacggcttgacaatagcgcggtttcggaggtgggagcaaggcttgcattcaagtccaacaaagagatagcagtgcaagtcaaatccatacctcttgataaactaattccaccttctcaacctgttcttcttatcaagatcgacgttcaaggttgggaataccacgttttaaagggtgcgaagaagttgctttcaaggaaaccagcagaagctccttatctaatctatgaggaagatgagagattgctcacggcaagcaatagtagctcgaaagagatacgtgattttcttaaaagcgttggatatagtaagtgtagccagcatgggacagatgcacattgcaccaaggagtgaaagacattggacttaccgacaaatggtaataagatgccatacaagttgaggaatataaggaagatgagcaataggtatttgcagagaaaaacatttagtttataagttgccaaatttggtcagtcatgtttgtttctccttgtaatatgtactcaattttttttggt

SEQ ID NO: 2695 - protein, 319 aa, Arabidopsis thaliana
  peptide (1)..(319): Ceres Seq. ID no. 12384469
  misc_feature (1)..(319): NCBI GI NO: 21593723 NR Description: unknown [Arabidopsis thaliana]
  misc_feature (1)..(319): NCBI GI NO: 18401209 NR Description: expressed protein; protein id: At2g26680
  misc_feature (2)..(318): NCBI GI NO: 34896590 NR Description: hypothetical protein [Oryza sativa]
MASAWKKDKNQKLLSPKTLISLLVLSIIFLSSLFFFFSNSSLQYSNPNLSINSPYPIPPFDCFKCPQSKPIIANVVENLKYPFVYSLADLGNLPEKPHKNIVRLLKGKPFRKPDISATIQEVLDSMRASGKNGIVVDVGANVGMASFAAAVMGFKVLAFEPVFENLQRICDGIWFNRVSSLVTVFEAAASDRTGDITFHKLVGRLDNSAVSEVGARLAFKSNKEIAVQVKSIPLDKLIPPSQPVLLIKIDVQGWEYHVLKGAKKLLSRKPAEAPYLIYEEDERLLTASNSSSKEIRDFLKSVGYSKCSQHGTDAHCTKE

SEQ ID NO: 2696 - protein, 194 aa, Arabidopsis thaliana
  peptide (1)..(194): Ceres Seq. ID no. 12384470
  misc_feature (1)..(194): NCBI GI NO: 21593723 NR Description: unknown [Arabidopsis thaliana]
  misc_feature (1)..(194): NCBI GI NO: 18401209 NR Description: expressed protein; protein id: At2g26680
  misc_feature (1)..(193): NCBI GI NO: 34896590 NR Description: hypothetical protein [Oryza sativa]
MRASGKNGIVVDVGANVGMASFAAAVMGFKVLAFEPVFENLQRICDGIWFNRVSSLVTVFEAAASDRTGDITFHKLVGRLDNSAVSEVGARLAFKSNKEIAVQVKSIPLDKLIPPSQPVLLIKIDVQGWEYHVLKGAKKLLSRKPAEAPYLIYEEDERLLTASNSSSKEIRDFLKSVGYSKCSQHGTDAHCTKE

SEQ ID NO: 2697 - protein, 176 aa, Arabidopsis thaliana
  peptide (1)..(176): Ceres Seq. ID no. 12384471
  misc_feature (1)..(176): NCBI GI NO: 21593723 NR Description: unknown [Arabidopsis thaliana]
  misc_feature (1)..(176): NCBI GI NO: 18401209 NR Description: expressed protein; protein id: At2g26680
  misc_feature (1)..(175): NCBI GI NO: 34896590 NR Description: hypothetical protein [Oryza sativa]
MASFAAAVMGFKVLAFEPVFENLQRICDGIWFNRVSSLVTVFEAAASDRTGDITFHKLVGRLDNSAVSEVGARLAFKSNKEIAVQVKSIPLDKLIPPSQPVLLIKIDVQGWEYHVLKGAKKLLSRKPAEAPYLIYEEDERLLTASNSSSKEIRDFLKSVGYSKCSQHGTDAHCTKE

SEQ ID NO: 2698 - DNA, 1251 bp, Arabidopsis thaliana
  misc_feature (1)..(1251): Ceres Seq. ID no. 12577599
atacatatcaatgttaatttgtatataaggagctaagaacaaacccaattaggcaactagcaattgctaaaacacgtaagatctcaaatatgaccacgttattcctccttattgctctattcatcacaaccatcctcaacccaacaagtggagaatcagtaggtgtatgctatggaatgatggggaacaaccttccttctcaatcagacacaatcgctctctttagacaaaacaacatccgacgtgttagactctacgatccaaaccaagccgctttaaacgctcttagaaacacgggtatcgaagtcatcatcggcgttccaaacaccgatcttcgttcactcactaacccttcttccgctagatcatggctccaaaacaacgtcctcaactattaccccgccgttagcttcaagtacatcgccgtaggtaacgaagtatctccgtcgaacggcggtgatgttgtgctccctgccatgcgtaacgtttacgatgctctaagaggtgcaaatcttcaagatcgtattaaagtttctaccgccattgatatgactttgattggaaactctttccctccttcctccggagagtttcgtggtgacgttagatggtatatcgatcccgtcatcgggtttcttacgagtacgaactcagcgttactagccaacatctatccttacttcagctacgttgacaatccacgtgacatatctctctcttacgctctcttcacttctccttccgtcgtcgtatgggacggctctcgtggctaccaaaacctctttgacgctttacttgacgttgtttactctgccgttgaacgctcaggcggtggatctctcccagtggttgtttccgagagcggatggccttctaacggtggaaacgccgcgagtttcgataacgcgcgagctttttacacgaatcttgcgtcgcgtgtgagagagaacagaggaacaccgaagagacctggaagaggagtggaaacgtatttgttcgctatgtttgatgagaatcaaaagagtcctgagatcgagaagaattttggtttgttttttcctaataaacaaccaaaatttccgatcacattctctgccgcgagagacggtacggcggttgagtgatgattttatatgctgagatttatgtgaataattgggagattatcccataaaaggttccaaataaagacaaatttcaaataaaacctgttagtccaagttaaattaaatactcggctttgttttggtc

SEQ ID NO: 2699 - protein, 344 aa, Arabidopsis thaliana
  peptide (1)..(344): Ceres Seq. ID no. 12577600
  misc_feature (24)..(295): Pfam Name: Pfam Description:  Glycosyl hydrolases family 17
  misc_feature (1)..(344): NCBI GI NO: 17381238 NR Description: AT4g16260/dl4170c [Arabidopsis thaliana]
  misc_feature (1)..(302): NCBI GI NO: 15234880 NR Description: glycosyl hydrolase family 17
  misc_feature (1)..(339): NCBI GI NO: 32765543 NR Description: beta-1,3-glucanase [Hevea brasiliensis]
  misc_feature (2)..(339): NCBI GI NO: 1706547 NR Description: Glucan endo-1
  misc_feature (1)..(338): NCBI GI NO: 22550395 NR Description: beta-1,3-glucanase [Vitis vinifera]
  misc_feature (1)..(334): NCBI GI NO: 4469175 NR Description: beta-1,3-glucanase [Hevea brasiliensis]
  misc_feature (24)..(334): NCBI GI NO: 10946499 NR Description: beta-1,3-glucanase [Hevea brasiliensis]
  misc_feature (1)..(344): NCBI GI NO: 1169445 NR Description: GLUCAN ENDO-1,3-BETA-GLUCOSIDASE PRECURSOR ((1-
  misc_feature (1)..(340): NCBI GI NO: 7447979 NR Description: 1,3-beta-glucanase (EC 3.2.1.-), acidic - alfalfa
  misc_feature (1)..(338): NCBI GI NO: 4883425 NR Description: glucan-endo-1,3-beta-glucosidase [Cicer arietinum]
MTTLFLLIALFITTILNPTSGESVGVCYGMMGNNLPSQSDTIALFRQNNIRRVRLYDPNQAALNALRNTGIEVIIGVPNTDLRSLTNPSSARSWLQNNVLNYYPAVSFKYIAVGNEVSPSNGGDVVLPAMRNVYDALRGANLQDRIKVSTAIDMTLIGNSFPPSSGEFRGDVRWYIDPVIGFLTSTNSALLANIYPYFSYVDNPRDISLSYALFTSPSVVVWDGSRGYQNLFDALLDVVYSAVERSGGGSLPVVVSESGWPSNGGNAASFDNARAFYTNLASRVRENRGTPKRPGRGVETYLFAMFDENQKSPEIEKNFGLFFPNKQPKFPITFSAARDGTAVE

SEQ ID NO: 2700 - protein, 315 aa, Arabidopsis thaliana
  peptide (1)..(315): Ceres Seq. ID no. 12577601
  misc_feature (1)..(266): Pfam Name: Pfam Description:  Glycosyl hydrolases family 17
  misc_feature (1)..(315): NCBI GI NO: 17381238 NR Description: AT4g16260/dl4170c [Arabidopsis thaliana]
  misc_feature (1)..(273): NCBI GI NO: 15234880 NR Description: glycosyl hydrolase family 17
  misc_feature (1)..(310): NCBI GI NO: 32765543 NR Description: beta-1,3-glucanase [Hevea brasiliensis]
  misc_feature (1)..(310): NCBI GI NO: 1706547 NR Description: Glucan endo-1
  misc_feature (1)..(309): NCBI GI NO: 22550395 NR Description: beta-1,3-glucanase [Vitis vinifera]
  misc_feature (1)..(305): NCBI GI NO: 4469175 NR Description: beta-1,3-glucanase [Hevea brasiliensis]
  misc_feature (1)..(305): NCBI GI NO: 10946499 NR Description: beta-1,3-glucanase [Hevea brasiliensis]
  misc_feature (1)..(315): NCBI GI NO: 1169445 NR Description: GLUCAN ENDO-1,3-BETA-GLUCOSIDASE PRECURSOR ((1-
  misc_feature (1)..(311): NCBI GI NO: 7447979 NR Description: 1,3-beta-glucanase (EC 3.2.1.-), acidic - alfalfa
  misc_feature (1)..(309): NCBI GI NO: 4883425 NR Description: glucan-endo-1,3-beta-glucosidase [Cicer arietinum]
MMGNNLPSQSDTIALFRQNNIRRVRLYDPNQAALNALRNTGIEVIIGVPNTDLRSLTNPSSARSWLQNNVLNYYPAVSFKYIAVGNEVSPSNGGDVVLPAMRNVYDALRGANLQDRIKVSTAIDMTLIGNSFPPSSGEFRGDVRWYIDPVIGFLTSTNSALLANIYPYFSYVDNPRDISLSYALFTSPSVVVWDGSRGYQNLFDALLDVVYSAVERSGGGSLPVVVSESGWPSNGGNAASFDNARAFYTNLASRVRENRGTPKRPGRGVETYLFAMFDENQKSPEIEKNFGLFFPNKQPKFPITFSAARDGTAVE

SEQ ID NO: 2701 - protein, 314 aa, Arabidopsis thaliana
  peptide (1)..(314): Ceres Seq. ID no. 12577602
  misc_feature (1)..(265): Pfam Name: Pfam Description:  Glycosyl hydrolases family 17
  misc_feature (1)..(314): NCBI GI NO: 17381238 NR Description: AT4g16260/dl4170c [Arabidopsis thaliana]
  misc_feature (1)..(272): NCBI GI NO: 15234880 NR Description: glycosyl hydrolase family 17
  misc_feature (1)..(309): NCBI GI NO: 32765543 NR Description: beta-1,3-glucanase [Hevea brasiliensis]
  misc_feature (1)..(309): NCBI GI NO: 1706547 NR Description: Glucan endo-1
  misc_feature (1)..(308): NCBI GI NO: 22550395 NR Description: beta-1,3-glucanase [Vitis vinifera]
  misc_feature (1)..(304): NCBI GI NO: 4469175 NR Description: beta-1,3-glucanase [Hevea brasiliensis]
  misc_feature (1)..(304): NCBI GI NO: 10946499 NR Description: beta-1,3-glucanase [Hevea brasiliensis]
  misc_feature (1)..(314): NCBI GI NO: 1169445 NR Description: GLUCAN ENDO-1,3-BETA-GLUCOSIDASE PRECURSOR ((1-
  misc_feature (1)..(310): NCBI GI NO: 7447979 NR Description: 1,3-beta-glucanase (EC 3.2.1.-), acidic - alfalfa
  misc_feature (1)..(308): NCBI GI NO: 4883425 NR Description: glucan-endo-1,3-beta-glucosidase [Cicer arietinum]
MGNNLPSQSDTIALFRQNNIRRVRLYDPNQAALNALRNTGIEVIIGVPNTDLRSLTNPSSARSWLQNNVLNYYPAVSFKYIAVGNEVSPSNGGDVVLPAMRNVYDALRGANLQDRIKVSTAIDMTLIGNSFPPSSGEFRGDVRWYIDPVIGFLTSTNSALLANIYPYFSYVDNPRDISLSYALFTSPSVVVWDGSRGYQNLFDALLDVVYSAVERSGGGSLPVVVSESGWPSNGGNAASFDNARAFYTNLASRVRENRGTPKRPGRGVETYLFAMFDENQKSPEIEKNFGLFFPNKQPKFPITFSAARDGTAVE

SEQ ID NO: 2702 - DNA, 584 bp, Arabidopsis thaliana
  misc_feature (1)..(584): Ceres Seq. ID no. 12326973
tcaattaacataaccttcgccgtcgatgaagctttcccttcaattcccactaccttcagcgtcgcaacgaaacaacactacgacgtaaaaccaatccaccatgaagtttatgacggagaaaggaagatatacgacatcagccaccagtacacgccggagttgccggtttgggagtcttcagaaggactagggaactttcttagacttgccgtgagtatgaagaatggatccgatgctaatatctcgaagatggaactatctgttcactctggaactcatgttgatgcaccaggccatttccatgaccattattatgagtctggttttgatactgattcacttgatcttcaaatccttaatggtaaacatttttggaactcttttttttttttttttttaagtagctagtgatcgtttttgaaattggtttctgtgaatttaatttataggtcctgctttattggttgatgttccaagagataagaacatttcaggtttgttgagagttttctaacattgaaatttttacaaaatcttcattaaatgtttgttacaaaatttttgtgtaatgatttggttgttgt

SEQ ID NO: 2703 - protein, 135 aa, Arabidopsis thaliana
  peptide (1)..(135): Ceres Seq. ID no. 12326974
  misc_feature (43)..(121): Pfam Name: Pfam Description:  Putative cyclase
  misc_feature (1)..(121): NCBI GI NO: 15219416 NR Description: hypothetical protein; protein id: At1g44542.1
  misc_feature (28)..(121): NCBI GI NO: 7486287 NR Description: hypothetical protein F28A23
  misc_feature (28)..(121): NCBI GI NO: 18418393 NR Description: putative protein; protein id: At4g34180
  misc_feature (1)..(121): NCBI GI NO: 7486023 NR Description: hypothetical protein F23E12
  misc_feature (1)..(121): NCBI GI NO: 18418598 NR Description: putative protein; protein id: At4g35220
  misc_feature (11)..(121): NCBI GI NO: 35215089 NR Description: hypothetical protein
SINITFAVDEAFPSIPTTFSVATKQHYDVKPIHHEVYDGERKIYDISHQYTPELPVWESSEGLGNFLRLAVSMKNGSDANISKMELSVHSGTHVDAPGHFHDHYYESGFDTDSLDLQILNGKHFWNSFFFFFLSS

SEQ ID NO: 2704 - DNA, 1688 bp, Arabidopsis thaliana
  misc_feature (1)..(1688): Ceres Seq. ID no. 12327466
aacaccactctctctttctctgtgtctccttcaaatcttcatctctctctccatctctcttctccacaagaagctgagtatggatctcctcacaccactcatcttcctcctcctcctcctctcaccattttcactctcagatgctggttccatcggagtaaactacggccgaatctccgacgaactcccctccgcattcaaagtagtccaactactaaaatcccaaggaatcacgcgagtcaaaatcttcgacgcagacccatcagttctcaaagcattatccggatctggaatcaaagtcaccgtagatctccccaacgagttactcttctccgccgccaaaagaacttccttcgccgtctcatgggtcaaacgcaacgtagcagcttatcatccttcaacacagatcgaatcaatagctgttggtaacgaagtcttcgttgatacacacaacactacaagcttcttgatccctgcaatgagaaacattcacaaagctcttatgagtttcaatctccactccgacattaaaatctcttctcctcttgctttaagcgctcttcaaaactcttacccttcttcctccggttctttccgaccagaacttgtcgactctgttatcaaaccaatgcttgacttcttacgtgaaactggttcaagacttatgatcaatgtctatcctttctttgcttatgaaggaaactctgacgtcattcctttagattatgctttgcttagagagaatccaggaatggttgattctggtaatggtttgagatactttaatctcttcgacgctcaaatcgacgccgttttcgcagcaatgtcggctttaaagtacgatgatatcgaaatcattgtcacggaaactggttggccctcgaaaggagatgagaatgaagtcggagctactctagctaacgcagcttcttacaacggaaacttaatccgtcggatcttgacacgtggaggtacaccgttacgtcctaaagcagatctaacggtctatcttttcgctctgttcaacgagaacaagaagttaggtccaacgtcggagagaaactatggtctcttcttccctgatgagaagaaagtctacgacattcctttcacaacagaggggttgaaacattaccgtgacggtggtcatactccggtcaccggaggagatcaggttacaaagcctccgatgagtggaggcgtgtcgaagagtttgaatggttatacttggtgtgtagctaatggtgatgctggtgaagaaaggttacaaggtggtttagattatgcttgtggtgaaggtggtgctgattgtcgcccgattcaacctggtgctaactgttatagtcctgatacacttgaggctcacgcttcgtttgctttcaatagttattaccagaagaagggtcgtgccggtgggagttgttacttcggcggcgccgcttacgtcgttagccaaccaccgaagtatggaagatgcgagtttccgacaggatattaaggaagaagaaggtttgagtttagattaatttctgctatataatatattcgtattttgatgtattttgtttggtgggaagttttagttaatttttgtaacaatgactttttaatgttgtgttgttaataccaacttagacgatgttattgatatttgatatttaggtaatgaaattaaatatgtttgtttc

SEQ ID NO: 2705 - protein, 498 aa, Arabidopsis thaliana
  peptide (1)..(498): Ceres Seq. ID no. 12327467
  misc_feature (51)..(370): Pfam Name: Pfam Description:  Glycosyl hydrolases family 17
  misc_feature (27)..(498): NCBI GI NO: 30678225 NR Description: glycosyl hydrolase family 17
  misc_feature (27)..(489): NCBI GI NO: 25316444 NR Description: probable beta-1,3-glucanase
  misc_feature (25)..(498): NCBI GI NO: 18423719 NR Description: glycosyl hydrolase family 17
  misc_feature (25)..(498): NCBI GI NO: 18700155 NR Description: AT5g55180/MCO15_13 [Arabidopsis thaliana]
  misc_feature (25)..(498): NCBI GI NO: 21594590 NR Description: beta-1,3-glucanase-like protein
  misc_feature (36)..(498): NCBI GI NO: 11071974 NR Description: elicitor inducible beta-1,3-glucanase Nt-SubE76
  misc_feature (25)..(489): NCBI GI NO: 9758115 NR Description: beta-1,3-glucanase-like protein
  misc_feature (38)..(488): NCBI GI NO: 15236882 NR Description: glycosyl hydrolase family 17
  misc_feature (33)..(377): NCBI GI NO: 27529826 NR Description: beta-1,3-glucanase-like protein
  misc_feature (23)..(374): NCBI GI NO: 11279331 NR Description: beta-1,3-glucanase (EC 3.2.1.-) precursor
TPLSLSLCLLQIFISLSISLLHKKLSMDLLTPLIFLLLLLSPFSLSDAGSIGVNYGRISDELPSAFKVVQLLKSQGITRVKIFDADPSVLKALSGSGIKVTVDLPNELLFSAAKRTSFAVSWVKRNVAAYHPSTQIESIAVGNEVFVDTHNTTSFLIPAMRNIHKALMSFNLHSDIKISSPLALSALQNSYPSSSGSFRPELVDSVIKPMLDFLRETGSRLMINVYPFFAYEGNSDVIPLDYALLRENPGMVDSGNGLRYFNLFDAQIDAVFAAMSALKYDDIEIIVTETGWPSKGDENEVGATLANAASYNGNLIRRILTRGGTPLRPKADLTVYLFALFNENKKLGPTSERNYGLFFPDEKKVYDIPFTTEGLKHYRDGGHTPVTGGDQVTKPPMSGGVSKSLNGYTWCVANGDAGEERLQGGLDYACGEGGADCRPIQPGANCYSPDTLEAHASFAFNSYYQKKGRAGGSCYFGGAAYVVSQPPKYGRCEFPTGY

SEQ ID NO: 2706 - protein, 472 aa, Arabidopsis thaliana
  peptide (1)..(472): Ceres Seq. ID no. 12327468
  misc_feature (25)..(344): Pfam Name: Pfam Description:  Glycosyl hydrolases family 17
  misc_feature (1)..(472): NCBI GI NO: 30678225 NR Description: glycosyl hydrolase family 17
  misc_feature (1)..(463): NCBI GI NO: 25316444 NR Description: probable beta-1,3-glucanase
  misc_feature (1)..(472): NCBI GI NO: 18423719 NR Description: glycosyl hydrolase family 17
  misc_feature (1)..(472): NCBI GI NO: 18700155 NR Description: AT5g55180/MCO15_13 [Arabidopsis thaliana]
  misc_feature (1)..(472): NCBI GI NO: 21594590 NR Description: beta-1,3-glucanase-like protein
  misc_feature (10)..(472): NCBI GI NO: 11071974 NR Description: elicitor inducible beta-1,3-glucanase Nt-SubE76
  misc_feature (1)..(463): NCBI GI NO: 9758115 NR Description: beta-1,3-glucanase-like protein
  misc_feature (12)..(462): NCBI GI NO: 15236882 NR Description: glycosyl hydrolase family 17
  misc_feature (7)..(351): NCBI GI NO: 27529826 NR Description: beta-1,3-glucanase-like protein
  misc_feature (1)..(348): NCBI GI NO: 11279331 NR Description: beta-1,3-glucanase (EC 3.2.1.-) precursor
MDLLTPLIFLLLLLSPFSLSDAGSIGVNYGRISDELPSAFKVVQLLKSQGITRVKIFDADPSVLKALSGSGIKVTVDLPNELLFSAAKRTSFAVSWVKRNVAAYHPSTQIESIAVGNEVFVDTHNTTSFLIPAMRNIHKALMSFNLHSDIKISSPLALSALQNSYPSSSGSFRPELVDSVIKPMLDFLRETGSRLMINVYPFFAYEGNSDVIPLDYALLRENPGMVDSGNGLRYFNLFDAQIDAVFAAMSALKYDDIEIIVTETGWPSKGDENEVGATLANAASYNGNLIRRILTRGGTPLRPKADLTVYLFALFNENKKLGPTSERNYGLFFPDEKKVYDIPFTTEGLKHYRDGGHTPVTGGDQVTKPPMSGGVSKSLNGYTWCVANGDAGEERLQGGLDYACGEGGADCRPIQPGANCYSPDTLEAHASFAFNSYYQKKGRAGGSCYFGGAAYVVSQPPKYGRCEFPTGY

SEQ ID NO: 2707 - protein, 339 aa, Arabidopsis thaliana
  peptide (1)..(339): Ceres Seq. ID no. 12327469
  misc_feature (1)..(211): Pfam Name: Pfam Description:  Glycosyl hydrolases family 17
  misc_feature (1)..(339): NCBI GI NO: 30678225 NR Description: glycosyl hydrolase family 17
  misc_feature (1)..(330): NCBI GI NO: 25316444 NR Description: probable beta-1,3-glucanase
  misc_feature (1)..(339): NCBI GI NO: 18423719 NR Description: glycosyl hydrolase family 17
  misc_feature (1)..(339): NCBI GI NO: 18700155 NR Description: AT5g55180/MCO15_13 [Arabidopsis thaliana]
  misc_feature (1)..(339): NCBI GI NO: 21594590 NR Description: beta-1,3-glucanase-like protein
  misc_feature (1)..(339): NCBI GI NO: 11071974 NR Description: elicitor inducible beta-1,3-glucanase Nt-SubE76
  misc_feature (1)..(330): NCBI GI NO: 9758115 NR Description: beta-1,3-glucanase-like protein
  misc_feature (1)..(329): NCBI GI NO: 15236882 NR Description: glycosyl hydrolase family 17
  misc_feature (1)..(218): NCBI GI NO: 27529826 NR Description: beta-1,3-glucanase-like protein
  misc_feature (1)..(215): NCBI GI NO: 11279331 NR Description: beta-1,3-glucanase (EC 3.2.1.-) precursor
MRNIHKALMSFNLHSDIKISSPLALSALQNSYPSSSGSFRPELVDSVIKPMLDFLRETGSRLMINVYPFFAYEGNSDVIPLDYALLRENPGMVDSGNGLRYFNLFDAQIDAVFAAMSALKYDDIEIIVTETGWPSKGDENEVGATLANAASYNGNLIRRILTRGGTPLRPKADLTVYLFALFNENKKLGPTSERNYGLFFPDEKKVYDIPFTTEGLKHYRDGGHTPVTGGDQVTKPPMSGGVSKSLNGYTWCVANGDAGEERLQGGLDYACGEGGADCRPIQPGANCYSPDTLEAHASFAFNSYYQKKGRAGGSCYFGGAAYVVSQPPKYGRCEFPTGY

SEQ ID NO: 2708 - DNA, 1161 bp, Arabidopsis thaliana
  misc_feature (1)..(1161): Ceres Seq. ID no. 12369896
gttttcgaaacgttcacatcactgcgtctcgtttgataaaccctaagcccttttcttcttcgattctccattttcttcctctctgttccggcgacgcttctcctcgccgttccaatcctctccggcatagaaactcggtgtctccttcatcttcctttcccttctgttcgacttcttccttttcttctttctacattcctatggcgggaggagatggtcaggtgtctcattcgcttgagaagcagttcgagagtttccgtgttcaattggaagaatctgcagctttgagagagcagattcgtgctgtggttatggagattgagtctgctactaggcttattcaagctaatcttcttctcgttcatcaatcgcgtcctattcctgaggttatcgagaaagctaaggaaaaaatcgttgatttgaagcagtattatggtcggcttgctgaaattcttgaggagtgtcctggacaatactataggtaccatggagactggagaagtgaaacacaggcagtggtctcccagcttgcttttatgcactggctagaaactggaactcttctcgtgcataccgaagctgaagaaaaacttgggttgaacagtttggagtttggattggagacagaagattatctcactggaatttgtttcatgtcaaacgatttgcctaggtacgtggttaatcgagtgacagcaggagactatgactgcccaagaaaggtgatgaatttcctgacagatcttcatgcagcctttcgcatgctcaatctcaggaacgatttcctgcgcaagaaattcgacagtatgaagtacgacctaagaagagtggaagaagtttactatgatgtcaagatccgaggtttgatttccggcggagatcctcctggcgtccaagcagtccaaggccaatcctaaatgtcctcggctctttttaagtttttatgtataactttgtttagctagcatgaaaacgtcaaggagtgttcttctctaaaccaaaaacggcaaggaaaatagagagactgtagtttttaggtgtagtttgcaattactgaaaacggcaagtattccttttgtgggccttgaaagcccacattttagtcacaactttactgttatccgaagtcagcagcttaatagtataacagtagatgttcat

SEQ ID NO: 2709 - protein, 304 aa, Arabidopsis thaliana
  peptide (1)..(304): Ceres Seq. ID no. 12369897
  misc_feature (93)..(288): Pfam Name: Pfam Description:  Translin family
  misc_feature (67)..(304): NCBI GI NO: 18404301 NR Description: translin-like protein; protein id: At2g37020
  misc_feature (67)..(214): NCBI GI NO: 25408524 NR Description: translin-like protein
  misc_feature (206)..(304): NCBI GI NO: 25408524 NR Description: translin-like protein
  misc_feature (69)..(291): NCBI GI NO: 37534782 NR Description: translin-like protein
  misc_feature (82)..(290): NCBI GI NO: 20129859 NR Description: CG11761-PA [Drosophila melanogaster]
  misc_feature (75)..(287): NCBI GI NO: 40889058 NR Description: Chain A, Crystal Structure Of Human Translin
  misc_feature (77)..(288): NCBI GI NO: 7648677 NR Description: translin [Xenopus laevis]
  misc_feature (77)..(287): NCBI GI NO: 6755899 NR Description: translin; testis/brain-RNA-binding protein
  misc_feature (77)..(287): NCBI GI NO: 21730459 NR Description: Chain A
  misc_feature (77)..(287): NCBI GI NO: 4759270 NR Description: translin
FRNVHITASRLINPKPFSSSILHFLPLCSGDASPRRSNPLRHRNSVSPSSSFPFCSTSSFSSFYIPMAGGDGQVSHSLEKQFESFRVQLEESAALREQIRAVVMEIESATRLIQANLLLVHQSRPIPEVIEKAKEKIVDLKQYYGRLAEILEECPGQYYRYHGDWRSETQAVVSQLAFMHWLETGTLLVHTEAEEKLGLNSLEFGLETEDYLTGICFMSNDLPRYVVNRVTAGDYDCPRKVMNFLTDLHAAFRMLNLRNDFLRKKFDSMKYDLRRVEEVYYDVKIRGLISGGDPPGVQAVQGQS

SEQ ID NO: 2710 - protein, 238 aa, Arabidopsis thaliana
  peptide (1)..(238): Ceres Seq. ID no. 12369898
  misc_feature (27)..(222): Pfam Name: Pfam Description:  Translin family
  misc_feature (1)..(238): NCBI GI NO: 18404301 NR Description: translin-like protein; protein id: At2g37020
  misc_feature (1)..(148): NCBI GI NO: 25408524 NR Description: translin-like protein
  misc_feature (140)..(238): NCBI GI NO: 25408524 NR Description: translin-like protein
  misc_feature (3)..(225): NCBI GI NO: 37534782 NR Description: translin-like protein
  misc_feature (16)..(224): NCBI GI NO: 20129859 NR Description: CG11761-PA [Drosophila melanogaster]
  misc_feature (9)..(221): NCBI GI NO: 40889058 NR Description: Chain A, Crystal Structure Of Human Translin
  misc_feature (11)..(222): NCBI GI NO: 7648677 NR Description: translin [Xenopus laevis]
  misc_feature (11)..(221): NCBI GI NO: 6755899 NR Description: translin; testis/brain-RNA-binding protein
  misc_feature (11)..(221): NCBI GI NO: 21730459 NR Description: Chain A
  misc_feature (11)..(221): NCBI GI NO: 4759270 NR Description: translin
MAGGDGQVSHSLEKQFESFRVQLEESAALREQIRAVVMEIESATRLIQANLLLVHQSRPIPEVIEKAKEKIVDLKQYYGRLAEILEECPGQYYRYHGDWRSETQAVVSQLAFMHWLETGTLLVHTEAEEKLGLNSLEFGLETEDYLTGICFMSNDLPRYVVNRVTAGDYDCPRKVMNFLTDLHAAFRMLNLRNDFLRKKFDSMKYDLRRVEEVYYDVKIRGLISGGDPPGVQAVQGQS

SEQ ID NO: 2711 - protein, 201 aa, Arabidopsis thaliana
  peptide (1)..(201): Ceres Seq. ID no. 12369899
  misc_feature (1)..(185): Pfam Name: Pfam Description:  Translin family
  misc_feature (1)..(201): NCBI GI NO: 18404301 NR Description: translin-like protein; protein id: At2g37020
  misc_feature (1)..(111): NCBI GI NO: 25408524 NR Description: translin-like protein
  misc_feature (103)..(201): NCBI GI NO: 25408524 NR Description: translin-like protein
  misc_feature (1)..(188): NCBI GI NO: 37534782 NR Description: translin-like protein
  misc_feature (1)..(187): NCBI GI NO: 20129859 NR Description: CG11761-PA [Drosophila melanogaster]
  misc_feature (1)..(184): NCBI GI NO: 40889058 NR Description: Chain A, Crystal Structure Of Human Translin
  misc_feature (1)..(185): NCBI GI NO: 7648677 NR Description: translin [Xenopus laevis]
  misc_feature (1)..(184): NCBI GI NO: 6755899 NR Description: translin; testis/brain-RNA-binding protein
  misc_feature (1)..(184): NCBI GI NO: 21730459 NR Description: Chain A
  misc_feature (1)..(184): NCBI GI NO: 4759270 NR Description: translin
MEIESATRLIQANLLLVHQSRPIPEVIEKAKEKIVDLKQYYGRLAEILEECPGQYYRYHGDWRSETQAVVSQLAFMHWLETGTLLVHTEAEEKLGLNSLEFGLETEDYLTGICFMSNDLPRYVVNRVTAGDYDCPRKVMNFLTDLHAAFRMLNLRNDFLRKKFDSMKYDLRRVEEVYYDVKIRGLISGGDPPGVQAVQGQS

SEQ ID NO: 2712 - DNA, 1007 bp, Arabidopsis thaliana
  misc_feature (1)..(1007): Ceres Seq. ID no. 12331289
ccaaatttctccatggatcgttctttgaatctcctcgatttagccttagggttcgatgagcagctagctattccatcgccactaaatggaaaagtaatactaatagaagactgtgtagagacgagtggttcctttgtacttcaccagctaatgaaacgtgttctctcctctaactcctccgacgcacttatctttctcgcttttgctcgccctttctctcattatgatcgaatcttgcgtaaactgggatgtaatttagctacccataagtcgaataatcgattggtgttctttgacatgctcatggttaagtgttcagatggggatcaaatggaagacaatgtgagtgcagttgcgaaactatttcgggagatacaagaaaccgttcgaaagctacagagtgtaacaagtggtaacataactgttatggtggatgacatgtctctgctggaaattgctactaccggcagcaactcagatcacgtattggacttcttgcattattgccacacattaagttctgaaagcaattgttcattggtcatcctcaatcatgaagatatatacgcgagcatggagagacctgcatttttgctacagatggtatgccttgcagatgttgtgataaaggcagagcctttagcctctggtttagcaaatgatgtacatggccaattgactgttctgaacaaagggataagcaactcaggtagaggaagctcgaggaacaagttgcagaattttcaattcaggatcaaggaaaatggtatcgactatttctatcctggttgcagaagctgaggattagacaccgttctgagcattagcatggtagtgagatgcatctagacagttttgttatttgcgtttaggttaaacagagacactctgttcaacatttttactttagtgtctcttctggttgtaacttgatgacttagctaaagttgaatgcttgagacacagaaacttgtagacatggaaaattagtaacattctatatcttt

SEQ ID NO: 2713 - protein, 266 aa, Arabidopsis thaliana
  peptide (1)..(266): Ceres Seq. ID no. 12331290
  misc_feature (5)..(266): NCBI GI NO: 18413296 NR Description: expressed protein; protein id: At4g10090
  misc_feature (75)..(227): NCBI GI NO: 7486308 NR Description: hypothetical protein F28M11
  misc_feature (5)..(106): NCBI GI NO: 7486308 NR Description: hypothetical protein F28M11
  misc_feature (31)..(265): NCBI GI NO: 24796809 NR Description: unknown protein
PNFSMDRSLNLLDLALGFDEQLAIPSPLNGKVILIEDCVETSGSFVLHQLMKRVLSSNSSDALIFLAFARPFSHYDRILRKLGCNLATHKSNNRLVFFDMLMVKCSDGDQMEDNVSAVAKLFREIQETVRKLQSVTSGNITVMVDDMSLLEIATTGSNSDHVLDFLHYCHTLSSESNCSLVILNHEDIYASMERPAFLLQMVCLADVVIKAEPLASGLANDVHGQLTVLNKGISNSGRGSSRNKLQNFQFRIKENGIDYFYPGCRS

SEQ ID NO: 2714 - protein, 262 aa, Arabidopsis thaliana
  peptide (1)..(262): Ceres Seq. ID no. 12331291
  misc_feature (1)..(262): NCBI GI NO: 18413296 NR Description: expressed protein; protein id: At4g10090
  misc_feature (71)..(223): NCBI GI NO: 7486308 NR Description: hypothetical protein F28M11
  misc_feature (1)..(102): NCBI GI NO: 7486308 NR Description: hypothetical protein F28M11
  misc_feature (27)..(261): NCBI GI NO: 24796809 NR Description: unknown protein
MDRSLNLLDLALGFDEQLAIPSPLNGKVILIEDCVETSGSFVLHQLMKRVLSSNSSDALIFLAFARPFSHYDRILRKLGCNLATHKSNNRLVFFDMLMVKCSDGDQMEDNVSAVAKLFREIQETVRKLQSVTSGNITVMVDDMSLLEIATTGSNSDHVLDFLHYCHTLSSESNCSLVILNHEDIYASMERPAFLLQMVCLADVVIKAEPLASGLANDVHGQLTVLNKGISNSGRGSSRNKLQNFQFRIKENGIDYFYPGCRS

SEQ ID NO: 2715 - protein, 216 aa, Arabidopsis thaliana
  peptide (1)..(216): Ceres Seq. ID no. 12331292
  misc_feature (1)..(216): NCBI GI NO: 18413296 NR Description: expressed protein; protein id: At4g10090
  misc_feature (25)..(177): NCBI GI NO: 7486308 NR Description: hypothetical protein F28M11
  misc_feature (1)..(56): NCBI GI NO: 7486308 NR Description: hypothetical protein F28M11
  misc_feature (1)..(215): NCBI GI NO: 24796809 NR Description: unknown protein
MKRVLSSNSSDALIFLAFARPFSHYDRILRKLGCNLATHKSNNRLVFFDMLMVKCSDGDQMEDNVSAVAKLFREIQETVRKLQSVTSGNITVMVDDMSLLEIATTGSNSDHVLDFLHYCHTLSSESNCSLVILNHEDIYASMERPAFLLQMVCLADVVIKAEPLASGLANDVHGQLTVLNKGISNSGRGSSRNKLQNFQFRIKENGIDYFYPGCRS

SEQ ID NO: 2716 - DNA, 1347 bp, Arabidopsis thaliana
  misc_feature (1)..(1347): Ceres Seq. ID no. 13486853
agcatctcgagatcgtcttcctctcacaatctcaaattcttcggaccttttctctctcccctgaagctcccctcactcactcttctccgaggaagaacaacagagacaatggcggttcccaaagccattattctacctatcttgctactcatctgtggtgctgctctcggagctcctgcttctgaaggttatcttcgtaatggaaacttcgaagagtcaccaaagaaaaccgacatgaagaaaacagttctactaggcaaaaacgccttgcccgaatgggaaaccaccggtttcgtcgagtacatcgccggcggtcctcagccaggaggcatgtacttcccagtggctcatggagtccacgccgtgaggctcggaaacgaagctacaatctctcagaagttagaagtgaagccaggttctctctacgcactcacgtttggtgcgtcgagaacttgtgcacaagacgaagttcttagagtctctgtaccttctcagtccggtgacttgccacttcaaacactttacaacagtttcggaggtgacgtgtacgcttgggccttcgtcgccaagacttctcaagttactgtgactttccacaatcctggagttcaagaagatcctgcttgtggtcctttgttggacgctgtcgccattaaagagcttgttcatccaatctacaccagagggaacttggtgaagaatggagggttcgaagaaggtcctcaccgtctagtgaactccacacaaggagtcctactcccacctaaacaagaagatctcacatcacctttacctggttggatcatagagtcactcaaggcagtgaaattcatagactctaagtactttaatgtcccctttggacatgctgcgatcgagctagttgcaggcaaagaaagtgccattgcacaagtcattagaacctctcctggtcaaacttacaccctctccttcgtcgttggagatgctaagaatgactgccatggttccatgatggttgaagcttttgcagccagagatacactcaaagtaccacacacttccgttggtggaggtcatgtcaagaccgcgagtttcaagttcaaggcggttgaggcaagaactagaattactttcttcagtggtttttaccataccaagaagactgatactgtatctttatgtggtcctgtcattgacgagattgtggtttctcatgtcgcttagattaagtttactctttatgacaactgcacttgtgttcttagactggtcatggacttggtgccttgctttgtatgtcttggctccttttggaattgagttattgtcatcaagttaaaatgaatgatatattattgtaatatg

SEQ ID NO: 2717 - protein, 401 aa, Arabidopsis thaliana
  peptide (1)..(401): Ceres Seq. ID no. 13486854
  misc_feature (79)..(401): Pfam Name: Pfam Description:  Protein of unknown function, DUF642
  misc_feature (37)..(401): NCBI GI NO: 18398135 NR Description: expressed protein [Arabidopsis thaliana]
  misc_feature (79)..(401): NCBI GI NO: 12321555 NR Description: unknown protein, 5' partial [Arabidopsis thaliana]
  misc_feature (37)..(398): NCBI GI NO: 15227437 NR Description: expressed protein [Arabidopsis thaliana]
  misc_feature (36)..(397): NCBI GI NO: 30102997 NR Description: unknown protein
  misc_feature (59)..(397): NCBI GI NO: 15227439 NR Description: expressed protein [Arabidopsis thaliana]
  misc_feature (43)..(395): NCBI GI NO: 7488898 NR Description: hypothetical protein - castor bean
  misc_feature (44)..(395): NCBI GI NO: 15239438 NR Description: expressed protein [Arabidopsis thaliana]
  misc_feature (44)..(395): NCBI GI NO: 15809822 NR Description: AT5g25460/F18G18_200 [Arabidopsis thaliana]
  misc_feature (44)..(395): NCBI GI NO: 21537379 NR Description: unknown [Arabidopsis thaliana]
  misc_feature (61)..(395): NCBI GI NO: 15239049 NR Description: expressed protein [Arabidopsis thaliana]
SISRSSSSHNLKFFGPFLSPLKLPSLTLLRGRTTETMAVPKAIILPILLLICGAALGAPASEGYLRNGNFEESPKKTDMKKTVLLGKNALPEWETTGFVEYIAGGPQPGGMYFPVAHGVHAVRLGNEATISQKLEVKPGSLYALTFGASRTCAQDEVLRVSVPSQSGDLPLQTLYNSFGGDVYAWAFVAKTSQVTVTFHNPGVQEDPACGPLLDAVAIKELVHPIYTRGNLVKNGGFEEGPHRLVNSTQGVLLPPKQEDLTSPLPGWIIESLKAVKFIDSKYFNVPFGHAAIELVAGKESAIAQVIRTSPGQTYTLSFVVGDAKNDCHGSMMVEAFAARDTLKVPHTSVGGGHVKTASFKFKAVEARTRITFFSGFYHTKKTDTVSLCGPVIDEIVVSHVA

SEQ ID NO: 2718 - protein, 365 aa, Arabidopsis thaliana
  peptide (1)..(365): Ceres Seq. ID no. 13486855
  misc_feature (43)..(365): Pfam Name: Pfam Description:  Protein of unknown function, DUF642
  misc_feature (1)..(365): NCBI GI NO: 18398135 NR Description: expressed protein [Arabidopsis thaliana]
  misc_feature (43)..(365): NCBI GI NO: 12321555 NR Description: unknown protein, 5' partial [Arabidopsis thaliana]
  misc_feature (1)..(362): NCBI GI NO: 15227437 NR Description: expressed protein [Arabidopsis thaliana]
  misc_feature (1)..(361): NCBI GI NO: 30102997 NR Description: unknown protein
  misc_feature (23)..(361): NCBI GI NO: 15227439 NR Description: expressed protein [Arabidopsis thaliana]
  misc_feature (7)..(359): NCBI GI NO: 7488898 NR Description: hypothetical protein - castor bean
  misc_feature (8)..(359): NCBI GI NO: 15239438 NR Description: expressed protein [Arabidopsis thaliana]
  misc_feature (8)..(359): NCBI GI NO: 15809822 NR Description: AT5g25460/F18G18_200 [Arabidopsis thaliana]
  misc_feature (8)..(359): NCBI GI NO: 21537379 NR Description: unknown [Arabidopsis thaliana]
  misc_feature (25)..(359): NCBI GI NO: 15239049 NR Description: expressed protein [Arabidopsis thaliana]
MAVPKAIILPILLLICGAALGAPASEGYLRNGNFEESPKKTDMKKTVLLGKNALPEWETTGFVEYIAGGPQPGGMYFPVAHGVHAVRLGNEATISQKLEVKPGSLYALTFGASRTCAQDEVLRVSVPSQSGDLPLQTLYNSFGGDVYAWAFVAKTSQVTVTFHNPGVQEDPACGPLLDAVAIKELVHPIYTRGNLVKNGGFEEGPHRLVNSTQGVLLPPKQEDLTSPLPGWIIESLKAVKFIDSKYFNVPFGHAAIELVAGKESAIAQVIRTSPGQTYTLSFVVGDAKNDCHGSMMVEAFAARDTLKVPHTSVGGGHVKTASFKFKAVEARTRITFFSGFYHTKKTDTVSLCGPVIDEIVVSHVA

SEQ ID NO: 2719 - protein, 323 aa, Arabidopsis thaliana
  peptide (1)..(323): Ceres Seq. ID no. 13486856
  misc_feature (1)..(323): Pfam Name: Pfam Description:  Protein of unknown function, DUF642
  misc_feature (1)..(323): NCBI GI NO: 18398135 NR Description: expressed protein [Arabidopsis thaliana]
  misc_feature (1)..(323): NCBI GI NO: 12321555 NR Description: unknown protein, 5' partial [Arabidopsis thaliana]
  misc_feature (1)..(320): NCBI GI NO: 15227437 NR Description: expressed protein [Arabidopsis thaliana]
  misc_feature (1)..(319): NCBI GI NO: 30102997 NR Description: unknown protein
  misc_feature (1)..(319): NCBI GI NO: 15227439 NR Description: expressed protein [Arabidopsis thaliana]
  misc_feature (1)..(317): NCBI GI NO: 7488898 NR Description: hypothetical protein - castor bean
  misc_feature (1)..(317): NCBI GI NO: 15239438 NR Description: expressed protein [Arabidopsis thaliana]
  misc_feature (1)..(317): NCBI GI NO: 15809822 NR Description: AT5g25460/F18G18_200 [Arabidopsis thaliana]
  misc_feature (1)..(317): NCBI GI NO: 21537379 NR Description: unknown [Arabidopsis thaliana]
  misc_feature (1)..(317): NCBI GI NO: 15239049 NR Description: expressed protein [Arabidopsis thaliana]
MKKTVLLGKNALPEWETTGFVEYIAGGPQPGGMYFPVAHGVHAVRLGNEATISQKLEVKPGSLYALTFGASRTCAQDEVLRVSVPSQSGDLPLQTLYNSFGGDVYAWAFVAKTSQVTVTFHNPGVQEDPACGPLLDAVAIKELVHPIYTRGNLVKNGGFEEGPHRLVNSTQGVLLPPKQEDLTSPLPGWIIESLKAVKFIDSKYFNVPFGHAAIELVAGKESAIAQVIRTSPGQTYTLSFVVGDAKNDCHGSMMVEAFAARDTLKVPHTSVGGGHVKTASFKFKAVEARTRITFFSGFYHTKKTDTVSLCGPVIDEIVVSHVA

SEQ ID NO: 2720 - DNA, 1411 bp, Arabidopsis thaliana
  misc_feature (1)..(1411): Ceres Seq. ID no. 13491583
agctctctctctctctctcgttaacgcttcggcgaaaaatccacgagtcagcttttactgatttgtacaaaaaatggatggatcaaagcatccatcagtctttcagaagctacatggacaatcttacttgatcaatagactttctccgagtgtgcaagctcgtggttactgtgtctctggtgcttatgtcaatggaggtttgcagagtctattgcagccaactagccatggcgttggctcgtctcttatacctcatggttcatttcctgtattagctcacgctcctagtgagaaaactggtactggtttcttgatcgatttccttatgggaggagtctcagctgctgtttcgaagacggcagccgcgcctatagagcgtgtgaagctcttgattcagaatcaagatgaaatgatcaaagctgggcgtctctctgagccatataaaggaatcagtgattgttttgctcgaacggtcaaagacgaaggaatgcttgctctttggagaggaaacactgccaatgttatcagatacttccccactcaggctttaaactttgcgttcaaagactacttcaagaggctgtttaacttcaagaaagaaaaagatggctactggaagtggtttgcagggaacctggcgtctggtggtgcagctggtgcatcatctctgctttttgtgtactctttggattacgctcgtacccgtttagccaatgatgcgaaggcggccaagaaaggtggtcagcggcagtttaatggcatggtcgacgtgtacaagaagactatagcctctgatggcattgtcgggctttaccgtggtttcaacatctcatgcgttggaattgtcgtgtaccgggggctttactttggattgtatgattccttgaagcctgtggttctagttgatggtctccaggatagcttccttgctagtttcttactgggatggggaatcaccattggagctggattggcgtcttacccaattgacacggttcgcagaagaatgatgatgacgtcaggtgaagcagtgaagtacaagagctctcttcaggccttctctcagatcgtcaagaacgaaggggccaagtcactcttcaagggtgcaggtgccaacatccttcgtgcggttgcaggcgctggtgtactggccggctatgacaagctccagctcattgtgttgggtaagaagtatggctctggtggtggctaaacgatgaggatgatgaaagaatagcccttgaggtctgtgaatgaataaagcagtgtgtccgttcgtataaatgttgcttttagaatatagagtgtctctgtcaagttgtggccctttgtcttagttctatacttctatgacttttgttgacaaaagaataaatacaaagaaaaccaataccatgtttatgttttttgt

SEQ ID NO: 2721 - protein, 379 aa, Arabidopsis thaliana
  peptide (1)..(379): Ceres Seq. ID no. 13491584
  misc_feature (1)..(379): NCBI GI NO: 15235280 NR Description: mitochondrial ADP,ATP carrier protein, putative
  misc_feature (1)..(379): NCBI GI NO: 21593729 NR Description: ADP,ATP carrier-like protein
  misc_feature (4)..(378): NCBI GI NO: 399015 NR Description: ADP,ATP carrier protein, mitochondrial precursor
  misc_feature (2)..(378): NCBI GI NO: 100424 NR Description: ADP,ATP carrier protein precursor - potato
  misc_feature (2)..(378): NCBI GI NO: 113456 NR Description: ADP
  misc_feature (2)..(378): NCBI GI NO: 113460 NR Description: ADP
  misc_feature (4)..(378): NCBI GI NO: 485517 NR Description: ADP,ATP carrier protein - rice
  misc_feature (1)..(378): NCBI GI NO: 3334115 NR Description: ADP
  misc_feature (2)..(378): NCBI GI NO: 113457 NR Description: ADP,ATP carrier protein, mitochondrial precursor
  misc_feature (2)..(378): NCBI GI NO: 22166 NR Description: adenine nucleotide translocator [Zea mays]
MDGSKHPSVFQKLHGQSYLINRLSPSVQARGYCVSGAYVNGGLQSLLQPTSHGVGSSLIPHGSFPVLAHAPSEKTGTGFLIDFLMGGVSAAVSKTAAAPIERVKLLIQNQDEMIKAGRLSEPYKGISDCFARTVKDEGMLALWRGNTANVIRYFPTQALNFAFKDYFKRLFNFKKEKDGYWKWFAGNLASGGAAGASSLLFVYSLDYARTRLANDAKAAKKGGQRQFNGMVDVYKKTIASDGIVGLYRGFNISCVGIVVYRGLYFGLYDSLKPVVLVDGLQDSFLASFLLGWGITIGAGLASYPIDTVRRRMMMTSGEAVKYKSSLQAFSQIVKNEGAKSLFKGAGANILRAVAGAGVLAGYDKLQLIVLGKKYGSGGG

SEQ ID NO: 2722 - protein, 295 aa, Arabidopsis thaliana
  peptide (1)..(295): Ceres Seq. ID no. 13491585
  misc_feature (1)..(295): NCBI GI NO: 15235280 NR Description: mitochondrial ADP,ATP carrier protein, putative
  misc_feature (1)..(295): NCBI GI NO: 21593729 NR Description: ADP,ATP carrier-like protein
  misc_feature (1)..(294): NCBI GI NO: 399015 NR Description: ADP,ATP carrier protein, mitochondrial precursor
  misc_feature (1)..(294): NCBI GI NO: 100424 NR Description: ADP,ATP carrier protein precursor - potato
  misc_feature (1)..(294): NCBI GI NO: 113456 NR Description: ADP
  misc_feature (1)..(294): NCBI GI NO: 113460 NR Description: ADP
  misc_feature (1)..(294): NCBI GI NO: 485517 NR Description: ADP,ATP carrier protein - rice
  misc_feature (1)..(294): NCBI GI NO: 3334115 NR Description: ADP
  misc_feature (1)..(294): NCBI GI NO: 113457 NR Description: ADP,ATP carrier protein, mitochondrial precursor
  misc_feature (1)..(294): NCBI GI NO: 22166 NR Description: adenine nucleotide translocator [Zea mays]
MGGVSAAVSKTAAAPIERVKLLIQNQDEMIKAGRLSEPYKGISDCFARTVKDEGMLALWRGNTANVIRYFPTQALNFAFKDYFKRLFNFKKEKDGYWKWFAGNLASGGAAGASSLLFVYSLDYARTRLANDAKAAKKGGQRQFNGMVDVYKKTIASDGIVGLYRGFNISCVGIVVYRGLYFGLYDSLKPVVLVDGLQDSFLASFLLGWGITIGAGLASYPIDTVRRRMMMTSGEAVKYKSSLQAFSQIVKNEGAKSLFKGAGANILRAVAGAGVLAGYDKLQLIVLGKKYGSGGG

SEQ ID NO: 2723 - protein, 267 aa, Arabidopsis thaliana
  peptide (1)..(267): Ceres Seq. ID no. 13491586
  misc_feature (1)..(267): NCBI GI NO: 15235280 NR Description: mitochondrial ADP,ATP carrier protein, putative
  misc_feature (1)..(267): NCBI GI NO: 21593729 NR Description: ADP,ATP carrier-like protein
  misc_feature (1)..(266): NCBI GI NO: 399015 NR Description: ADP,ATP carrier protein, mitochondrial precursor
  misc_feature (1)..(266): NCBI GI NO: 100424 NR Description: ADP,ATP carrier protein precursor - potato
  misc_feature (1)..(266): NCBI GI NO: 113456 NR Description: ADP
  misc_feature (1)..(266): NCBI GI NO: 113460 NR Description: ADP
  misc_feature (1)..(266): NCBI GI NO: 485517 NR Description: ADP,ATP carrier protein - rice
  misc_feature (1)..(266): NCBI GI NO: 3334115 NR Description: ADP
  misc_feature (1)..(266): NCBI GI NO: 113457 NR Description: ADP,ATP carrier protein, mitochondrial precursor
  misc_feature (1)..(266): NCBI GI NO: 22166 NR Description: adenine nucleotide translocator [Zea mays]
MIKAGRLSEPYKGISDCFARTVKDEGMLALWRGNTANVIRYFPTQALNFAFKDYFKRLFNFKKEKDGYWKWFAGNLASGGAAGASSLLFVYSLDYARTRLANDAKAAKKGGQRQFNGMVDVYKKTIASDGIVGLYRGFNISCVGIVVYRGLYFGLYDSLKPVVLVDGLQDSFLASFLLGWGITIGAGLASYPIDTVRRRMMMTSGEAVKYKSSLQAFSQIVKNEGAKSLFKGAGANILRAVAGAGVLAGYDKLQLIVLGKKYGSGGG

SEQ ID NO: 2724 - DNA, 1356 bp, Arabidopsis thaliana
  misc_feature (1)..(1356): Ceres Seq. ID no. 13488086
gaaaagctctagcacaaaccaaacaccaaatctcatttcttcttcttcttctttttccacattttctgattagcagatcaaatgatgcttgttcgatctgtatttcgatctcagttgcgaccctctgtctcgggtggtctgcaatctgcttcttgctattcttcattatctgctgcttcagctgaagctgagaggactatcagagaaggtcccagaaacgattggagtagagatgaaatcaagtctgtttatgattctcctcttcttgacctcctcttccatggagctcaggttcatagacatgttcataacttcagggaggtacaacaatgtaccctcctctccataaagactggtggctgtagtgaagactgttcatattgtcctcagtcttcgagatatagcactggagttaaggcacaaagactcatgtctaaggacgctgtcattgatgctgctaagaaggcaaaagaagctgggagcacacgtttttgcatgggtgctgcttggcgagatacaattggacggaaaaccaacttcagccagattcttgaatacatcaaagaaataagaggcatggggatggaagtttgctgcaccttaggcatgattgagaaacaacaagcactagagctaaagaaggctggcctcactgcttataaccacaatcttgatacttcaagagagtactacccaaacgtcatcactactagaagttatgacgatcgccttgaaactcttagccatgttcgtgatgctggaatcaacgtttgttcaggaggaatcatagggcttggtgaggcagaggaagacagaataggtttattacacacgctggcaacacttccttctcaccctgagagtgttcccattaatgctctacttgcagtgaaaggcactcctcttgaagaccagaagccagttgagatatgggagatgatcaggatgattggaaccgcacgtattgtaatgccaaaagcgatggtgagactgtctgctggtagagtccggttctcaatgtccgaacaagctctctgtttccttgctggtgcaaactctatcttcaccggagagaagcttttaaccacaccaaacaatgattttgacgctgaccagctcatgttcaagacattaggcctcattcctaaaccgccaagtttctctgaagatgattctgaatcagaaaactgcgagaaagttgcttccgcttctcactaatatcattatccacttttttttttgtttggagtcgggacactatagagcagtcccttttactatgtagcatggtttgacgattttgtgatatcatttttcgttaatcgttattcgaagatgtctagatttctcatctga

SEQ ID NO: 2725 - protein, 378 aa, Arabidopsis thaliana
  peptide (1)..(378): Ceres Seq. ID no. 13488087
  misc_feature (88)..(252): Pfam Name: Pfam Description:  Radical SAM superfamily
  misc_feature (1)..(378): NCBI GI NO: 15224273 NR Description: biotin synthase (BioB) (BIO2)
  misc_feature (1)..(378): NCBI GI NO: 28392925 NR Description: putative biotin synthase (Bio B)
  misc_feature (1)..(375): NCBI GI NO: 38175566 NR Description: putative biotin synthase
  misc_feature (45)..(376): NCBI GI NO: 23135112 NR Description: hypothetical protein [Cytophaga hutchinsonii]
  misc_feature (18)..(378): NCBI GI NO: 40738982 NR Description: hypothetical protein AN6643.2
  misc_feature (45)..(353): NCBI GI NO: 19075228 NR Description: biotin synthase (EC 2.8.1.6)
  misc_feature (28)..(358): NCBI GI NO: 32405370 NR Description: hypothetical protein [Neurospora crassa]
  misc_feature (45)..(353): NCBI GI NO: 2961328 NR Description: Biotin synthase [Schizosaccharomyces pombe]
  misc_feature (45)..(359): NCBI GI NO: 17229413 NR Description: biotin synthase [Nostoc sp. PCC 7120]
  misc_feature (43)..(359): NCBI GI NO: 23127772 NR Description: hypothetical protein [Nostoc punctiforme]
MMLVRSVFRSQLRPSVSGGLQSASCYSSLSAASAEAERTIREGPRNDWSRDEIKSVYDSPLLDLLFHGAQVHRHVHNFREVQQCTLLSIKTGGCSEDCSYCPQSSRYSTGVKAQRLMSKDAVIDAAKKAKEAGSTRFCMGAAWRDTIGRKTNFSQILEYIKEIRGMGMEVCCTLGMIEKQQALELKKAGLTAYNHNLDTSREYYPNVITTRSYDDRLETLSHVRDAGINVCSGGIIGLGEAEEDRIGLLHTLATLPSHPESVPINALLAVKGTPLEDQKPVEIWEMIRMIGTARIVMPKAMVRLSAGRVRFSMSEQALCFLAGANSIFTGEKLLTTPNNDFDADQLMFKTLGLIPKPPSFSEDDSESENCEKVASASH

SEQ ID NO: 2726 - protein, 377 aa, Arabidopsis thaliana
  peptide (1)..(377): Ceres Seq. ID no. 13488088
  misc_feature (87)..(251): Pfam Name: Pfam Description:  Radical SAM superfamily
  misc_feature (1)..(377): NCBI GI NO: 15224273 NR Description: biotin synthase (BioB) (BIO2)
  misc_feature (1)..(377): NCBI GI NO: 28392925 NR Description: putative biotin synthase (Bio B)
  misc_feature (1)..(374): NCBI GI NO: 38175566 NR Description: putative biotin synthase
  misc_feature (44)..(375): NCBI GI NO: 23135112 NR Description: hypothetical protein [Cytophaga hutchinsonii]
  misc_feature (17)..(377): NCBI GI NO: 40738982 NR Description: hypothetical protein AN6643.2
  misc_feature (44)..(352): NCBI GI NO: 19075228 NR Description: biotin synthase (EC 2.8.1.6)
  misc_feature (27)..(357): NCBI GI NO: 32405370 NR Description: hypothetical protein [Neurospora crassa]
  misc_feature (44)..(352): NCBI GI NO: 2961328 NR Description: Biotin synthase [Schizosaccharomyces pombe]
  misc_feature (44)..(358): NCBI GI NO: 17229413 NR Description: biotin synthase [Nostoc sp. PCC 7120]
  misc_feature (42)..(358): NCBI GI NO: 23127772 NR Description: hypothetical protein [Nostoc punctiforme]
MLVRSVFRSQLRPSVSGGLQSASCYSSLSAASAEAERTIREGPRNDWSRDEIKSVYDSPLLDLLFHGAQVHRHVHNFREVQQCTLLSIKTGGCSEDCSYCPQSSRYSTGVKAQRLMSKDAVIDAAKKAKEAGSTRFCMGAAWRDTIGRKTNFSQILEYIKEIRGMGMEVCCTLGMIEKQQALELKKAGLTAYNHNLDTSREYYPNVITTRSYDDRLETLSHVRDAGINVCSGGIIGLGEAEEDRIGLLHTLATLPSHPESVPINALLAVKGTPLEDQKPVEIWEMIRMIGTARIVMPKAMVRLSAGRVRFSMSEQALCFLAGANSIFTGEKLLTTPNNDFDADQLMFKTLGLIPKPPSFSEDDSESENCEKVASASH

SEQ ID NO: 2727 - protein, 262 aa, Arabidopsis thaliana
  peptide (1)..(262): Ceres Seq. ID no. 13488089
  misc_feature (1)..(136): Pfam Name: Pfam Description:  Radical SAM superfamily
  misc_feature (1)..(262): NCBI GI NO: 15224273 NR Description: biotin synthase (BioB) (BIO2)
  misc_feature (1)..(262): NCBI GI NO: 28392925 NR Description: putative biotin synthase (Bio B)
  misc_feature (1)..(259): NCBI GI NO: 38175566 NR Description: putative biotin synthase
  misc_feature (1)..(260): NCBI GI NO: 23135112 NR Description: hypothetical protein [Cytophaga hutchinsonii]
  misc_feature (1)..(262): NCBI GI NO: 40738982 NR Description: hypothetical protein AN6643.2
  misc_feature (1)..(237): NCBI GI NO: 19075228 NR Description: biotin synthase (EC 2.8.1.6)
  misc_feature (1)..(242): NCBI GI NO: 32405370 NR Description: hypothetical protein [Neurospora crassa]
  misc_feature (1)..(237): NCBI GI NO: 2961328 NR Description: Biotin synthase [Schizosaccharomyces pombe]
  misc_feature (1)..(243): NCBI GI NO: 17229413 NR Description: biotin synthase [Nostoc sp. PCC 7120]
  misc_feature (1)..(243): NCBI GI NO: 23127772 NR Description: hypothetical protein [Nostoc punctiforme]
MSKDAVIDAAKKAKEAGSTRFCMGAAWRDTIGRKTNFSQILEYIKEIRGMGMEVCCTLGMIEKQQALELKKAGLTAYNHNLDTSREYYPNVITTRSYDDRLETLSHVRDAGINVCSGGIIGLGEAEEDRIGLLHTLATLPSHPESVPINALLAVKGTPLEDQKPVEIWEMIRMIGTARIVMPKAMVRLSAGRVRFSMSEQALCFLAGANSIFTGEKLLTTPNNDFDADQLMFKTLGLIPKPPSFSEDDSESENCEKVASASH

SEQ ID NO: 2728 - DNA, 1615 bp, Arabidopsis thaliana
  misc_feature (1)..(1615): Ceres Seq. ID no. 12369892
aatctcaaaaagtctccgacactctctagatttcctttgctccttcgttctggccatggcaatggcaatggcaaaactcgcaattttcaccactcttatggccatactcgtaatgacatctcaaggaaggattccaacagaaggaggagagaaagaagcagaggctgacagaattacgtcacttccaggtcagcctaacgtcacgttcgagcagttttccggctacgtcaccgtcgataaactctccggaagatcactcttttattggctcactgaagcttctgacctccctctctccaaacctctcgtaatttggctcaacggaggaccgggatgttcgtcggtagcgtacggtgcgtcggaggagattggaccattcaggataagcaaaggtggttccggtttgtatctcaacaagttcgcatggaactcaatctccaatctcttgttcctcgaagctcccgccggcgtcggcttctcttacactaaccgctcctccgatctcttcaacaccggtgatcgccgtaccgccaaagattcacttcagtttcttattcaatggcttcaccggtttccgagatacaaccaccgggaaatctacatcaccggcgagagttacgccggacattacgttcctcagctggccaaagagatcatgaattacaacaaacgatcaaagaatccgttaaatctcaaaggaatcatggttggaaacgcggtgacggacaatcactatgataacctaggaacggtttcgtattggtggagccacgcgatgatctctgatcggacgtatcatcagttgataagcacttgcgattttagtcgtcagaaggaatctgatgaatgcgaaaccctttattcttacgctatggagcaggagtttggtaacattgatcagtacaacatctatgcgccgccgtgtaacaagtcaagcgacggtggtggtagctacaatggttcttccggccgccggagtatgcggcttcctcaccttccccactccgtattgaggaaaatttccggttatgatccatgtaccgagagatatgcagagatctattataaccggcctgatgttcagaaagctcttcacgccaacaccaccaagattccgtataaatggacagcttgcagtgaggtgctaaaccggaattggaacgacacagattcaacggttctccctatataccgggaaatgattgccggcggaattagagtttgggttttcagtggtgacgtcgattcagttgtaccagtgacagctactagatactcactagcaagacttagtttgagtaccaaacttccttggtatccttggtatgtcaagaaacaggttggaggatggacggaagtgtatgaaggactaacgttcgtgacggttagaggagcaggtcacgaggtgccattgttcaagccacgtgctgcttttgagctttttaagtatttcttgagaggcaagccacttccaaaggcttaaaaaaattgaagtcaagagagagattgtaacatttgaaatcatgcccgagaaaaatgaaaatgtaaagtttgggttatgagatggtatttaattaaatctagtctattaatgacagcaagtatttaattattt

SEQ ID NO: 2729 - protein, 493 aa, Arabidopsis thaliana
  peptide (1)..(493): Ceres Seq. ID no. 12369893
  misc_feature (62)..(487): Pfam Name: Pfam Description:  Serine carboxypeptidase
  misc_feature (21)..(493): NCBI GI NO: 15232847 NR Description: putative serine carboxypeptidase II
  misc_feature (23)..(493): NCBI GI NO: 21593731 NR Description: putative serine carboxypeptidase II
  misc_feature (28)..(493): NCBI GI NO: 13877871 NR Description: putative serine carboxypeptidase II
  misc_feature (28)..(493): NCBI GI NO: 15234795 NR Description: SERINE CARBOXYPEPTIDASE II-like protein
  misc_feature (32)..(493): NCBI GI NO: 15224082 NR Description: putative serine carboxypeptidase II
  misc_feature (58)..(493): NCBI GI NO: 15224083 NR Description: putative serine carboxypeptidase II
  misc_feature (21)..(492): NCBI GI NO: 34895992 NR Description: putative carboxypeptidase D
  misc_feature (32)..(491): NCBI GI NO: 15231911 NR Description: putative serine carboxypeptidase II
  misc_feature (35)..(491): NCBI GI NO: 34908012 NR Description: putative carboxypeptidase D
  misc_feature (52)..(491): NCBI GI NO: 15227493 NR Description: putative serine carboxypeptidase II
ISKSLRHSLDFLCSFVLAMAMAMAKLAIFTTLMAILVMTSQGRIPTEGGEKEAEADRITSLPGQPNVTFEQFSGYVTVDKLSGRSLFYWLTEASDLPLSKPLVIWLNGGPGCSSVAYGASEEIGPFRISKGGSGLYLNKFAWNSISNLLFLEAPAGVGFSYTNRSSDLFNTGDRRTAKDSLQFLIQWLHRFPRYNHREIYITGESYAGHYVPQLAKEIMNYNKRSKNPLNLKGIMVGNAVTDNHYDNLGTVSYWWSHAMISDRTYHQLISTCDFSRQKESDECETLYSYAMEQEFGNIDQYNIYAPPCNKSSDGGGSYNGSSGRRSMRLPHLPHSVLRKISGYDPCTERYAEIYYNRPDVQKALHANTTKIPYKWTACSEVLNRNWNDTDSTVLPIYREMIAGGIRVWVFSGDVDSVVPVTATRYSLARLSLSTKLPWYPWYVKKQVGGWTEVYEGLTFVTVRGAGHEVPLFKPRAAFELFKYFLRGKPLPKA

SEQ ID NO: 2730 - protein, 475 aa, Arabidopsis thaliana
  peptide (1)..(475): Ceres Seq. ID no. 12369894
  misc_feature (44)..(469): Pfam Name: Pfam Description:  Serine carboxypeptidase
  misc_feature (3)..(475): NCBI GI NO: 15232847 NR Description: putative serine carboxypeptidase II
  misc_feature (5)..(475): NCBI GI NO: 21593731 NR Description: putative serine carboxypeptidase II
  misc_feature (10)..(475): NCBI GI NO: 13877871 NR Description: putative serine carboxypeptidase II
  misc_feature (10)..(475): NCBI GI NO: 15234795 NR Description: SERINE CARBOXYPEPTIDASE II-like protein
  misc_feature (14)..(475): NCBI GI NO: 15224082 NR Description: putative serine carboxypeptidase II
  misc_feature (40)..(475): NCBI GI NO: 15224083 NR Description: putative serine carboxypeptidase II
  misc_feature (3)..(474): NCBI GI NO: 34895992 NR Description: putative carboxypeptidase D
  misc_feature (14)..(473): NCBI GI NO: 15231911 NR Description: putative serine carboxypeptidase II
  misc_feature (17)..(473): NCBI GI NO: 34908012 NR Description: putative carboxypeptidase D
  misc_feature (34)..(473): NCBI GI NO: 15227493 NR Description: putative serine carboxypeptidase II
MAMAMAKLAIFTTLMAILVMTSQGRIPTEGGEKEAEADRITSLPGQPNVTFEQFSGYVTVDKLSGRSLFYWLTEASDLPLSKPLVIWLNGGPGCSSVAYGASEEIGPFRISKGGSGLYLNKFAWNSISNLLFLEAPAGVGFSYTNRSSDLFNTGDRRTAKDSLQFLIQWLHRFPRYNHREIYITGESYAGHYVPQLAKEIMNYNKRSKNPLNLKGIMVGNAVTDNHYDNLGTVSYWWSHAMISDRTYHQLISTCDFSRQKESDECETLYSYAMEQEFGNIDQYNIYAPPCNKSSDGGGSYNGSSGRRSMRLPHLPHSVLRKISGYDPCTERYAEIYYNRPDVQKALHANTTKIPYKWTACSEVLNRNWNDTDSTVLPIYREMIAGGIRVWVFSGDVDSVVPVTATRYSLARLSLSTKLPWYPWYVKKQVGGWTEVYEGLTFVTVRGAGHEVPLFKPRAAFELFKYFLRGKPLPKA

SEQ ID NO: 2731 - protein, 473 aa, Arabidopsis thaliana
  peptide (1)..(473): Ceres Seq. ID no. 12369895
  misc_feature (42)..(467): Pfam Name: Pfam Description:  Serine carboxypeptidase
  misc_feature (1)..(473): NCBI GI NO: 15232847 NR Description: putative serine carboxypeptidase II
  misc_feature (3)..(473): NCBI GI NO: 21593731 NR Description: putative serine carboxypeptidase II
  misc_feature (8)..(473): NCBI GI NO: 13877871 NR Description: putative serine carboxypeptidase II
  misc_feature (8)..(473): NCBI GI NO: 15234795 NR Description: SERINE CARBOXYPEPTIDASE II-like protein
  misc_feature (12)..(473): NCBI GI NO: 15224082 NR Description: putative serine carboxypeptidase II
  misc_feature (38)..(473): NCBI GI NO: 15224083 NR Description: putative serine carboxypeptidase II
  misc_feature (1)..(472): NCBI GI NO: 34895992 NR Description: putative carboxypeptidase D
  misc_feature (12)..(471): NCBI GI NO: 15231911 NR Description: putative serine carboxypeptidase II
  misc_feature (15)..(471): NCBI GI NO: 34908012 NR Description: putative carboxypeptidase D
  misc_feature (32)..(471): NCBI GI NO: 15227493 NR Description: putative serine carboxypeptidase II
MAMAKLAIFTTLMAILVMTSQGRIPTEGGEKEAEADRITSLPGQPNVTFEQFSGYVTVDKLSGRSLFYWLTEASDLPLSKPLVIWLNGGPGCSSVAYGASEEIGPFRISKGGSGLYLNKFAWNSISNLLFLEAPAGVGFSYTNRSSDLFNTGDRRTAKDSLQFLIQWLHRFPRYNHREIYITGESYAGHYVPQLAKEIMNYNKRSKNPLNLKGIMVGNAVTDNHYDNLGTVSYWWSHAMISDRTYHQLISTCDFSRQKESDECETLYSYAMEQEFGNIDQYNIYAPPCNKSSDGGGSYNGSSGRRSMRLPHLPHSVLRKISGYDPCTERYAEIYYNRPDVQKALHANTTKIPYKWTACSEVLNRNWNDTDSTVLPIYREMIAGGIRVWVFSGDVDSVVPVTATRYSLARLSLSTKLPWYPWYVKKQVGGWTEVYEGLTFVTVRGAGHEVPLFKPRAAFELFKYFLRGKPLPKA

SEQ ID NO: 2732 - DNA, 681 bp, Arabidopsis thaliana
  misc_feature (1)..(681): Ceres Seq. ID no. 12367005
agaaaaaaagaaagcgaaatgggattattggccgcgatcggagttctgttgccatttccgttctactggtggctgtggacgaatcctcagtcatgggtcaatctctgcggccgagaaagagacccatcgacggtaatggcacgtgtttctcacgtgctcaaggctgctcaactcctttctctcttctccgttgcttctctctcctggccgtctccgctctacttctggcctctcatggcctttggccagtttctcaacttcagggtataccaattgttaggtgaagctgggacttattacggtgttcgattcgggaagaacataccatgggttacagagttcccatttggagtcattagagatccacagtatgttgggagtatcatgtctctattggcatgcctctcttgggttccatttcaatacattctcctctggtctctcggttatgttttcatgatgtttctcgagtcaaaggaggatccaaatgctcgtgccaaatccatctcatgattcctaagcataacccactagtcttagaagagctcaactcccatgaacgtcaggtcttgactgttttctttatgagtttgtattctcttttgtactcaaactgatgctacactttcatggataatgcagttaccttttctcgggttatcggtagtctacagaattgtc

SEQ ID NO: 2733 - protein, 170 aa, Arabidopsis thaliana
  peptide (1)..(170): Ceres Seq. ID no. 12367006
  misc_feature (7)..(170): NCBI GI NO: 21593732 NR Description: unknown [Arabidopsis thaliana]
  misc_feature (7)..(170): NCBI GI NO: 18412906 NR Description: expressed protein; protein id: At1g80860
  misc_feature (46)..(170): NCBI GI NO: 30699543 NR Description: expressed protein [Arabidopsis thaliana]
RKKESEMGLLAAIGVLLPFPFYWWLWTNPQSWVNLCGRERDPSTVMARVSHVLKAAQLLSLFSVASLSWPSPLYFWPLMAFGQFLNFRVYQLLGEAGTYYGVRFGKNIPWVTEFPFGVIRDPQYVGSIMSLLACLSWVPFQYILLWSLGYVFMMFLESKEDPNARAKSIS

SEQ ID NO: 2734 - protein, 164 aa, Arabidopsis thaliana
  peptide (1)..(164): Ceres Seq. ID no. 12367007
  misc_feature (1)..(164): NCBI GI NO: 21593732 NR Description: unknown [Arabidopsis thaliana]
  misc_feature (1)..(164): NCBI GI NO: 18412906 NR Description: expressed protein; protein id: At1g80860
  misc_feature (40)..(164): NCBI GI NO: 30699543 NR Description: expressed protein [Arabidopsis thaliana]
MGLLAAIGVLLPFPFYWWLWTNPQSWVNLCGRERDPSTVMARVSHVLKAAQLLSLFSVASLSWPSPLYFWPLMAFGQFLNFRVYQLLGEAGTYYGVRFGKNIPWVTEFPFGVIRDPQYVGSIMSLLACLSWVPFQYILLWSLGYVFMMFLESKEDPNARAKSIS

SEQ ID NO: 2735 - protein, 125 aa, Arabidopsis thaliana
  peptide (1)..(125): Ceres Seq. ID no. 12367008
  misc_feature (1)..(125): NCBI GI NO: 21593732 NR Description: unknown [Arabidopsis thaliana]
  misc_feature (1)..(125): NCBI GI NO: 18412906 NR Description: expressed protein; protein id: At1g80860
  misc_feature (1)..(125): NCBI GI NO: 30699543 NR Description: expressed protein [Arabidopsis thaliana]
MARVSHVLKAAQLLSLFSVASLSWPSPLYFWPLMAFGQFLNFRVYQLLGEAGTYYGVRFGKNIPWVTEFPFGVIRDPQYVGSIMSLLACLSWVPFQYILLWSLGYVFMMFLESKEDPNARAKSIS

SEQ ID NO: 2736 - DNA, 1598 bp, Arabidopsis thaliana
  misc_feature (1)..(1598): Ceres Seq. ID no. 12605969
atcgtcttcatcgttaacttcgcagactctgttgattagtcaacacagatcagaatctgaggctttggccgagacgagagaagcagaagaagaaaatggcggagactgtacattctccgatcgttacttacgcatcgatgttatcgcttctcgccttctgtccacctttcgtcattctcctatggtacacaatggttcatcaggatggttctgttactcagacctttggcttcttttgggagaatggagttcaaggacttatcaacatatggccaagacccactttgattgcttggaaaattatattttgctatggagcatttgaagctattcttcagctgcttctgcctggtaaaagagttgagggtccaatatctccagccggaaaccgaccagtttacaaggccaatggtctggctgcttactttgtgacactagcaacctatcttggtctttggtggtttggaatcttcaaccctgcaattgtctatgatcacttgggtgaaatattttcggcactaatattcggaagcttcatattttgtgttttgttgtacataaaaggccatgttgcaccttcatcaagtgactctggttcatgtggtaacctaataattgacttctattggggcatggagttgtaccctcgaattggtaagagctttgacatcaaggtgtttactaattgcagattcggaatgatgtcttgggcagttcttgcagtcacgtactgcataaaacagtatgaaataaatggcaaagtatctgattcaatgctggtgaacaccatcctgatgctggtgtatgtcacaaaattcttctggtgggaagctggttattggaacaccatggacattgcacatgaccgagctggattctatatatgctggggttgtctagtgtgggtgccttctgtctacacttctccaggcatgtaccttgtgaaccaccccgtcgaactcggaactcagttggcaatatacattctcgttgcaggaattctgtgcatttacataaactatgactgtgatagacaaaggcaagagttcaggaggacaaacgggaaatgtttggtttggggaagagccccgtcaaagattgtggcgtcgtatactacaacatctggtgaaactaaaactagtcttctcttaacgtctggatggtggggattggctcgtcatttccattatgttcctgagatcttaagtgctttcttctggaccgtaccggctctcttcgataacttcttggcatacttctacgtcatatttctcacccttcttctctttgatcgagccaagagagacgatgaccgatgccgatcaaagtatgggaaatattggaagctgtattgtgagaaagtcaaatacaggatcattccgggaatttattgattgtaacgaagtctgttgttctcattttctagttattacgttaattcgaacgttggaatcatcaaaagaccgtgccaaaacaaaaatgcaaattgatgcgatagacattcttttgctgatttgtatgctataggttttcaaatctctagctacgcttatgtatttccctagattatcaaagttagcctgccgttttctaatttt

SEQ ID NO: 2737 - protein, 432 aa, Arabidopsis thaliana
  peptide (1)..(432): Ceres Seq. ID no. 12605970
  misc_feature (3)..(432): Pfam Name: Pfam Description:  Ergosterol biosynthesis ERG4/ERG24 family
  misc_feature (1)..(432): NCBI GI NO: 15222967 NR Description: sterol delta7 reductase; protein id: At1g50430
  misc_feature (1)..(432): NCBI GI NO: 1245182 NR Description: sterol delta-7 reductase
  misc_feature (2)..(432): NCBI GI NO: 39726086 NR Description: sterol delta-7 reductase [Tropaeolum majus]
  misc_feature (16)..(429): NCBI GI NO: 29654463 NR Description: ergosterol biosynthesis ERG4/ERG24 family protein
  misc_feature (13)..(432): NCBI GI NO: 38969866 NR Description: 7-dehydrocholesterol reductase
  misc_feature (13)..(432): NCBI GI NO: 27924199 NR Description: Similar to 7-dehydrocholesterol reductase
  misc_feature (13)..(432): NCBI GI NO: 6681179 NR Description: 7-dehydrocholesterol reductase [Mus musculus]
  misc_feature (14)..(432): NCBI GI NO: 11693158 NR Description: 7-dehydrocholesterol reductase [Rattus norvegicus]
  misc_feature (13)..(432): NCBI GI NO: 3171089 NR Description: 7-dehydrocholesterol reductase [Homo sapiens]
  misc_feature (13)..(432): NCBI GI NO: 4503321 NR Description: 7-dehydrocholesterol reductase
MAETVHSPIVTYASMLSLLAFCPPFVILLWYTMVHQDGSVTQTFGFFWENGVQGLINIWPRPTLIAWKIIFCYGAFEAILQLLLPGKRVEGPISPAGNRPVYKANGLAAYFVTLATYLGLWWFGIFNPAIVYDHLGEIFSALIFGSFIFCVLLYIKGHVAPSSSDSGSCGNLIIDFYWGMELYPRIGKSFDIKVFTNCRFGMMSWAVLAVTYCIKQYEINGKVSDSMLVNTILMLVYVTKFFWWEAGYWNTMDIAHDRAGFYICWGCLVWVPSVYTSPGMYLVNHPVELGTQLAIYILVAGILCIYINYDCDRQRQEFRRTNGKCLVWGRAPSKIVASYTTTSGETKTSLLLTSGWWGLARHFHYVPEILSAFFWTVPALFDNFLAYFYVIFLTLLLFDRAKRDDDRCRSKYGKYWKLYCEKVKYRIIPGIY

SEQ ID NO: 2738 - protein, 418 aa, Arabidopsis thaliana
  peptide (1)..(418): Ceres Seq. ID no. 12605971
  misc_feature (1)..(418): Pfam Name: Pfam Description:  Ergosterol biosynthesis ERG4/ERG24 family
  misc_feature (1)..(418): NCBI GI NO: 15222967 NR Description: sterol delta7 reductase; protein id: At1g50430
  misc_feature (1)..(418): NCBI GI NO: 1245182 NR Description: sterol delta-7 reductase
  misc_feature (1)..(418): NCBI GI NO: 39726086 NR Description: sterol delta-7 reductase [Tropaeolum majus]
  misc_feature (2)..(415): NCBI GI NO: 29654463 NR Description: ergosterol biosynthesis ERG4/ERG24 family protein
  misc_feature (1)..(418): NCBI GI NO: 38969866 NR Description: 7-dehydrocholesterol reductase
  misc_feature (1)..(418): NCBI GI NO: 27924199 NR Description: Similar to 7-dehydrocholesterol reductase
  misc_feature (1)..(418): NCBI GI NO: 6681179 NR Description: 7-dehydrocholesterol reductase [Mus musculus]
  misc_feature (1)..(418): NCBI GI NO: 11693158 NR Description: 7-dehydrocholesterol reductase [Rattus norvegicus]
  misc_feature (1)..(418): NCBI GI NO: 3171089 NR Description: 7-dehydrocholesterol reductase [Homo sapiens]
  misc_feature (1)..(418): NCBI GI NO: 4503321 NR Description: 7-dehydrocholesterol reductase
MLSLLAFCPPFVILLWYTMVHQDGSVTQTFGFFWENGVQGLINIWPRPTLIAWKIIFCYGAFEAILQLLLPGKRVEGPISPAGNRPVYKANGLAAYFVTLATYLGLWWFGIFNPAIVYDHLGEIFSALIFGSFIFCVLLYIKGHVAPSSSDSGSCGNLIIDFYWGMELYPRIGKSFDIKVFTNCRFGMMSWAVLAVTYCIKQYEINGKVSDSMLVNTILMLVYVTKFFWWEAGYWNTMDIAHDRAGFYICWGCLVWVPSVYTSPGMYLVNHPVELGTQLAIYILVAGILCIYINYDCDRQRQEFRRTNGKCLVWGRAPSKIVASYTTTSGETKTSLLLTSGWWGLARHFHYVPEILSAFFWTVPALFDNFLAYFYVIFLTLLLFDRAKRDDDRCRSKYGKYWKLYCEKVKYRIIPGIY

SEQ ID NO: 2739 - protein, 400 aa, Arabidopsis thaliana
  peptide (1)..(400): Ceres Seq. ID no. 12605972
  misc_feature (1)..(400): Pfam Name: Pfam Description:  Ergosterol biosynthesis ERG4/ERG24 family
  misc_feature (1)..(400): NCBI GI NO: 15222967 NR Description: sterol delta7 reductase; protein id: At1g50430
  misc_feature (1)..(400): NCBI GI NO: 1245182 NR Description: sterol delta-7 reductase
  misc_feature (1)..(400): NCBI GI NO: 39726086 NR Description: sterol delta-7 reductase [Tropaeolum majus]
  misc_feature (1)..(397): NCBI GI NO: 29654463 NR Description: ergosterol biosynthesis ERG4/ERG24 family protein
  misc_feature (1)..(400): NCBI GI NO: 38969866 NR Description: 7-dehydrocholesterol reductase
  misc_feature (1)..(400): NCBI GI NO: 27924199 NR Description: Similar to 7-dehydrocholesterol reductase
  misc_feature (1)..(400): NCBI GI NO: 6681179 NR Description: 7-dehydrocholesterol reductase [Mus musculus]
  misc_feature (1)..(400): NCBI GI NO: 11693158 NR Description: 7-dehydrocholesterol reductase [Rattus norvegicus]
  misc_feature (1)..(400): NCBI GI NO: 3171089 NR Description: 7-dehydrocholesterol reductase [Homo sapiens]
  misc_feature (1)..(400): NCBI GI NO: 4503321 NR Description: 7-dehydrocholesterol reductase
MVHQDGSVTQTFGFFWENGVQGLINIWPRPTLIAWKIIFCYGAFEAILQLLLPGKRVEGPISPAGNRPVYKANGLAAYFVTLATYLGLWWFGIFNPAIVYDHLGEIFSALIFGSFIFCVLLYIKGHVAPSSSDSGSCGNLIIDFYWGMELYPRIGKSFDIKVFTNCRFGMMSWAVLAVTYCIKQYEINGKVSDSMLVNTILMLVYVTKFFWWEAGYWNTMDIAHDRAGFYICWGCLVWVPSVYTSPGMYLVNHPVELGTQLAIYILVAGILCIYINYDCDRQRQEFRRTNGKCLVWGRAPSKIVASYTTTSGETKTSLLLTSGWWGLARHFHYVPEILSAFFWTVPALFDNFLAYFYVIFLTLLLFDRAKRDDDRCRSKYGKYWKLYCEKVKYRIIPGIY

SEQ ID NO: 2740 - DNA, 866 bp, Arabidopsis thaliana
  misc_feature (1)..(866): Ceres Seq. ID no. 12393035
aaaaaccctctaaccactcaaaaaaatatctctgctctgctccaatggcgtcgttactcgattccgtcaccgtgacccgcgtgttttctctgccgattgcggcttcggtctcgtcttcttcagctgctccgtcggtttcacgacgccggatttctcccgccaggtttctggaattcagaggtttgaagtcttcgcggagtttggtgactcagtcggccagtctgggtgcgaatcgtagaaccagaatcgctcgcggtggacgaatcgcctgtgaggctcaggacaccactgccgccgccgtcgaagtaccaaatctgtctgattcagaatggcaaacaaaggttctggaatcagatgtcccagttctggtcgagttctgggcaccatggtgtggaccttgccgtatgattcaccccatagttgaccagctagccaaagatttcgcagggaagttcaaattctacaaaatcaacactgacgagagccctaatacagcaaaccgttacgggatacgaagcgttccaacagtaatcatcttcaaaggcggtgagaagaaagatagcatcattggagctgtgcctagagagacgttggagaaaactatagaaagattcttggtcgagtaacaaaatttgactcttttgtcactctgaaccattttaccttatcttctctcttgtaatctctgtaaagtcttttaagtttttgactattatgttatcgtgggtcctctttgtcttcttcaataaaaaaaatggaaacaaagtaatccaccgacgcatgagaagcataactccacgttgaaccacatgccattgttcttcctaattcaccgtacaatctatatacatacatatgttttgagt

SEQ ID NO: 2741 - protein, 207 aa, Arabidopsis thaliana
  peptide (1)..(207): Ceres Seq. ID no. 12393036
  misc_feature (15)..(207): NCBI GI NO: 15232567 NR Description: thioredoxin m4; protein id: At3g15360
  misc_feature (15)..(207): NCBI GI NO: 6539614 NR Description: thioredoxin m4 [Arabidopsis thaliana]
  misc_feature (28)..(205): NCBI GI NO: 15594012 NR Description: putative thioredoxin m2 [Pisum sativum]
  misc_feature (36)..(205): NCBI GI NO: 15236327 NR Description: putative M-type thioredoxin; protein id: At4g03520
  misc_feature (36)..(205): NCBI GI NO: 6539610 NR Description: thioredoxin m2 [Arabidopsis thaliana]
  misc_feature (36)..(205): NCBI GI NO: 21618235 NR Description: putative M-type thioredoxin [Arabidopsis thaliana]
  misc_feature (29)..(205): NCBI GI NO: 11135407 NR Description: Thioredoxin M-type, chloroplast precursor (TRX-M)
  misc_feature (38)..(205): NCBI GI NO: 30678634 NR Description: thioredoxin M-type 1, chloroplast precursor
  misc_feature (15)..(205): NCBI GI NO: 38346628 NR Description: OSJNBa0074L08.22
  misc_feature (30)..(205): NCBI GI NO: 21354 NR Description: thioredoxin M precursor (AA -67 to 114)
KPSNHSKKYLCSAPMASLLDSVTVTRVFSLPIAASVSSSSAAPSVSRRRISPARFLEFRGLKSSRSLVTQSASLGANRRTRIARGGRIACEAQDTTAAAVEVPNLSDSEWQTKVLESDVPVLVEFWAPWCGPCRMIHPIVDQLAKDFAGKFKFYKINTDESPNTANRYGIRSVPTVIIFKGGEKKDSIIGAVPRETLEKTIERFLVE

SEQ ID NO: 2742 - protein, 193 aa, Arabidopsis thaliana
  peptide (1)..(193): Ceres Seq. ID no. 12393037
  misc_feature (1)..(193): NCBI GI NO: 15232567 NR Description: thioredoxin m4; protein id: At3g15360
  misc_feature (1)..(193): NCBI GI NO: 6539614 NR Description: thioredoxin m4 [Arabidopsis thaliana]
  misc_feature (14)..(191): NCBI GI NO: 15594012 NR Description: putative thioredoxin m2 [Pisum sativum]
  misc_feature (22)..(191): NCBI GI NO: 15236327 NR Description: putative M-type thioredoxin; protein id: At4g03520
  misc_feature (22)..(191): NCBI GI NO: 6539610 NR Description: thioredoxin m2 [Arabidopsis thaliana]
  misc_feature (22)..(191): NCBI GI NO: 21618235 NR Description: putative M-type thioredoxin [Arabidopsis thaliana]
  misc_feature (15)..(191): NCBI GI NO: 11135407 NR Description: Thioredoxin M-type, chloroplast precursor (TRX-M)
  misc_feature (24)..(191): NCBI GI NO: 30678634 NR Description: thioredoxin M-type 1, chloroplast precursor
  misc_feature (1)..(191): NCBI GI NO: 38346628 NR Description: OSJNBa0074L08.22
  misc_feature (16)..(191): NCBI GI NO: 21354 NR Description: thioredoxin M precursor (AA -67 to 114)
MASLLDSVTVTRVFSLPIAASVSSSSAAPSVSRRRISPARFLEFRGLKSSRSLVTQSASLGANRRTRIARGGRIACEAQDTTAAAVEVPNLSDSEWQTKVLESDVPVLVEFWAPWCGPCRMIHPIVDQLAKDFAGKFKFYKINTDESPNTANRYGIRSVPTVIIFKGGEKKDSIIGAVPRETLEKTIERFLVE

SEQ ID NO: 2743 - DNA, 1214 bp, Arabidopsis thaliana
  misc_feature (1)..(1214): Ceres Seq. ID no. 12604914
aggctgcttttcttcgtgaatctcagaatcttaaaagactcttcaaatttgagaaaacgtttcactatctaaatccatttctctccctctctctatagccatttagaatgaagaaaagtctcactctactcatcctcctcctctgtactctcctcttctccaccgtcttgagcaacctactcgtcgaaccggtccaacccaacaccgtaccggctttcccggtcgaaacccaagctcaaagctgccggcttgacctctccaacgagctattcggtggcgtcaacgaagcttgcggaagaaaccttgaccggagtcgatgttgccctgttttagccgcttggctcttcgcagctcacgctcgctctgctctccagttaccagctcctgctccaacgccggaatcttctgatcccgacgaacccatgaagcctgacgactctcagaagtgcgtcaacacattgcaaagtgcgcttttgactaaacaaatcaagatccctcagcctaattctagctgtgacgcaatcttgtgcttctgtggtattcgtctccaccagattagctcactctcttgtcccgccgctttcaatgtctcctccggcttcaaaaacgcaactccgaccgccgccgtgaagaatcttgaaaaagaatgccggaactcttcttactccggttgtaccagatgcctcggtgctcttcaaaagctaaaggtaagaggaggaaacaagaagacaacaacagagagagggactaagatgatgagcaaagattgccagctcatgggactcacatggctactagctcgtaacaaaacggcatacattcccactgtttcggctgtgttaagagctattatgtatagtccacacccacctcacctcaacaagtgtagtcctgaccaagagaacatgcctttagcagttgactctctacagtttcaaaagagcttctcttcatcatctcatctttttggggttttaccgtttttacccttagtcctttgtatctttctctttctactgtgatttttttctgtattttttggtcgggaggggtaaagagagtcacgtgaagctacaagacagttgtgtgtatgtaaatgctgtgctctttttttggttctgcaaactcttaaccctcattttttggttttaactgtgttttgtcccatttaacactttgtacgaggtcttgaaattttaaaaaatcatcttggc

SEQ ID NO: 2744 - protein, 304 aa, Arabidopsis thaliana
  peptide (1)..(304): Ceres Seq. ID no. 12604915
  misc_feature (1)..(304): NCBI GI NO: 21593735 NR Description: unknown [Arabidopsis thaliana]
  misc_feature (1)..(304): NCBI GI NO: 18417127 NR Description: expressed protein; protein id: At4g28100
  misc_feature (10)..(304): NCBI GI NO: 34394002 NR Description: unknown protein
  misc_feature (81)..(283): NCBI GI NO: 18401752 NR Description: expressed protein; protein id: At3g18050
  misc_feature (4)..(220): NCBI GI NO: 18401752 NR Description: expressed protein; protein id: At3g18050
MKKSLTLLILLLCTLLFSTVLSNLLVEPVQPNTVPAFPVETQAQSCRLDLSNELFGGVNEACGRNLDRSRCCPVLAAWLFAAHARSALQLPAPAPTPESSDPDEPMKPDDSQKCVNTLQSALLTKQIKIPQPNSSCDAILCFCGIRLHQISSLSCPAAFNVSSGFKNATPTAAVKNLEKECRNSSYSGCTRCLGALQKLKVRGGNKKTTTERGTKMMSKDCQLMGLTWLLARNKTAYIPTVSAVLRAIMYSPHPPHLNKCSPDQENMPLAVDSLQFQKSFSSSSHLFGVLPFLPLVLCIFLFLL

SEQ ID NO: 2745 - protein, 199 aa, Arabidopsis thaliana
  peptide (1)..(199): Ceres Seq. ID no. 12604916
  misc_feature (1)..(199): NCBI GI NO: 21593735 NR Description: unknown [Arabidopsis thaliana]
  misc_feature (1)..(199): NCBI GI NO: 18417127 NR Description: expressed protein; protein id: At4g28100
  misc_feature (1)..(199): NCBI GI NO: 34394002 NR Description: unknown protein
  misc_feature (1)..(178): NCBI GI NO: 18401752 NR Description: expressed protein; protein id: At3g18050
  misc_feature (1)..(115): NCBI GI NO: 18401752 NR Description: expressed protein; protein id: At3g18050
MKPDDSQKCVNTLQSALLTKQIKIPQPNSSCDAILCFCGIRLHQISSLSCPAAFNVSSGFKNATPTAAVKNLEKECRNSSYSGCTRCLGALQKLKVRGGNKKTTTERGTKMMSKDCQLMGLTWLLARNKTAYIPTVSAVLRAIMYSPHPPHLNKCSPDQENMPLAVDSLQFQKSFSSSSHLFGVLPFLPLVLCIFLFLL

SEQ ID NO: 2746 - DNA, 524 bp, Arabidopsis thaliana
  misc_feature (1)..(524): Ceres Seq. ID no. 12331297
aaaacagaacaaacacaaacacaaacagagaatcaacgaagaagaaaaatggtgaaggtgatgtgggtttccgttttagctctggcggcggcgattctccttttgacggtcccggtggcagaaggggtgacgtgctcgcctatgcagctggcttcatgtgcggcggcgatgacgtcatcgtcgccgccatcggaggcgtgttgcacaaagctgagagagcagcagccatgcctttgtgggtacatgaggaaccctaccctccgccaatacgttagctcccctaacgcaaggaaagtctccaacagttgcaagattccttccccaagctgttaaggaaatgttaatcatgattaattagtgacaagtttcgctgattatagtggttaatgctggtcttatcttcgtcagtactacttaaaataataaatgagtgatgatgattgatgattatcatcatcatgcttgaatgttatgttttctatcttataaaatatgaaatatactttagaaatatgtttcgtcgt

SEQ ID NO: 2747 - protein, 110 aa, Arabidopsis thaliana
  peptide (1)..(110): Ceres Seq. ID no. 12331298
  misc_feature (45)..(110): Pfam Name: Pfam Description:  Protease inhibitor/seed storage/LTP family
  misc_feature (17)..(110): NCBI GI NO: 18402345 NR Description: lipid transfer protein, putative
  misc_feature (17)..(110): NCBI GI NO: 12597812 NR Description: lipid transfer protein, putative
  misc_feature (17)..(110): NCBI GI NO: 15229614 NR Description: lipid transfer protein, putative
  misc_feature (29)..(110): NCBI GI NO: 543565 NR Description: hypothetical 10.0K protein - Zinnia elegans
  misc_feature (29)..(110): NCBI GI NO: 543650 NR Description: P48h-10 protein precursor - Zinnia elegans (cv
  misc_feature (16)..(110): NCBI GI NO: 3183088 NR Description: Probable nonspecific lipid-transfer protein AKCS9 precursor
  misc_feature (16)..(110): NCBI GI NO: 7489428 NR Description: probable lipid transfer protein - barley
  misc_feature (24)..(110): NCBI GI NO: 498036 NR Description: lipid transfer protein
  misc_feature (24)..(110): NCBI GI NO: 24745959 NR Description: putative lipid transfer protein
  misc_feature (43)..(110): NCBI GI NO: 14423789 NR Description: NONSPECIFIC LIPID-TRANSFER PROTEIN 2 (LTP 2)
KTEQTQTQTENQRRRKMVKVMWVSVLALAAAILLLTVPVAEGVTCSPMQLASCAAAMTSSSPPSEACCTKLREQQPCLCGYMRNPTLRQYVSSPNARKVSNSCKIPSPSC

SEQ ID NO: 2748 - protein, 94 aa, Arabidopsis thaliana
  peptide (1)..(94): Ceres Seq. ID no. 12331299
  misc_feature (29)..(94): Pfam Name: Pfam Description:  Protease inhibitor/seed storage/LTP family
  misc_feature (1)..(94): NCBI GI NO: 18402345 NR Description: lipid transfer protein, putative
  misc_feature (1)..(94): NCBI GI NO: 12597812 NR Description: lipid transfer protein, putative
  misc_feature (1)..(94): NCBI GI NO: 15229614 NR Description: lipid transfer protein, putative
  misc_feature (13)..(94): NCBI GI NO: 543565 NR Description: hypothetical 10.0K protein - Zinnia elegans
  misc_feature (13)..(94): NCBI GI NO: 543650 NR Description: P48h-10 protein precursor - Zinnia elegans (cv
  misc_feature (1)..(94): NCBI GI NO: 3183088 NR Description: Probable nonspecific lipid-transfer protein AKCS9 precursor
  misc_feature (1)..(94): NCBI GI NO: 7489428 NR Description: probable lipid transfer protein - barley
  misc_feature (8)..(94): NCBI GI NO: 498036 NR Description: lipid transfer protein
  misc_feature (8)..(94): NCBI GI NO: 24745959 NR Description: putative lipid transfer protein
  misc_feature (27)..(94): NCBI GI NO: 14423789 NR Description: NONSPECIFIC LIPID-TRANSFER PROTEIN 2 (LTP 2)
MVKVMWVSVLALAAAILLLTVPVAEGVTCSPMQLASCAAAMTSSSPPSEACCTKLREQQPCLCGYMRNPTLRQYVSSPNARKVSNSCKIPSPSC

SEQ ID NO: 2749 - protein, 90 aa, Arabidopsis thaliana
  peptide (1)..(90): Ceres Seq. ID no. 12331300
NRTNTNTNRESTKKKNGEGDVGFRFSSGGGDSPFDGPGGRRGDVLAYAAGFMCGGDDVIVAAIGGVLHKAERAAAMPLWVHEEPYPPPIR

SEQ ID NO: 2750 - DNA, 1190 bp, Arabidopsis thaliana
  misc_feature (1)..(1190): Ceres Seq. ID no. 12337456
attaatcatcatcttttcttcacagagaggaaaaaaaaaaaatggcgacagattctcaaccaaaccaaaagctaacgcttccgttaaaaacaagaatcgctctcaccgttatctccaccatgaccgataacgctcaacgtcctgacggaactatcaaccgccgtttcctccgcctcttcgatttccgtgctcctcccaatcctaaacccgtcaacatcgtctccacctccgatttcgtcgtggatcaatcccgtgatctctggttccgattgtacactccacatgtctccggcgataaaatccccgtcgttgttttcttccacggcggtggtttcgctttccttagtcctaatgcgtatccttacgataatgtatgccggagattcgctaggaaattacctgcttatgtcatctccgttaactaccgtctcgctccggagcatcgttatcctgctcaatacgacgacggtttcgatgctttgaagtacatcgaggagaatcacggttcgattcttccggcgaacgctgatctctcgagatgcttcttcgccggagacagtgcaggtggaaacatcgcgcacaacgtcgcgattcgaatttgtcgcgagccgcggtcatctttcaccgccgtgaaactcatcggacttatctcgattcaacctttcttcggcggagaagagagaacggaagcggagaaacaactcgtcggagctcctttggtttcaccggaccgaacagattggtgctggaaagcgatgggattaaaccgggatcatgaagcggttaacgtaggcggaccaaacgcggttgatatatcgggtctggattatccggagacgatggtggtagtagctgggtttgatccgttaaaagattggcagagaagttactacgagtggttaaagttatgcggtaaaaaagcaacgttaatcgaatattcaaacatgtttcatgcgttttacattttccctgaattgcctgaggcgggtcagttaattatgcggattaaggattttgttgatgagcgcgtggcttcactctccgcttaatcaccttcgctaatgatggatttttaaattagctcaatgaataataatgtattaagctctatgcttgtgtcttgtttagtgttttaaaaatggtgtaggtcgatctattttcattattaatcaagtgttcaactttaagtg

SEQ ID NO: 2751 - protein, 335 aa, Arabidopsis thaliana
  peptide (1)..(335): Ceres Seq. ID no. 12337457
  misc_feature (78)..(109): Pfam Name: Pfam Description:  Carboxylesterase
  misc_feature (1)..(335): NCBI GI NO: 21618039 NR Description: unknown [Arabidopsis thaliana]
  misc_feature (1)..(335): NCBI GI NO: 15237783 NR Description: putative protein; protein id: At5g23530
  misc_feature (1)..(327): NCBI GI NO: 34904770 NR Description: similar to carboxylesterase
  misc_feature (3)..(335): NCBI GI NO: 34393714 NR Description: putative esterase
  misc_feature (3)..(335): NCBI GI NO: 34904774 NR Description: similar to carboxylesterase
  misc_feature (1)..(335): NCBI GI NO: 34904760 NR Description: similar to carboxylesterase
  misc_feature (9)..(332): NCBI GI NO: 34904772 NR Description: similar to carboxylesterase
  misc_feature (33)..(328): NCBI GI NO: 34904758 NR Description: hypothetical protein~predicted by GeneMark
  misc_feature (10)..(327): NCBI GI NO: 15240483 NR Description: putative protein; protein id: At5g27320
  misc_feature (10)..(327): NCBI GI NO: 15229905 NR Description: unknown protein; protein id: At3g05120.1
MATDSQPNQKLTLPLKTRIALTVISTMTDNAQRPDGTINRRFLRLFDFRAPPNPKPVNIVSTSDFVVDQSRDLWFRLYTPHVSGDKIPVVVFFHGGGFAFLSPNAYPYDNVCRRFARKLPAYVISVNYRLAPEHRYPAQYDDGFDALKYIEENHGSILPANADLSRCFFAGDSAGGNIAHNVAIRICREPRSSFTAVKLIGLISIQPFFGGEERTEAEKQLVGAPLVSPDRTDWCWKAMGLNRDHEAVNVGGPNAVDISGLDYPETMVVVAGFDPLKDWQRSYYEWLKLCGKKATLIEYSNMFHAFYIFPELPEAGQLIMRIKDFVDERVASLSA

SEQ ID NO: 2752 - protein, 309 aa, Arabidopsis thaliana
  peptide (1)..(309): Ceres Seq. ID no. 12337458
  misc_feature (52)..(83): Pfam Name: Pfam Description:  Carboxylesterase
  misc_feature (1)..(309): NCBI GI NO: 21618039 NR Description: unknown [Arabidopsis thaliana]
  misc_feature (1)..(309): NCBI GI NO: 15237783 NR Description: putative protein; protein id: At5g23530
  misc_feature (1)..(301): NCBI GI NO: 34904770 NR Description: similar to carboxylesterase
  misc_feature (1)..(309): NCBI GI NO: 34393714 NR Description: putative esterase
  misc_feature (1)..(309): NCBI GI NO: 34904774 NR Description: similar to carboxylesterase
  misc_feature (1)..(309): NCBI GI NO: 34904760 NR Description: similar to carboxylesterase
  misc_feature (1)..(306): NCBI GI NO: 34904772 NR Description: similar to carboxylesterase
  misc_feature (7)..(302): NCBI GI NO: 34904758 NR Description: hypothetical protein~predicted by GeneMark
  misc_feature (1)..(301): NCBI GI NO: 15240483 NR Description: putative protein; protein id: At5g27320
  misc_feature (1)..(301): NCBI GI NO: 15229905 NR Description: unknown protein; protein id: At3g05120.1
MTDNAQRPDGTINRRFLRLFDFRAPPNPKPVNIVSTSDFVVDQSRDLWFRLYTPHVSGDKIPVVVFFHGGGFAFLSPNAYPYDNVCRRFARKLPAYVISVNYRLAPEHRYPAQYDDGFDALKYIEENHGSILPANADLSRCFFAGDSAGGNIAHNVAIRICREPRSSFTAVKLIGLISIQPFFGGEERTEAEKQLVGAPLVSPDRTDWCWKAMGLNRDHEAVNVGGPNAVDISGLDYPETMVVVAGFDPLKDWQRSYYEWLKLCGKKATLIEYSNMFHAFYIFPELPEAGQLIMRIKDFVDERVASLSA

SEQ ID NO: 2753 - DNA, 1913 bp, Arabidopsis thaliana
  misc_feature (1)..(1913): Ceres Seq. ID no. 13645775
atggagaagaagaagaagaagagagatgaggaagaaacgagaggctaaagatgaaaatgaagaagaagaagaggagaagaagaagagactagagttgatgaaggcagctgcgcaggcttggctcagccactcccaaacctcaaaacatactgttttagagttcgatgcgcagagaaagcatgcttttgtcaaagggaaggcatcacgtttcaaaacggaagccttgtccgcaaagcatcatccgtcgtttttggattgggaattcggacagtcgctgtgggatccctacgagattctttcggtctctaagaaactggaacgcgaactcactttagaagaacaaaccttctcttcttcagataatgatggcctcaagaagatgaagaagaagaaaactagagacagcagaaacagccttaggagtttgttcactcgttcgtcttcaaagagattctaacaaactcatcatgttactacttcaaacttgtaaatttttctcaaaaagtgaaatcaattatgaatgtcttttattggtcgaaaaaaaaaaaaaaaaaagcttttttttttttttttttgcaaagaaagctttgttttgattgataatattacacataaccaagagagagcatatagtacaaacgaaaacaagaatagttatccttagaagtaatcctcagtcctgcccttgaatccgatttgtccgaaagtgaggcagaggaagaggcctaagtgccacgtaaccaaccacaaccagaactgtgaagtgagagctggaggagtcgggaagtgagcgagctcagttccgatgctatcgaagaagagacccgtcaggctcttcccatttatcgctggaatgctcgacggagctagccatccgatcagcccaaatcctaccacgttcaaatctctcctcaaccagttcctctcaaagcaagtgactcttcctcccgatgcaccggcgagtctcaaagggttcttggcgcttaatgttggttttaaaaaggatgaagagaagggtttggtggtgatggatgatcctccgaggcctatcaccgtcgatggtgttgcaaatgttgctgccatttttcttctgggctgctcacaagaccgactttttctcggacaagttcggtgtgaggtcaatcagggacaataacgatgaactaatgggtgctgtgtatctacaagttagtatcatcagtcaagctctaatctttgtcaccaggtcaaggagttggtcatttgtcgaacgtcctggggcgcttctgatgattgcattcgtcattgcacaactggttgcaactttgatcgcagtgtatgccgactggacatttgcaaaggtgaagggtatcggttggggatgggcaggtgtgatttggatttacagtatcgtaacatacttcccacaggacattttgaagtttgccattcggtatatcttgagtggaaaggcttgggccagcttgtttgacaacaggaccgctttcacaaccaagaaagattacggtattggagaaagagaagctcaatgggcacaagctcaaaggacattgcacggtctgcagccaaaagaagatgttaatatcttcccagagaaaggaagttacagagagctgtctgagatcgcagagcaagccaagagaagggccgagatagctaggcttagggagcttcacacattgaagggacatgtggaatcagtcgcaaagctaaagggattggacattgatacagcaggacatcactacactgtgtagttggagttgcacaacaacacaaacatttaccgaaaaccaaccccatcatgactcatcttttgttttgtcttcacaaatctctctttaaaagtcattacagtagagggaagagaactcttgtgtattgccataactcttccaaaactcttttttctt

SEQ ID NO: 2754 - protein, 241 aa, Arabidopsis thaliana
  peptide (1)..(241): Ceres Seq. ID no. 13645776
  misc_feature (19)..(241): NCBI GI NO: 15224264 NR Description: ATPase 1, plasma membrane-type
  misc_feature (19)..(241): NCBI GI NO: 166746 NR Description: plasma membrane proton pump H+ ATPase
  misc_feature (19)..(241): NCBI GI NO: 15234666 NR Description: ATPase 2, plasma membrane-type
  misc_feature (14)..(241): NCBI GI NO: 1076663 NR Description: H+-exporting ATPase (EC 3
  misc_feature (14)..(241): NCBI GI NO: 1621440 NR Description: plasma membrane H+-ATPase
  misc_feature (1)..(241): NCBI GI NO: 416664 NR Description: Plasma membrane ATPase 4 (Proton pump 4)
  misc_feature (12)..(241): NCBI GI NO: 7105717 NR Description: plasma membrane proton ATPase
  misc_feature (12)..(241): NCBI GI NO: 31580853 NR Description: plasma membrane H+-ATPase [Sesbania rostrata]
  misc_feature (12)..(241): NCBI GI NO: 13016808 NR Description: P-type H+-ATPase [Vicia faba]
  misc_feature (12)..(241): NCBI GI NO: 1076511 NR Description: H+-exporting ATPase (EC 3.6.3.6) - kidney bean
MILRGLSPSMVLQMLLPFFFWAAHKTDFFSDKFGVRSIRDNNDELMGAVYLQVSIISQALIFVTRSRSWSFVERPGALLMIAFVIAQLVATLIAVYADWTFAKVKGIGWGWAGVIWIYSIVTYFPQDILKFAIRYILSGKAWASLFDNRTAFTTKKDYGIGEREAQWAQAQRTLHGLQPKEDVNIFPEKGSYRELSEIAEQAKRRAEIARLRELHTLKGHVESVAKLKGLDIDTAGHHYTV

SEQ ID NO: 2755 - protein, 232 aa, Arabidopsis thaliana
  peptide (1)..(232): Ceres Seq. ID no. 13645777
  misc_feature (10)..(232): NCBI GI NO: 15224264 NR Description: ATPase 1, plasma membrane-type
  misc_feature (10)..(232): NCBI GI NO: 166746 NR Description: plasma membrane proton pump H+ ATPase
  misc_feature (10)..(232): NCBI GI NO: 15234666 NR Description: ATPase 2, plasma membrane-type
  misc_feature (5)..(232): NCBI GI NO: 1076663 NR Description: H+-exporting ATPase (EC 3
  misc_feature (5)..(232): NCBI GI NO: 1621440 NR Description: plasma membrane H+-ATPase
  misc_feature (1)..(232): NCBI GI NO: 416664 NR Description: Plasma membrane ATPase 4 (Proton pump 4)
  misc_feature (3)..(232): NCBI GI NO: 7105717 NR Description: plasma membrane proton ATPase
  misc_feature (3)..(232): NCBI GI NO: 31580853 NR Description: plasma membrane H+-ATPase [Sesbania rostrata]
  misc_feature (3)..(232): NCBI GI NO: 13016808 NR Description: P-type H+-ATPase [Vicia faba]
  misc_feature (3)..(232): NCBI GI NO: 1076511 NR Description: H+-exporting ATPase (EC 3.6.3.6) - kidney bean
MVLQMLLPFFFWAAHKTDFFSDKFGVRSIRDNNDELMGAVYLQVSIISQALIFVTRSRSWSFVERPGALLMIAFVIAQLVATLIAVYADWTFAKVKGIGWGWAGVIWIYSIVTYFPQDILKFAIRYILSGKAWASLFDNRTAFTTKKDYGIGEREAQWAQAQRTLHGLQPKEDVNIFPEKGSYRELSEIAEQAKRRAEIARLRELHTLKGHVESVAKLKGLDIDTAGHHYTV

SEQ ID NO: 2756 - protein, 228 aa, Arabidopsis thaliana
  peptide (1)..(228): Ceres Seq. ID no. 13645778
  misc_feature (6)..(228): NCBI GI NO: 15224264 NR Description: ATPase 1, plasma membrane-type
  misc_feature (6)..(228): NCBI GI NO: 166746 NR Description: plasma membrane proton pump H+ ATPase
  misc_feature (6)..(228): NCBI GI NO: 15234666 NR Description: ATPase 2, plasma membrane-type
  misc_feature (1)..(228): NCBI GI NO: 1076663 NR Description: H+-exporting ATPase (EC 3
  misc_feature (1)..(228): NCBI GI NO: 1621440 NR Description: plasma membrane H+-ATPase
  misc_feature (1)..(228): NCBI GI NO: 416664 NR Description: Plasma membrane ATPase 4 (Proton pump 4)
  misc_feature (1)..(228): NCBI GI NO: 7105717 NR Description: plasma membrane proton ATPase
  misc_feature (1)..(228): NCBI GI NO: 31580853 NR Description: plasma membrane H+-ATPase [Sesbania rostrata]
  misc_feature (1)..(228): NCBI GI NO: 13016808 NR Description: P-type H+-ATPase [Vicia faba]
  misc_feature (1)..(228): NCBI GI NO: 1076511 NR Description: H+-exporting ATPase (EC 3.6.3.6) - kidney bean
MLLPFFFWAAHKTDFFSDKFGVRSIRDNNDELMGAVYLQVSIISQALIFVTRSRSWSFVERPGALLMIAFVIAQLVATLIAVYADWTFAKVKGIGWGWAGVIWIYSIVTYFPQDILKFAIRYILSGKAWASLFDNRTAFTTKKDYGIGEREAQWAQAQRTLHGLQPKEDVNIFPEKGSYRELSEIAEQAKRRAEIARLRELHTLKGHVESVAKLKGLDIDTAGHHYTV

SEQ ID NO: 2757 - DNA, 823 bp, Arabidopsis thaliana
  misc_feature (1)..(823): Ceres Seq. ID no. 12337242
acaaacttcactcaaaacctaattaacttagagagaaagagagagagagaagggttgcaaaatgcgttcttcgtaccaagaatctccaccgttgcttcttgaagatcttaaggttacgatcaaagaatcaacactcattttcccatctgaagaaaccagcgagagaaaatccatgttcttatccaacgtcgaccaaattctcaactttgacgttcaaacagttcatttcttccgacctaacaaggagtttccaccggagatggtctcggagaagctgagaaaggcgttggtgaaactcatggacgcttatgagttcttggccgggagactctgcgtggatcctagctctggacggcttgatgttgactgtaacggtgctggagctggctttgtgacggcggcgagtgactacacgttggaggaacttggagatttggtttatccaaatccagcttttgctcaattggttacaagtcagcttcagagtttgcccaaagatgatcaacccttgtttgtctttcaggaagaaagaaaaaaaaaatcaaaagttttgagtgtataaacacaaagaagcttccttagaatcaaaaaaatttcgaacatgttcacaataaattttgtgaacttttagctattttgcaacctcgagggagggatctcaaggatctaagtaccatcatgatatttatagaaatctagtttatataggtcattagtcgaggaccatgtgggtaaaatagaataaaaacttgtttcttctatagagtccaagtattaatcggagttttgtgtgagatcctccgtattcaaaatataaatgttt

SEQ ID NO: 2758 - protein, 166 aa, Arabidopsis thaliana
  peptide (1)..(166): Ceres Seq. ID no. 12337243
  misc_feature (16)..(154): Pfam Name: Pfam Description:  Transferase family
  misc_feature (1)..(166): NCBI GI NO: 21593740 NR Description: unknown [Arabidopsis thaliana]
  misc_feature (1)..(166): NCBI GI NO: 18408285 NR Description: Expressed protein; protein id: At1g65445
  misc_feature (1)..(154): NCBI GI NO: 7487802 NR Description: hypothetical protein T8F5
  misc_feature (16)..(154): NCBI GI NO: 27475616 NR Description: hydroxycinnamoyl transferase [Nicotiana tabacum]
  misc_feature (14)..(159): NCBI GI NO: 6469032 NR Description: N-hydroxycinnamoyl/benzoyltransferase
  misc_feature (16)..(159): NCBI GI NO: 40644084 NR Description: hydroxycinnamoyl CoA quinate transferase
  misc_feature (16)..(154): NCBI GI NO: 15239747 NR Description: anthranilate N-benzoyltransferase
  misc_feature (16)..(154): NCBI GI NO: 21536883 NR Description: anthranilate N-benzoyltransferase
  misc_feature (16)..(159): NCBI GI NO: 40644899 NR Description: hydroxycinnamoyl CoA quinate transferase
  misc_feature (16)..(130): NCBI GI NO: 30693725 NR Description: transferase family [Arabidopsis thaliana]
MRSSYQESPPLLLEDLKVTIKESTLIFPSEETSERKSMFLSNVDQILNFDVQTVHFFRPNKEFPPEMVSEKLRKALVKLMDAYEFLAGRLCVDPSSGRLDVDCNGAGAGFVTAASDYTLEELGDLVYPNPAFAQLVTSQLQSLPKDDQPLFVFQEERKKKSKVLSV

SEQ ID NO: 2759 - protein, 129 aa, Arabidopsis thaliana
  peptide (1)..(129): Ceres Seq. ID no. 12337244
  misc_feature (1)..(117): Pfam Name: Pfam Description:  Transferase family
  misc_feature (1)..(129): NCBI GI NO: 21593740 NR Description: unknown [Arabidopsis thaliana]
  misc_feature (1)..(129): NCBI GI NO: 18408285 NR Description: Expressed protein; protein id: At1g65445
  misc_feature (1)..(117): NCBI GI NO: 7487802 NR Description: hypothetical protein T8F5
  misc_feature (1)..(117): NCBI GI NO: 27475616 NR Description: hydroxycinnamoyl transferase [Nicotiana tabacum]
  misc_feature (1)..(122): NCBI GI NO: 6469032 NR Description: N-hydroxycinnamoyl/benzoyltransferase
  misc_feature (1)..(122): NCBI GI NO: 40644084 NR Description: hydroxycinnamoyl CoA quinate transferase
  misc_feature (1)..(117): NCBI GI NO: 15239747 NR Description: anthranilate N-benzoyltransferase
  misc_feature (1)..(117): NCBI GI NO: 21536883 NR Description: anthranilate N-benzoyltransferase
  misc_feature (1)..(122): NCBI GI NO: 40644899 NR Description: hydroxycinnamoyl CoA quinate transferase
  misc_feature (1)..(93): NCBI GI NO: 30693725 NR Description: transferase family [Arabidopsis thaliana]
MFLSNVDQILNFDVQTVHFFRPNKEFPPEMVSEKLRKALVKLMDAYEFLAGRLCVDPSSGRLDVDCNGAGAGFVTAASDYTLEELGDLVYPNPAFAQLVTSQLQSLPKDDQPLFVFQEERKKKSKVLSV

SEQ ID NO: 2760 - protein, 100 aa, Arabidopsis thaliana
  peptide (1)..(100): Ceres Seq. ID no. 12337245
  misc_feature (1)..(88): Pfam Name: Pfam Description:  Transferase family
  misc_feature (1)..(100): NCBI GI NO: 21593740 NR Description: unknown [Arabidopsis thaliana]
  misc_feature (1)..(100): NCBI GI NO: 18408285 NR Description: Expressed protein; protein id: At1g65445
  misc_feature (1)..(88): NCBI GI NO: 7487802 NR Description: hypothetical protein T8F5
  misc_feature (1)..(88): NCBI GI NO: 27475616 NR Description: hydroxycinnamoyl transferase [Nicotiana tabacum]
  misc_feature (1)..(93): NCBI GI NO: 6469032 NR Description: N-hydroxycinnamoyl/benzoyltransferase
  misc_feature (1)..(93): NCBI GI NO: 40644084 NR Description: hydroxycinnamoyl CoA quinate transferase
  misc_feature (1)..(88): NCBI GI NO: 15239747 NR Description: anthranilate N-benzoyltransferase
  misc_feature (1)..(88): NCBI GI NO: 21536883 NR Description: anthranilate N-benzoyltransferase
  misc_feature (1)..(93): NCBI GI NO: 40644899 NR Description: hydroxycinnamoyl CoA quinate transferase
  misc_feature (1)..(64): NCBI GI NO: 30693725 NR Description: transferase family [Arabidopsis thaliana]
MVSEKLRKALVKLMDAYEFLAGRLCVDPSSGRLDVDCNGAGAGFVTAASDYTLEELGDLVYPNPAFAQLVTSQLQSLPKDDQPLFVFQEERKKKSKVLSV

SEQ ID NO: 2761 - DNA, 1283 bp, Arabidopsis thaliana
  misc_feature (1)..(1283): Ceres Seq. ID no. 13509079
gacggctaagtcttcctctctctctctctctctctctctctctgcaatggactctctggtagcgagctacgcttcgtcggacgaagaagaagatcttcaaccacgtcgagaagctttcactgtaaaatcctcagaaccttccgcttcgtctctattctcagctattcctcaacctaaagaactcaaatcctccgaagatggtgatttaggctcatcttcctctcgaggaaaatcttcttctttcctctcatctctccctcctcccaaatcctcaatttcacggaaaaaaaatcccaatccgtcgtcaattccgaaacgtgtcgtccagatcaggcttccagtaaaccctagaccgagcaatcttgacgacgaagacgacgaagaagaagagaaagctaggaagaagcgtaaacagatggaatctgcttccgcatctcacgattcatcagtaagatcgttcttatccgccatgcctgcacctaaaagctcacaaacactaggtgctcttccttcattgggatcaggatcaggtcgaagatcgaatctcgaaacagaaacaccttcaattgcatttcctcaaacggattcaggtattagtgatcaacaaaaccagagctatgaatcgtttagtcatagtaatagcgaaacggaacaaatcgttggagtagataactattatgctactggttatgatggtggatacgaaacaattcctagtggtagtagtgtgggatatgatggtagtagctatggaggtaatacttggaatggtggtgggtttgaggcaatgacgggattgcctgaagcggttgtagctatggatagtggtgcgaggagaggaaggagagggaggaatcagatgccagagattgttgaggttaagcaagatgagcttatgaagaataggccacgagttgatcaggttaaatctactggaatcgcctttggacctgcgtatcagccggtaacatcttcatctaaagggaaagtgtcaaagcttcacaagaggaagcatcaaatcactgcgttgttcatggacatgaagcacaaggagtcggagttgacagagagacgttctagaggattgctcacgaaagccgagacacaagctaaatacggatggtgatttgccgctattgtttttctcaatttgtgaaatttgcaacagattttctgtaactcagagtgtaatttttttcttttactattttccaagatccaagctttgaatgtaatactcatttccgtgaatgaatctaatctcagcagaatgctttgacccg

SEQ ID NO: 2762 - protein, 374 aa, Arabidopsis thaliana
  peptide (1)..(374): Ceres Seq. ID no. 13509080
  misc_feature (28)..(190): Pfam Name: Pfam Description:  Lipoprotein amino terminal region
  misc_feature (16)..(374): NCBI GI NO: 15224752 NR Description: expressed protein [Arabidopsis thaliana]
  misc_feature (139)..(374): NCBI GI NO: 22135888 NR Description: unknown protein [Arabidopsis thaliana]
  misc_feature (18)..(135): NCBI GI NO: 34857916 NR Description: similar to papillary renal cell carcinoma-associatedprotein
  misc_feature (267)..(374): NCBI GI NO: 34857916 NR Description: similar to papillary renal cell carcinoma-associatedprotein
TAKSSSLSLSLSLSAMDSLVASYASSDEEEDLQPRREAFTVKSSEPSASSLFSAIPQPKELKSSEDGDLGSSSSRGKSSSFLSSLPPPKSSISRKKNPNPSSIPKRVVQIRLPVNPRPSNLDDEDDEEEEKARKKRKQMESASASHDSSVRSFLSAMPAPKSSQTLGALPSLGSGSGRRSNLETETPSIAFPQTDSGISDQQNQSYESFSHSNSETEQIVGVDNYYATGYDGGYETIPSGSSVGYDGSSYGGNTWNGGGFEAMTGLPEAVVAMDSGARRGRRGRNQMPEIVEVKQDELMKNRPRVDQVKSTGIAFGPAYQPVTSSSKGKVSKLHKRKHQITALFMDMKHKESELTERRSRGLLTKAETQAKYGW

SEQ ID NO: 2763 - protein, 359 aa, Arabidopsis thaliana
  peptide (1)..(359): Ceres Seq. ID no. 13509081
  misc_feature (13)..(175): Pfam Name: Pfam Description:  Lipoprotein amino terminal region
  misc_feature (1)..(359): NCBI GI NO: 15224752 NR Description: expressed protein [Arabidopsis thaliana]
  misc_feature (124)..(359): NCBI GI NO: 22135888 NR Description: unknown protein [Arabidopsis thaliana]
  misc_feature (3)..(120): NCBI GI NO: 34857916 NR Description: similar to papillary renal cell carcinoma-associatedprotein
  misc_feature (252)..(359): NCBI GI NO: 34857916 NR Description: similar to papillary renal cell carcinoma-associatedprotein
MDSLVASYASSDEEEDLQPRREAFTVKSSEPSASSLFSAIPQPKELKSSEDGDLGSSSSRGKSSSFLSSLPPPKSSISRKKNPNPSSIPKRVVQIRLPVNPRPSNLDDEDDEEEEKARKKRKQMESASASHDSSVRSFLSAMPAPKSSQTLGALPSLGSGSGRRSNLETETPSIAFPQTDSGISDQQNQSYESFSHSNSETEQIVGVDNYYATGYDGGYETIPSGSSVGYDGSSYGGNTWNGGGFEAMTGLPEAVVAMDSGARRGRRGRNQMPEIVEVKQDELMKNRPRVDQVKSTGIAFGPAYQPVTSSSKGKVSKLHKRKHQITALFMDMKHKESELTERRSRGLLTKAETQAKYGW

SEQ ID NO: 2764 - protein, 236 aa, Arabidopsis thaliana
  peptide (1)..(236): Ceres Seq. ID no. 13509082
  misc_feature (1)..(52): Pfam Name: Pfam Description:  Lipoprotein amino terminal region
  misc_feature (1)..(236): NCBI GI NO: 15224752 NR Description: expressed protein [Arabidopsis thaliana]
  misc_feature (1)..(236): NCBI GI NO: 22135888 NR Description: unknown protein [Arabidopsis thaliana]
  misc_feature (129)..(236): NCBI GI NO: 34857916 NR Description: similar to papillary renal cell carcinoma-associatedprotein
MESASASHDSSVRSFLSAMPAPKSSQTLGALPSLGSGSGRRSNLETETPSIAFPQTDSGISDQQNQSYESFSHSNSETEQIVGVDNYYATGYDGGYETIPSGSSVGYDGSSYGGNTWNGGGFEAMTGLPEAVVAMDSGARRGRRGRNQMPEIVEVKQDELMKNRPRVDQVKSTGIAFGPAYQPVTSSSKGKVSKLHKRKHQITALFMDMKHKESELTERRSRGLLTKAETQAKYGW

SEQ ID NO: 2765 - DNA, 684 bp, Arabidopsis thaliana
  misc_feature (1)..(684): Ceres Seq. ID no. 12326967
gagtgagtgagagaagaatcagagaaaatgccgccgaaattggatccatctcaaatcgtcgacgtctacgtccgagtcaccggaggtgaggtcggagcagcgtcttcactcgctccaaagatcggtccactcggtctggcaccaaagaagatcggagaagacatcgccaaagagacagcgaaagaatggaaaggtcttcgagtcaccgtgaagcttacggtacagaatcgtcaagctaaggtcacagtggttccatccgcagcggctctagtcatcaaagccctcaaggagccagagagagataggaagaaagtgaagaacatcaaacataatggcaacatttcgtttgatgatgtgattgagattgctaagataatgcgtcctagatctatcgctaaggaattgagtggaacagtgaaggagattttaggaacttgtgtctctgttggttgcactgttgatggtaaagaccctaaggatcttcaggaagaaattaacagtggtgacattgatattcctaacgagtgataaaggtttttacttttgagttctctatcgttttattttttgtatttgattttgaggatttggtattagtaatactatatttcggaagttgagaattgttggcttttgcccatttgaatcctttcttgggattaatcaaaatgttcaattttctac

SEQ ID NO: 2766 - protein, 166 aa, Arabidopsis thaliana
  peptide (1)..(166): Ceres Seq. ID no. 12326968
  misc_feature (76)..(144): Pfam Name: Pfam Description:  Ribosomal protein L11, RNA binding domain
  misc_feature (1)..(166): NCBI GI NO: 15239409 NR Description: 60S ribosomal protein L12 - like
  misc_feature (1)..(164): NCBI GI NO: 15231814 NR Description: 60S RIBOSOMAL PROTEIN L12 -like
  misc_feature (1)..(164): NCBI GI NO: 15228098 NR Description: 60S ribosomal protein L12; protein id: At2g37190
  misc_feature (1)..(164): NCBI GI NO: 40287508 NR Description: 60S ribosomal protein L12 [Capsicum annuum]
  misc_feature (1)..(165): NCBI GI NO: 38567975 NR Description: OSJNBa0093F12.16
  misc_feature (1)..(164): NCBI GI NO: 6094002 NR Description: 60S RIBOSOMAL PROTEIN L12
  misc_feature (1)..(142): NCBI GI NO: 3986695 NR Description: ribosomal protein L12 [Cichorium intybus]
  misc_feature (1)..(166): NCBI GI NO: 31235341 NR Description: ENSANGP00000019214 [Anopheles gambiae]
  misc_feature (1)..(166): NCBI GI NO: 19075397 NR Description: 60s ribosomal protein l12
  misc_feature (1)..(159): NCBI GI NO: 15293891 NR Description: ribosomal protein L12 [Ictalurus punctatus]
MPPKLDPSQIVDVYVRVTGGEVGAASSLAPKIGPLGLAPKKIGEDIAKETAKEWKGLRVTVKLTVQNRQAKVTVVPSAAALVIKALKEPERDRKKVKNIKHNGNISFDDVIEIAKIMRPRSIAKELSGTVKEILGTCVSVGCTVDGKDPKDLQEEINSGDIDIPNE

SEQ ID NO: 2767 - DNA, 1352 bp, Arabidopsis thaliana
  misc_feature (1)..(1352): Ceres Seq. ID no. 13509120
aaagtgaaatgaagtcagcaatttcatcgtcactcttcttcaattcgaagaatcttttaaaccctaatcctctttctcgcttcatttctctcaaatctaacttcctccctaaattatctccgagatcgatcactagtcacaccttgaagctcccatcttcgtcaacctcagctttaagatccatttcctcttccatggcttcttctttcaaccctgaacaagctagagttccctctgctcttcctctcccagctcctccgttgaccaaattcaacatcggattgtgtcagctatctgttacatctgacaaaaagagaaacatctctcatgctaaaaaagccattgaagaagctgcttctaaaggagctaagcttgttctcttacccgaaatttggaacagtccgtattccaatgatagttttccagtttatgcggaggagattgatgcaggtggtgatgcttctccttcaacggcaatgctttctgaagtttccaaacgtctcaagattacaatcattggtggatctataccagaaagagttggagatcgtttgtataacacttgctgtgtctttggttccgatggagagctaaaagctaagcatcggaagatacatttatttgatatagacattcccgggaagattacttttatggaatccaaaactcttactgctggagagacaccaacaatcgttgacacagatgtagggcgtattggaataggcatctgttatgatatcaggttccaggagttagctatgatatatgctgcaagaggggctcatttgctgtgctacccgggagcctttaacatgacaactggaccattgcattgggaattactacaaagggccagggctacggataatcagttatatgtggcgacatgctcacctgccagagattcaggagctggctacactgcttgggggcactcaacactcgttgggccttttggagaagtactagcaacgactgagcatgaggaggccattatcatagcagagattgattactctatccttgaacaacgaaggactagccttccattgaataggcagcggcggggagatctttaccagcttgtagacgtacagcgcttagactctaaatgaacgcagcagtaactgtatatctgagagatattgcgagttgagcacgatttggttacttacaacttcatgcatgatcagtcatttctccacaactttgctgagatatgtaaaagaataaaaatcaaacttttgagttaaaatcgaacaaaggcaagtaaattctgcttagataatgtgaactccacccacttgccatgtgtttgttgtttataaacttcaatgcattctgataac

SEQ ID NO: 2768 - protein, 371 aa, Arabidopsis thaliana
  peptide (1)..(371): Ceres Seq. ID no. 13509121
  misc_feature (3)..(371): NCBI GI NO: 22326744 NR Description: expressed protein [Arabidopsis thaliana]
  misc_feature (65)..(371): NCBI GI NO: 11357420 NR Description: hypothetical protein F14F18
  misc_feature (87)..(360): NCBI GI NO: 9910460 NR Description: Nit protein 2 [Homo sapiens]
  misc_feature (87)..(360): NCBI GI NO: 18088311 NR Description: Nit protein 2 [Homo sapiens]
  misc_feature (80)..(362): NCBI GI NO: 34868007 NR Description: similar to Nit protein 2 [Rattus norvegicus]
  misc_feature (87)..(360): NCBI GI NO: 12963555 NR Description: Nit protein 2 [Mus musculus]
  misc_feature (78)..(363): NCBI GI NO: 19115066 NR Description: putative amidohydrolase
  misc_feature (92)..(360): NCBI GI NO: 40743456 NR Description: hypothetical protein AN5486.2
  misc_feature (33)..(291): NCBI GI NO: 18390107 NR Description: putative protein NP_196765.1 [Sorghum bicolor]
  misc_feature (319)..(349): NCBI GI NO: 18390107 NR Description: putative protein NP_196765.1 [Sorghum bicolor]
SEMKSAISSSLFFNSKNLLNPNPLSRFISLKSNFLPKLSPRSITSHTLKLPSSSTSALRSISSSMASSFNPEQARVPSALPLPAPPLTKFNIGLCQLSVTSDKKRNISHAKKAIEEAASKGAKLVLLPEIWNSPYSNDSFPVYAEEIDAGGDASPSTAMLSEVSKRLKITIIGGSIPERVGDRLYNTCCVFGSDGELKAKHRKIHLFDIDIPGKITFMESKTLTAGETPTIVDTDVGRIGIGICYDIRFQELAMIYAARGAHLLCYPGAFNMTTGPLHWELLQRARATDNQLYVATCSPARDSGAGYTAWGHSTLVGPFGEVLATTEHEEAIIIAEIDYSILEQRRTSLPLNRQRRGDLYQLVDVQRLDSK

SEQ ID NO: 2769 - protein, 369 aa, Arabidopsis thaliana
  peptide (1)..(369): Ceres Seq. ID no. 13509122
  misc_feature (1)..(369): NCBI GI NO: 22326744 NR Description: expressed protein [Arabidopsis thaliana]
  misc_feature (63)..(369): NCBI GI NO: 11357420 NR Description: hypothetical protein F14F18
  misc_feature (85)..(358): NCBI GI NO: 9910460 NR Description: Nit protein 2 [Homo sapiens]
  misc_feature (85)..(358): NCBI GI NO: 18088311 NR Description: Nit protein 2 [Homo sapiens]
  misc_feature (78)..(360): NCBI GI NO: 34868007 NR Description: similar to Nit protein 2 [Rattus norvegicus]
  misc_feature (85)..(358): NCBI GI NO: 12963555 NR Description: Nit protein 2 [Mus musculus]
  misc_feature (76)..(361): NCBI GI NO: 19115066 NR Description: putative amidohydrolase
  misc_feature (90)..(358): NCBI GI NO: 40743456 NR Description: hypothetical protein AN5486.2
  misc_feature (31)..(289): NCBI GI NO: 18390107 NR Description: putative protein NP_196765.1 [Sorghum bicolor]
  misc_feature (317)..(347): NCBI GI NO: 18390107 NR Description: putative protein NP_196765.1 [Sorghum bicolor]
MKSAISSSLFFNSKNLLNPNPLSRFISLKSNFLPKLSPRSITSHTLKLPSSSTSALRSISSSMASSFNPEQARVPSALPLPAPPLTKFNIGLCQLSVTSDKKRNISHAKKAIEEAASKGAKLVLLPEIWNSPYSNDSFPVYAEEIDAGGDASPSTAMLSEVSKRLKITIIGGSIPERVGDRLYNTCCVFGSDGELKAKHRKIHLFDIDIPGKITFMESKTLTAGETPTIVDTDVGRIGIGICYDIRFQELAMIYAARGAHLLCYPGAFNMTTGPLHWELLQRARATDNQLYVATCSPARDSGAGYTAWGHSTLVGPFGEVLATTEHEEAIIIAEIDYSILEQRRTSLPLNRQRRGDLYQLVDVQRLDSK

SEQ ID NO: 2770 - protein, 307 aa, Arabidopsis thaliana
  peptide (1)..(307): Ceres Seq. ID no. 13509123
  misc_feature (1)..(307): NCBI GI NO: 22326744 NR Description: expressed protein [Arabidopsis thaliana]
  misc_feature (1)..(307): NCBI GI NO: 11357420 NR Description: hypothetical protein F14F18
  misc_feature (23)..(296): NCBI GI NO: 9910460 NR Description: Nit protein 2 [Homo sapiens]
  misc_feature (23)..(296): NCBI GI NO: 18088311 NR Description: Nit protein 2 [Homo sapiens]
  misc_feature (16)..(298): NCBI GI NO: 34868007 NR Description: similar to Nit protein 2 [Rattus norvegicus]
  misc_feature (23)..(296): NCBI GI NO: 12963555 NR Description: Nit protein 2 [Mus musculus]
  misc_feature (14)..(299): NCBI GI NO: 19115066 NR Description: putative amidohydrolase
  misc_feature (28)..(296): NCBI GI NO: 40743456 NR Description: hypothetical protein AN5486.2
  misc_feature (1)..(227): NCBI GI NO: 18390107 NR Description: putative protein NP_196765.1 [Sorghum bicolor]
  misc_feature (255)..(285): NCBI GI NO: 18390107 NR Description: putative protein NP_196765.1 [Sorghum bicolor]
MASSFNPEQARVPSALPLPAPPLTKFNIGLCQLSVTSDKKRNISHAKKAIEEAASKGAKLVLLPEIWNSPYSNDSFPVYAEEIDAGGDASPSTAMLSEVSKRLKITIIGGSIPERVGDRLYNTCCVFGSDGELKAKHRKIHLFDIDIPGKITFMESKTLTAGETPTIVDTDVGRIGIGICYDIRFQELAMIYAARGAHLLCYPGAFNMTTGPLHWELLQRARATDNQLYVATCSPARDSGAGYTAWGHSTLVGPFGEVLATTEHEEAIIIAEIDYSILEQRRTSLPLNRQRRGDLYQLVDVQRLDSK

SEQ ID NO: 2771 - DNA, 1758 bp, Arabidopsis thaliana
  misc_feature (1)..(1758): Ceres Seq. ID no. 13580639
aaagcttaacaacctccactagagactttcttgagcaaaaaagattggttataaaggaccaaccattgtcatgttattgagtgtcatttttgtgagggagagaattaagagagcaaaatgagcataaataggaatctgttgaatatcataataatcctttgtatatgtctcaatttgggttgtaacgatggagctcaagaaagagagactgattctcatactatccaagtcagctctctcctcccttcatcatcatcatcttgtgttctttctcccagagcgtctactacaaagtcttcactgcacgtgacgcatagacacggcacgtgttcgcgtctaaacaatggcaaggccacgagtccagaccatgtcgagatcctaagactcgaccaggctcgcgtaaactcaatccactcaaaactatcgaagaaactcgcaacagatcacgtcagtgaaagcaagtcaacggatctaccggctaaagacggaagcacactcggttcaggtaactacatcgtgacggtcggcctcgggacaccaaagaacgatctatcactaatcttcgacactggaagcgatttaacgtggactcagtgtcagccatgtgttcgaacttgctatgaccagaaggaaccaatctttaacccttctaagtctacttcttactacaacgtatcctgctcatcggctgcgtgtggttctctctcttctgctacaggaaacgccggaagctgttcggcttcgaattgcatctacggtattcaatacggcgatcaatcgttctccgtcggatttctcgccaaggagaagtttacactaacgaactccgacgtatttgacggcgtttatttcggttgcggcgagaacaaccaaggacttttcaccggtgtcgccggacttctcggtcttggtcgtgacaagctttcgtttccgtcgcagacggcaacggcttacaataagatcttctcttactgcctcccttcctccgctagctacaccggacatctcacattcggatccgccggaatctccagatccgttaaattcacaccaatttcaaccatcactgatggaacttccttctacggccttaatatcgtcgcaatcaccgtcggcggtcagaaattgccgattccttcaactgtattctctactccgggagctttaatcgattccggcaccgttatcactcgtctcccgccgaaagcctacgcggcgttaagaagctcgttcaaggcgaagatgtcaaagtatccgaccacgtcgggcgtctcgatcttggacacgtgtttcgatctcagcgggtttaagacggtgactatcccgaaagtggcgttctctttcagcggtggcgccgtcgtggagcttggttcgaaagggatattttacgtgtttaagatatctcaggtttgtctggcgtttgcagggaatagcgatgacagtaacgctgccatctttggaaacgttcagcagcaaacgctagaagttgtgtatgatggtgcgggtgggcgggtcgggtttgctccaaacgggtgtagttaagttagttaatgaaaaacagaacggggtaaattttaaatttatggatttggcacaaattagctttatccttaatcaagtgtgtaatttgggtaaagatcggaattcgtgatggtctttgaagtaattgtatagtaataagtttgtgtgcatgatacaacaattacaagaacaaactgtttattgtaaaattttattccaatacaactatacaagatg

SEQ ID NO: 2772 - protein, 474 aa, Arabidopsis thaliana
  peptide (1)..(474): Ceres Seq. ID no. 13580640
  misc_feature (87)..(471): Pfam Name: Pfam Description:  Eukaryotic aspartyl protease
  misc_feature (1)..(474): NCBI GI NO: 22326716 NR Description: nucleoid DNA-binding protein cnd41 - like protein
  misc_feature (59)..(474): NCBI GI NO: 11358588 NR Description: nucleoid DNA-binding protein cnd41-like protein -Arabidopsis thaliana
  misc_feature (1)..(473): NCBI GI NO: 24417232 NR Description: unknown [Arabidopsis thaliana]
  misc_feature (1)..(473): NCBI GI NO: 15238250 NR Description: nucleoid DNA-binding protein cnd41 - like protein
  misc_feature (12)..(474): NCBI GI NO: 7489168 NR Description: nucleoid DNA-binding protein cnd41
  misc_feature (30)..(474): NCBI GI NO: 24430421 NR Description: 41 kD chloroplast nucleoid DNA binding protein
  misc_feature (1)..(473): NCBI GI NO: 21595063 NR Description: putative aspartyl protease [Arabidopsis thaliana]
  misc_feature (1)..(473): NCBI GI NO: 18412482 NR Description: aspartyl protease -related [Arabidopsis thaliana]
  misc_feature (54)..(473): NCBI GI NO: 25406599 NR Description: probable aspartyl proteinase, 105611-106921
  misc_feature (60)..(473): NCBI GI NO: 34912520 NR Description: chloroplast nucleoid DNA-binding protein cnd41-like
MSINRNLLNIIIILCICLNLGCNDGAQERETDSHTIQVSSLLPSSSSSCVLSPRASTTKSSLHVTHRHGTCSRLNNGKATSPDHVEILRLDQARVNSIHSKLSKKLATDHVSESKSTDLPAKDGSTLGSGNYIVTVGLGTPKNDLSLIFDTGSDLTWTQCQPCVRTCYDQKEPIFNPSKSTSYYNVSCSSAACGSLSSATGNAGSCSASNCIYGIQYGDQSFSVGFLAKEKFTLTNSDVFDGVYFGCGENNQGLFTGVAGLLGLGRDKLSFPSQTATAYNKIFSYCLPSSASYTGHLTFGSAGISRSVKFTPISTITDGTSFYGLNIVAITVGGQKLPIPSTVFSTPGALIDSGTVITRLPPKAYAALRSSFKAKMSKYPTTSGVSILDTCFDLSGFKTVTIPKVAFSFSGGAVVELGSKGIFYVFKISQVCLAFAGNSDDSNAAIFGNVQQQTLEVVYDGAGGRVGFAPNGCS

SEQ ID NO: 2773 - DNA, 1120 bp, Arabidopsis thaliana
  misc_feature (1)..(1120): Ceres Seq. ID no. 12466478
aatcatttgcagaagaaaaataaaaaaaaaaaacagagaaaaggagatatggaatcaatcggagtccttatgatgtgccccatgtcctcctacctcgagaacgagcttgagaagcgcttcaaccttcttcgcttctggacttctccggagaaatccgtcctcctagaaactcatcggaactccatccgcgccgtcgttgggaatgcttctgccggcgccgatgctcagctcatcagcgatctgcccaaccttgagattgtatccagcttcagcgtcgggctcgacaagatcgatttggggaaatgcaaagaaaaagggatccgcgtcaccaacacccccgacgttctcaccgaagacgtcgcagatctcgccatcgggcttatcctggctctccttcgacggctgtgtgagtgcgatcgctatgtaaggagcggaaaatggaagcaaggtgaattccaactcactaccaagtttagtggaaaatccgtggggatcattggtctaggtagaattgggactgccatcgcaaagagggctgaagcctttagctgcccaatcaattactactcaagaaccattaagcctgatgtcgcctacaagtattatccgacggtggttgaccttgctcaaaactcagacatcctcgtcgtcgcatgcccgttgaccgagcagaccagacacattgtggaccggcaggtcatggatgcattaggagctaagggcgtcctcataaacattggccgtggaccacatgttgatgagcaagagcttattaaagctctaacagaaggccgcctaggtggggctgcccttgatgtgtttgagcaggagcctcacgtgcccgaggagctctttggccttgagaatgtagttctcctccctcacgttgggagtggcactgtggaaacacggaatgccatggccgatcttgtcgtgggtaacttggaagcgcacttttctgggaaatcacttctgactccggtcgtctgagtcatgtgacacatttgggatttggtttcacttcatttgaaaggtttttatgttaacgaactcatgaaaagggtaatttctcttccaaaagaaagttgcactgtcgtatataaggaacggatttgaacac

SEQ ID NO: 2774 - protein, 329 aa, Arabidopsis thaliana
  peptide (1)..(329): Ceres Seq. ID no. 12466479
  misc_feature (20)..(114): Pfam Name: Pfam Description:  D-isomer specific 2-hydroxyacid dehydrogenase
  misc_feature (17)..(329): NCBI GI NO: 15220005 NR Description: putative D-isomer specific 2-hydroxyacid dehydrogenase
  misc_feature (17)..(329): NCBI GI NO: 34904262 NR Description: putative Caulobacter crescentus D-isomer specific 2-hydroxyacid dehydrogenases family
  misc_feature (22)..(329): NCBI GI NO: 15890302 NR Description: AGR_L_379p [Agrobacterium tumefaciens]
  misc_feature (22)..(328): NCBI GI NO: 15222015 NR Description: hypothetical protein; protein id: At1g12550.1
  misc_feature (18)..(328): NCBI GI NO: 23011804 NR Description: hypothetical protein
  misc_feature (20)..(328): NCBI GI NO: 33597133 NR Description: putative D-isomer specific 2-hydroxyacid dehydrogenase
  misc_feature (20)..(328): NCBI GI NO: 33600977 NR Description: putative D-isomer specific 2-hydroxyacid dehydrogenase
  misc_feature (20)..(328): NCBI GI NO: 33594414 NR Description: putative D-isomer specific 2-hydroxyacid dehydrogenase
  misc_feature (33)..(329): NCBI GI NO: 22979887 NR Description: hypothetical protein [Ralstonia metallidurans]
  misc_feature (22)..(328): NCBI GI NO: 38345308 NR Description: OSJNBb0085F13.13
NHLQKKNKKKKQRKGDMESIGVLMMCPMSSYLENELEKRFNLLRFWTSPEKSVLLETHRNSIRAVVGNASAGADAQLISDLPNLEIVSSFSVGLDKIDLGKCKEKGIRVTNTPDVLTEDVADLAIGLILALLRRLCECDRYVRSGKWKQGEFQLTTKFSGKSVGIIGLGRIGTAIAKRAEAFSCPINYYSRTIKPDVAYKYYPTVVDLAQNSDILVVACPLTEQTRHIVDRQVMDALGAKGVLINIGRGPHVDEQELIKALTEGRLGGAALDVFEQEPHVPEELFGLENVVLLPHVGSGTVETRNAMADLVVGNLEAHFSGKSLLTPVV

SEQ ID NO: 2775 - protein, 313 aa, Arabidopsis thaliana
  peptide (1)..(313): Ceres Seq. ID no. 12466480
  misc_feature (4)..(98): Pfam Name: Pfam Description:  D-isomer specific 2-hydroxyacid dehydrogenase
  misc_feature (1)..(313): NCBI GI NO: 15220005 NR Description: putative D-isomer specific 2-hydroxyacid dehydrogenase
  misc_feature (1)..(313): NCBI GI NO: 34904262 NR Description: putative Caulobacter crescentus D-isomer specific 2-hydroxyacid dehydrogenases family
  misc_feature (6)..(313): NCBI GI NO: 15890302 NR Description: AGR_L_379p [Agrobacterium tumefaciens]
  misc_feature (6)..(312): NCBI GI NO: 15222015 NR Description: hypothetical protein; protein id: At1g12550.1
  misc_feature (2)..(312): NCBI GI NO: 23011804 NR Description: hypothetical protein
  misc_feature (4)..(312): NCBI GI NO: 33597133 NR Description: putative D-isomer specific 2-hydroxyacid dehydrogenase
  misc_feature (4)..(312): NCBI GI NO: 33600977 NR Description: putative D-isomer specific 2-hydroxyacid dehydrogenase
  misc_feature (4)..(312): NCBI GI NO: 33594414 NR Description: putative D-isomer specific 2-hydroxyacid dehydrogenase
  misc_feature (17)..(313): NCBI GI NO: 22979887 NR Description: hypothetical protein [Ralstonia metallidurans]
  misc_feature (6)..(312): NCBI GI NO: 38345308 NR Description: OSJNBb0085F13.13
MESIGVLMMCPMSSYLENELEKRFNLLRFWTSPEKSVLLETHRNSIRAVVGNASAGADAQLISDLPNLEIVSSFSVGLDKIDLGKCKEKGIRVTNTPDVLTEDVADLAIGLILALLRRLCECDRYVRSGKWKQGEFQLTTKFSGKSVGIIGLGRIGTAIAKRAEAFSCPINYYSRTIKPDVAYKYYPTVVDLAQNSDILVVACPLTEQTRHIVDRQVMDALGAKGVLINIGRGPHVDEQELIKALTEGRLGGAALDVFEQEPHVPEELFGLENVVLLPHVGSGTVETRNAMADLVVGNLEAHFSGKSLLTPVV

SEQ ID NO: 2776 - protein, 306 aa, Arabidopsis thaliana
  peptide (1)..(306): Ceres Seq. ID no. 12466481
  misc_feature (1)..(91): Pfam Name: Pfam Description:  D-isomer specific 2-hydroxyacid dehydrogenase
  misc_feature (1)..(306): NCBI GI NO: 15220005 NR Description: putative D-isomer specific 2-hydroxyacid dehydrogenase
  misc_feature (1)..(306): NCBI GI NO: 34904262 NR Description: putative Caulobacter crescentus D-isomer specific 2-hydroxyacid dehydrogenases family
  misc_feature (1)..(306): NCBI GI NO: 15890302 NR Description: AGR_L_379p [Agrobacterium tumefaciens]
  misc_feature (1)..(305): NCBI GI NO: 15222015 NR Description: hypothetical protein; protein id: At1g12550.1
  misc_feature (1)..(305): NCBI GI NO: 23011804 NR Description: hypothetical protein
  misc_feature (1)..(305): NCBI GI NO: 33597133 NR Description: putative D-isomer specific 2-hydroxyacid dehydrogenase
  misc_feature (1)..(305): NCBI GI NO: 33600977 NR Description: putative D-isomer specific 2-hydroxyacid dehydrogenase
  misc_feature (1)..(305): NCBI GI NO: 33594414 NR Description: putative D-isomer specific 2-hydroxyacid dehydrogenase
  misc_feature (10)..(306): NCBI GI NO: 22979887 NR Description: hypothetical protein [Ralstonia metallidurans]
  misc_feature (1)..(305): NCBI GI NO: 38345308 NR Description: OSJNBb0085F13.13
MMCPMSSYLENELEKRFNLLRFWTSPEKSVLLETHRNSIRAVVGNASAGADAQLISDLPNLEIVSSFSVGLDKIDLGKCKEKGIRVTNTPDVLTEDVADLAIGLILALLRRLCECDRYVRSGKWKQGEFQLTTKFSGKSVGIIGLGRIGTAIAKRAEAFSCPINYYSRTIKPDVAYKYYPTVVDLAQNSDILVVACPLTEQTRHIVDRQVMDALGAKGVLINIGRGPHVDEQELIKALTEGRLGGAALDVFEQEPHVPEELFGLENVVLLPHVGSGTVETRNAMADLVVGNLEAHFSGKSLLTPVV

SEQ ID NO: 2777 - DNA, 766 bp, Arabidopsis thaliana
  misc_feature (1)..(766): Ceres Seq. ID no. 13489647
ctctgaaacttttgccttgcttgcttgcccagaaagtcgccgagaaagttaaaagtagaacggcggaggaaaaaaaaacgaagaggaagaggagagatggagtcgcagaagaagatagctcatgagatcggaggtatgaagaacgatgctcttcgctttggtcttcacggcgttaagagcgatatccttagatctcatcctctcgaaacggcttacgaatctgggaagcaatcacaagaagaaatgaagaggagagtgatcacgcatacttatggagctgctcttcctttgaagatggatcttgatagacaaatcctttctcggtttcagagacctcctggaccaattccttcatcaatgcttggccttgaagtctacacaggagctctagataattttggttttgaggattacttgaatgatcctcgcgaatccgagacgctgaaaccagtagactttcaccacgggatggaagttcggcttggtctctccaaaggcccagcttccccaagtttcatgtagtcaccaccatcaaagtatttccttcgtcaggtctcatatgctttttaatctgagtaagatcatgttatgaatttccaccagccctaaaagaatctacttgttgtttgatctcttctctatactgtgtctcctttgctctgaacatgataaaacatatgaactgtgtttcagttcttatctctctcagttcacaatttgttggacttgcttagttatttaaataagattatgctcctatttcatt

SEQ ID NO: 2778 - protein, 141 aa, Arabidopsis thaliana
  peptide (1)..(141): Ceres Seq. ID no. 13489648
  misc_feature (3)..(132): Pfam Name: Pfam Description:  Proteasome maturation factor UMP1
  misc_feature (1)..(141): NCBI GI NO: 15240969 NR Description: expressed protein [Arabidopsis thaliana]
  misc_feature (1)..(141): NCBI GI NO: 18408726 NR Description: expressed protein [Arabidopsis thaliana]
  misc_feature (1)..(141): NCBI GI NO: 9828633 NR Description: F1N21.7 [Arabidopsis thaliana]
  misc_feature (4)..(141): NCBI GI NO: 25493097 NR Description: hypothetical protein [imported] - Picea mariana
  misc_feature (95)..(141): NCBI GI NO: 6049098 NR Description: unknown [Picea abies]
  misc_feature (96)..(141): NCBI GI NO: 2996130 NR Description: hypothetical protein [Picea mariana]
  misc_feature (96)..(141): NCBI GI NO: 2996132 NR Description: hypothetical protein [Picea mariana]
  misc_feature (96)..(141): NCBI GI NO: 2996128 NR Description: hypothetical protein [Picea mariana]
  misc_feature (63)..(108): NCBI GI NO: 15221634 NR Description: hypothetical protein [Arabidopsis thaliana]
  misc_feature (16)..(131): NCBI GI NO: 27691986 NR Description: similar to hypothetical protein HSPC014
MESQKKIAHEIGGMKNDALRFGLHGVKSDILRSHPLETAYESGKQSQEEMKRRVITHTYGAALPLKMDLDRQILSRFQRPPGPIPSSMLGLEVYTGALDNFGFEDYLNDPRESETLKPVDFHHGMEVRLGLSKGPASPSFM

SEQ ID NO: 2779 - protein, 128 aa, Arabidopsis thaliana
  peptide (1)..(128): Ceres Seq. ID no. 13489649
  misc_feature (1)..(119): Pfam Name: Pfam Description:  Proteasome maturation factor UMP1
  misc_feature (1)..(128): NCBI GI NO: 15240969 NR Description: expressed protein [Arabidopsis thaliana]
  misc_feature (1)..(128): NCBI GI NO: 18408726 NR Description: expressed protein [Arabidopsis thaliana]
  misc_feature (1)..(128): NCBI GI NO: 9828633 NR Description: F1N21.7 [Arabidopsis thaliana]
  misc_feature (1)..(128): NCBI GI NO: 25493097 NR Description: hypothetical protein [imported] - Picea mariana
  misc_feature (82)..(128): NCBI GI NO: 6049098 NR Description: unknown [Picea abies]
  misc_feature (83)..(128): NCBI GI NO: 2996130 NR Description: hypothetical protein [Picea mariana]
  misc_feature (83)..(128): NCBI GI NO: 2996132 NR Description: hypothetical protein [Picea mariana]
  misc_feature (83)..(128): NCBI GI NO: 2996128 NR Description: hypothetical protein [Picea mariana]
  misc_feature (50)..(95): NCBI GI NO: 15221634 NR Description: hypothetical protein [Arabidopsis thaliana]
  misc_feature (3)..(118): NCBI GI NO: 27691986 NR Description: similar to hypothetical protein HSPC014
MKNDALRFGLHGVKSDILRSHPLETAYESGKQSQEEMKRRVITHTYGAALPLKMDLDRQILSRFQRPPGPIPSSMLGLEVYTGALDNFGFEDYLNDPRESETLKPVDFHHGMEVRLGLSKGPASPSFM

SEQ ID NO: 2780 - protein, 92 aa, Arabidopsis thaliana
  peptide (1)..(92): Ceres Seq. ID no. 13489650
  misc_feature (1)..(83): Pfam Name: Pfam Description:  Proteasome maturation factor UMP1
  misc_feature (1)..(92): NCBI GI NO: 15240969 NR Description: expressed protein [Arabidopsis thaliana]
  misc_feature (1)..(92): NCBI GI NO: 18408726 NR Description: expressed protein [Arabidopsis thaliana]
  misc_feature (1)..(92): NCBI GI NO: 9828633 NR Description: F1N21.7 [Arabidopsis thaliana]
  misc_feature (1)..(92): NCBI GI NO: 25493097 NR Description: hypothetical protein [imported] - Picea mariana
  misc_feature (46)..(92): NCBI GI NO: 6049098 NR Description: unknown [Picea abies]
  misc_feature (47)..(92): NCBI GI NO: 2996130 NR Description: hypothetical protein [Picea mariana]
  misc_feature (47)..(92): NCBI GI NO: 2996132 NR Description: hypothetical protein [Picea mariana]
  misc_feature (47)..(92): NCBI GI NO: 2996128 NR Description: hypothetical protein [Picea mariana]
  misc_feature (14)..(59): NCBI GI NO: 15221634 NR Description: hypothetical protein [Arabidopsis thaliana]
  misc_feature (1)..(82): NCBI GI NO: 27691986 NR Description: similar to hypothetical protein HSPC014
MKRRVITHTYGAALPLKMDLDRQILSRFQRPPGPIPSSMLGLEVYTGALDNFGFEDYLNDPRESETLKPVDFHHGMEVRLGLSKGPASPSFM

SEQ ID NO: 2781 - DNA, 1148 bp, Arabidopsis thaliana
  misc_feature (1)..(1148): Ceres Seq. ID no. 12577151
atcgtcgataaagcaaaaaatcaaatcaagcttcttcttcgatcttcttcttcgatcttcttcctctcgtcaggtttcgtgtggttcgttctaatcgcgttgtattctttctccaaggaagatggctctaaaggaacagctagataaattcaacaaacagcaagtgaaatgccaatctactctttcgagcattgcttcttccagagaaagaacgagttcttcgaggcagaatgtgcctttgcctgcggcaatcacgcagaagaagcctgatgcagctcctgtcaagttttcaagcgataccgagcgacttcagaacattaacaacattagaaaagctcctgttggagctcaaatcaagcgtgtcattgatcttctctatgagagaaggctagccttgacgccagagcaaataaatgaatggtgtcatgtagatatgcatgctaataaggctgtttttgatagtttaaggaagaatccgaaagcacattatgatggaagaaggttctcttataaggctacgcacgatgttaatgataagaaccagcttctttcattggtgagaaaataccttgatgggattgcggtggttgatctcaaagacgcttaccctaatgtaatggaggatttgaaggctctgagtgcttcaggggacatctacttgctatcaaattcacaagaggacattgcatacccaaatgatttcaagtgtgagattaaggttgatgacgaatttaaagctctattccgtgacataaacatcccgaacgacatgctggacgtggagaaggagctgctgaaaatcggtttgaagccggcgacaaacactgcagagaggagagctgctgcacagacgcatggcatatcgaataaaccaaaggataagaagaagaagaaacaagagatcagcaagagaaccaaactcaccaatgcccatcttcccgagcttttccagaaccttaacggcagcagttcccggaactgaacctcataaatggatgatcatgcggttctaaattcatattgagcctgaattttcttgtaattgtaataattgttacaatctttagtttacaaattacaatgattctcatgtattctcacgacatttgctagaaatatagaataaacacatttgggagttgggtctt

SEQ ID NO: 2782 - protein, 286 aa, Arabidopsis thaliana
  peptide (1)..(286): Ceres Seq. ID no. 12577152
  misc_feature (1)..(286): NCBI GI NO: 15235379 NR Description: putative protein; protein id: At4g20330
  misc_feature (1)..(278): NCBI GI NO: 15233477 NR Description: putative protein; protein id: At4g21010.1
  misc_feature (1)..(276): NCBI GI NO: 39545898 NR Description: TFIIE-beta 1 [Arabidopsis thaliana]
  misc_feature (1)..(280): NCBI GI NO: 37534050 NR Description: putative Transcription initiation factor IIE
  misc_feature (59)..(281): NCBI GI NO: 19074285 NR Description: TRANSCRIPTION INITIATION FACTOR TFIIE BETA SUBUNIT
MALKEQLDKFNKQQVKCQSTLSSIASSRERTSSSRQNVPLPAAITQKKPDAAPVKFSSDTERLQNINNIRKAPVGAQIKRVIDLLYERRLALTPEQINEWCHVDMHANKAVFDSLRKNPKAHYDGRRFSYKATHDVNDKNQLLSLVRKYLDGIAVVDLKDAYPNVMEDLKALSASGDIYLLSNSQEDIAYPNDFKCEIKVDDEFKALFRDINIPNDMLDVEKELLKIGLKPATNTAERRAAAQTHGISNKPKDKKKKKQEISKRTKLTNAHLPELFQNLNGSSSRN

SEQ ID NO: 2783 - protein, 182 aa, Arabidopsis thaliana
  peptide (1)..(182): Ceres Seq. ID no. 12577153
  misc_feature (1)..(182): NCBI GI NO: 15235379 NR Description: putative protein; protein id: At4g20330
  misc_feature (1)..(174): NCBI GI NO: 15233477 NR Description: putative protein; protein id: At4g21010.1
  misc_feature (1)..(172): NCBI GI NO: 39545898 NR Description: TFIIE-beta 1 [Arabidopsis thaliana]
  misc_feature (1)..(176): NCBI GI NO: 37534050 NR Description: putative Transcription initiation factor IIE
  misc_feature (1)..(177): NCBI GI NO: 19074285 NR Description: TRANSCRIPTION INITIATION FACTOR TFIIE BETA SUBUNIT
MHANKAVFDSLRKNPKAHYDGRRFSYKATHDVNDKNQLLSLVRKYLDGIAVVDLKDAYPNVMEDLKALSASGDIYLLSNSQEDIAYPNDFKCEIKVDDEFKALFRDINIPNDMLDVEKELLKIGLKPATNTAERRAAAQTHGISNKPKDKKKKKQEISKRTKLTNAHLPELFQNLNGSSSRN

SEQ ID NO: 2784 - DNA, 1093 bp, Arabidopsis thaliana
  misc_feature (1)..(1093): Ceres Seq. ID no. 13509083
gttagctgcgaaacaagatgctgttacagtcatagaagtcttatgcgtacacgactccgatttcaaaatctgaacggaatataaactctcgacgacgaaaatctcaaaatccccaaaatctcctccaactccgagttatggctacatgttccctcttaccaccaccgtctttttctccgcgccggcgattctgtagtttttctcacaatcgccggtctctaccttcaatattcagtttcaacaaagagcgtgtctcacgaagagtcttctgtagctccaaagagaacgatataaacagagatcggaatcagtctacaggaattcaagtctacggcgaaatcgagaggttattaacagagactgtaaaaaattctcagagtagctccggtggatcctctgattggtcagaagttgagggagcatgggtgctgaaaccaagaaactcgaaaccgaagatggtttgttcatttcattggcggtatatttgtcggtgcagcaccacagcttacttatcgattgtttctcgagagattagcggagaagagawgattttgttccaaaaccagaagaaacaagacgccttataagatcctactatggaayctctaggaatctgttgataaaattcgaggatgattcaatagatgaaacatcaatcctagctcaggtgcttggtgtggaatcatccataagctcaaagctagacatgtctatccgtacactgcccggagatcacggtctccctctgcaacaggctcttccggatgttccaccaggaatggcagaagcggtgaatcgaggaagtgagtttttagcgaatattgctgtcgggactccgagggaatctatggctaaagaggttggaggttcgctgggaatggactcgaagatccttcgtgctgacatgtccaaagatcttgcgcagctcgttgatgcaatcacttcttggatgatttcaaatatgggtccaaagcttctgagaccataatgttttctcatgtacacaaaacatacaaaaatctattaacacagggcgattgcatactatttaatgtaatgtaactgtatatattataacatgaagagtttggtc

SEQ ID NO: 2785 - protein, 149 aa, Arabidopsis thaliana
  peptide (1)..(149): Ceres Seq. ID no. 15222823
  misc_feature (1)..(111): NCBI GI NO: 15238825 NR Description: expressed protein [Arabidopsis thaliana]
  misc_feature (8)..(111): NCBI GI NO: 38347589 NR Description: OSJNBa0042I15.2
  misc_feature (137)..(137): Xaa is any aa, unknown or other
MATCSLLPPPSFSPRRRFCSFSHNRRSLPSIFSFNKERVSRRVFCSSKENDINRDRNQSTGIQVYGEIERLLTETVKNSQSSSGGSSDWSEVEGAWVLKPRNSKPKMVCSFHWRYICRCSTTAYLSIVSREISGEEXILFQNQKKQDAL

SEQ ID NO: 2786 - protein, 93 aa, Arabidopsis thaliana
  peptide (1)..(93): Ceres Seq. ID no. 15222824
  misc_feature (1)..(93): NCBI GI NO: 15238825 NR Description: expressed protein [Arabidopsis thaliana]
  misc_feature (1)..(92): NCBI GI NO: 38347589 NR Description: OSJNBa0042I15.2
  misc_feature (1)..(80): NCBI GI NO: 38569178 NR Description: OJ000315_02.20
  misc_feature (1)..(18): NCBI GI NO: 22300018 NR Description: ORF_ID:tll2476~hypothetical protein
  misc_feature (1)..(16): NCBI GI NO: 17228580 NR Description: hypothetical protein [Nostoc sp. PCC 7120]
  misc_feature (1)..(16): NCBI GI NO: 16329812 NR Description: hypothetical protein [Synechocystis sp. PCC 6803]
  misc_feature (1)..(18): NCBI GI NO: 23039808 NR Description: hypothetical protein
MSIRTLPGDHGLPLQQALPDVPPGMAEAVNRGSEFLANIAVGTPRESMAKEVGGSLGMDSKILRADMSKDLAQLVDAITSWMISNMGPKLLRP

SEQ ID NO: 2787 - DNA, 864 bp, Arabidopsis thaliana
  misc_feature (1)..(864): Ceres Seq. ID no. 13509088
tctgttgttgattcgcaaaggcgaagattatccatcttctcagttactcctactggaaccaaaagctcagaaccttaaaacatggagtctctatctcttcccgttctaaatcctctgttagcttctggttctaatctttttagaaaccagcactcgaggatgacctcttcaatggtatcttcacttaaatcccccattggaggcacatcgctctccactgttcgtcgctttggagtaggtgttgttaggatgcaagctgttgatgaagatattgatttgaagcaaatgagagacatagctgctgctaaaaagcgttgggatggtttgttaagggaaggaaaagtgaagcttcttacaccaagagaagcaggctatgctatttctctttcaaacaaacctctccttgatgttcgtccctctagcgagcgcaacaaggcatggattaaaggctccacttgggttcctatcttcgacaatgatgacaaccttgacgctggaactctttccaaaaaagtcactagttttgctatggggggatggtggagtggagcacctacactatcttttaataggtatgtctgcgagaggtatgagaatctgttctgggtacaaggtggtttagaatctgctcaagacgaggatctagtgacagaaggtgtccaacccttgaagcttgctggtattggaggtttttcagagttcctcggttggacagaccagcaaagagctcaagctgcgaaagaaggttgggggtaccgtttggtatatactgctcgtctgtttggagttgttctggctgctgatgctttgttcgttggggctcagcaactaggccattatattcaggagttaagaggccattag

SEQ ID NO: 2788 - protein, 260 aa, Arabidopsis thaliana
  peptide (1)..(260): Ceres Seq. ID no. 13509089
  misc_feature (1)..(260): NCBI GI NO: 15233950 NR Description: expressed protein [Arabidopsis thaliana]
MESLSLPVLNPLLASGSNLFRNQHSRMTSSMVSSLKSPIGGTSLSTVRRFGVGVVRMQAVDEDIDLKQMRDIAAAKKRWDGLLREGKVKLLTPREAGYAISLSNKPLLDVRPSSERNKAWIKGSTWVPIFDNDDNLDAGTLSKKVTSFAMGGWWSGAPTLSFNRYVCERYENLFWVQGGLESAQDEDLVTEGVQPLKLAGIGGFSEFLGWTDQQRAQAAKEGWGYRLVYTARLFGVVLAADALFVGAQQLGHYIQELRGH

SEQ ID NO: 2789 - protein, 234 aa, Arabidopsis thaliana
  peptide (1)..(234): Ceres Seq. ID no. 13509090
  misc_feature (1)..(234): NCBI GI NO: 15233950 NR Description: expressed protein [Arabidopsis thaliana]
MTSSMVSSLKSPIGGTSLSTVRRFGVGVVRMQAVDEDIDLKQMRDIAAAKKRWDGLLREGKVKLLTPREAGYAISLSNKPLLDVRPSSERNKAWIKGSTWVPIFDNDDNLDAGTLSKKVTSFAMGGWWSGAPTLSFNRYVCERYENLFWVQGGLESAQDEDLVTEGVQPLKLAGIGGFSEFLGWTDQQRAQAAKEGWGYRLVYTARLFGVVLAADALFVGAQQLGHYIQELRGH

SEQ ID NO: 2790 - protein, 230 aa, Arabidopsis thaliana
  peptide (1)..(230): Ceres Seq. ID no. 13509091
  misc_feature (1)..(230): NCBI GI NO: 15233950 NR Description: expressed protein [Arabidopsis thaliana]
MVSSLKSPIGGTSLSTVRRFGVGVVRMQAVDEDIDLKQMRDIAAAKKRWDGLLREGKVKLLTPREAGYAISLSNKPLLDVRPSSERNKAWIKGSTWVPIFDNDDNLDAGTLSKKVTSFAMGGWWSGAPTLSFNRYVCERYENLFWVQGGLESAQDEDLVTEGVQPLKLAGIGGFSEFLGWTDQQRAQAAKEGWGYRLVYTARLFGVVLAADALFVGAQQLGHYIQELRGH

SEQ ID NO: 2791 - DNA, 1808 bp, Arabidopsis thaliana
  misc_feature (1)..(1808): Ceres Seq. ID no. 13509124
aaaaaaattaatcttcttctacactccaaaaattcaagacctttcagagacaaaaacgtgaaacaacacaacttcgatgaaagccgccgttttccgtaacgaagacggagacgaggaggaggaagaagaagaagaagaagaagtctgtaatgttttcgacggcggcgaggtagagtctaagagaaacaacgaaaccaaaaacctcaaaggatttttcacttctttgcttttgatggaggagcacgagaagcaagaccaggaagctcgtaacgctgcttctcgccgtgaaatgtctgattttcaatctaattaccggaaaagagctagaactatgtccgattactactccgatctcaacgattactacgctgatgctgaggaaagtggagatatcaatctgaagaagtcacgcgtctcacgcgccgtcgcttccgttgctgttgctgctgcttcggagattgaggcggagagcagtgagataaccggatccggatcggttcgtggtaccggttcgggtcagcaaagacggttatgggttaaagatcggagcagagcttggtgggaagagtgtagccgattggattatccagaagaagatttcaaaaaagcgtttcgaatgtctaaatcaacgtttgagttaatctgcgatgagcttaattcagcggttgctaaagaagacaccgcgttaagaaacgcgattccagtgcgtcagcgagtcgcggtttgtatatggagattagccaccggtgagccacttcgtcttgtctccaagaagtttggtttaggaatctcaacttgtcacaagcttgttcttgaggtatgtaaagctattaaggacgttttaatgcctaagtatcttcaatggccagatgatgaatctcttagaaacattagagaacgtttcgaatcggtttcgggtattccaaacgttgttggctctatgtatactactcacattccgattatagctcctaagattagtgtagcctcttatttcaataagaggcatactgagaggaaccagaagacgtcgtattcgattacaattcaagccgttgtgaacccgaaaggtgtttttactgacttgtgcatcggatggcccgggtcaatgccggatgataaggtgttagagaagtcattgttgtatcaaagagctaacaatggaggtttgttgaaggggatgtgggttgctggtggaccgggtcatccgttgttggactgggttttggttccgtatacgcaacagaacttgacgtggacgcagcatgcgtttaatgagaagatgagcgaagtgcagggagtggctaaggaagcgtttgggaggttgaaagggcggtgggcgtgtctgcagaaacggactgaagtgaagctgcaggatttgcctaccgttttgggtgcttgttgtgtgcttcacaacatatgtgaaatgagagaggagaagatggagccagagctgatggttgaagtgattgatgatgaggttttgcctgaaaacgtattgagatcggttaatgcgatgaaggctagagatactatctcacataatctattgcatcacggcctcgcgggtacttctttcctataaaggataatggaaatgttcttttaatttccttctatatgataaactaaacttactttgattctttggtttatgcataatgtattattgtacctttagatcacagatgttatatgaggcaatagaagaaaattaaattatatacacatactatacatttatttccagtctcttttgatgagtgttagacatgaatgtataataagctcaatgagattttcattcg

SEQ ID NO: 2792 - protein, 502 aa, Arabidopsis thaliana
  peptide (1)..(502): Ceres Seq. ID no. 13509125
  misc_feature (1)..(502): NCBI GI NO: 15239835 NR Description: expressed protein [Arabidopsis thaliana]
  misc_feature (29)..(501): NCBI GI NO: 21902022 NR Description: B1097D05.23
  misc_feature (6)..(502): NCBI GI NO: 21592524 NR Description: unknown [Arabidopsis thaliana]
  misc_feature (6)..(502): NCBI GI NO: 7452044 NR Description: hypothetical protein F27B13
  misc_feature (6)..(502): NCBI GI NO: 30688449 NR Description: expressed protein [Arabidopsis thaliana]
  misc_feature (101)..(501): NCBI GI NO: 34906342 NR Description: unnamed protein product
  misc_feature (157)..(459): NCBI GI NO: 15233248 NR Description: expressed protein [Arabidopsis thaliana]
  misc_feature (161)..(448): NCBI GI NO: 18412695 NR Description: expressed protein [Arabidopsis thaliana]
  misc_feature (173)..(488): NCBI GI NO: 25553597 NR Description: OJ1656_E11.28
  misc_feature (161)..(448): NCBI GI NO: 34908114 NR Description: P0031D11.14
MKAAVFRNEDGDEEEEEEEEEEVCNVFDGGEVESKRNNETKNLKGFFTSLLLMEEHEKQDQEARNAASRREMSDFQSNYRKRARTMSDYYSDLNDYYADAEESGDINLKKSRVSRAVASVAVAAASEIEAESSEITGSGSVRGTGSGQQRRLWVKDRSRAWWEECSRLDYPEEDFKKAFRMSKSTFELICDELNSAVAKEDTALRNAIPVRQRVAVCIWRLATGEPLRLVSKKFGLGISTCHKLVLEVCKAIKDVLMPKYLQWPDDESLRNIRERFESVSGIPNVVGSMYTTHIPIIAPKISVASYFNKRHTERNQKTSYSITIQAVVNPKGVFTDLCIGWPGSMPDDKVLEKSLLYQRANNGGLLKGMWVAGGPGHPLLDWVLVPYTQQNLTWTQHAFNEKMSEVQGVAKEAFGRLKGRWACLQKRTEVKLQDLPTVLGACCVLHNICEMREEKMEPELMVEVIDDEVLPENVLRSVNAMKARDTISHNLLHHGLAGTSFL

SEQ ID NO: 2793 - protein, 450 aa, Arabidopsis thaliana
  peptide (1)..(450): Ceres Seq. ID no. 13509126
  misc_feature (1)..(450): NCBI GI NO: 15239835 NR Description: expressed protein [Arabidopsis thaliana]
  misc_feature (1)..(449): NCBI GI NO: 21902022 NR Description: B1097D05.23
  misc_feature (1)..(450): NCBI GI NO: 21592524 NR Description: unknown [Arabidopsis thaliana]
  misc_feature (1)..(450): NCBI GI NO: 7452044 NR Description: hypothetical protein F27B13
  misc_feature (1)..(450): NCBI GI NO: 30688449 NR Description: expressed protein [Arabidopsis thaliana]
  misc_feature (49)..(449): NCBI GI NO: 34906342 NR Description: unnamed protein product
  misc_feature (105)..(407): NCBI GI NO: 15233248 NR Description: expressed protein [Arabidopsis thaliana]
  misc_feature (109)..(396): NCBI GI NO: 18412695 NR Description: expressed protein [Arabidopsis thaliana]
  misc_feature (121)..(436): NCBI GI NO: 25553597 NR Description: OJ1656_E11.28
  misc_feature (109)..(396): NCBI GI NO: 34908114 NR Description: P0031D11.14
MEEHEKQDQEARNAASRREMSDFQSNYRKRARTMSDYYSDLNDYYADAEESGDINLKKSRVSRAVASVAVAAASEIEAESSEITGSGSVRGTGSGQQRRLWVKDRSRAWWEECSRLDYPEEDFKKAFRMSKSTFELICDELNSAVAKEDTALRNAIPVRQRVAVCIWRLATGEPLRLVSKKFGLGISTCHKLVLEVCKAIKDVLMPKYLQWPDDESLRNIRERFESVSGIPNVVGSMYTTHIPIIAPKISVASYFNKRHTERNQKTSYSITIQAVVNPKGVFTDLCIGWPGSMPDDKVLEKSLLYQRANNGGLLKGMWVAGGPGHPLLDWVLVPYTQQNLTWTQHAFNEKMSEVQGVAKEAFGRLKGRWACLQKRTEVKLQDLPTVLGACCVLHNICEMREEKMEPELMVEVIDDEVLPENVLRSVNAMKARDTISHNLLHHGLAGTSFL

SEQ ID NO: 2794 - protein, 431 aa, Arabidopsis thaliana
  peptide (1)..(431): Ceres Seq. ID no. 13509127
  misc_feature (1)..(431): NCBI GI NO: 15239835 NR Description: expressed protein [Arabidopsis thaliana]
  misc_feature (1)..(430): NCBI GI NO: 21902022 NR Description: B1097D05.23
  misc_feature (1)..(431): NCBI GI NO: 21592524 NR Description: unknown [Arabidopsis thaliana]
  misc_feature (1)..(431): NCBI GI NO: 7452044 NR Description: hypothetical protein F27B13
  misc_feature (1)..(431): NCBI GI NO: 30688449 NR Description: expressed protein [Arabidopsis thaliana]
  misc_feature (30)..(430): NCBI GI NO: 34906342 NR Description: unnamed protein product
  misc_feature (86)..(388): NCBI GI NO: 15233248 NR Description: expressed protein [Arabidopsis thaliana]
  misc_feature (90)..(377): NCBI GI NO: 18412695 NR Description: expressed protein [Arabidopsis thaliana]
  misc_feature (102)..(417): NCBI GI NO: 25553597 NR Description: OJ1656_E11.28
  misc_feature (90)..(377): NCBI GI NO: 34908114 NR Description: P0031D11.14
MSDFQSNYRKRARTMSDYYSDLNDYYADAEESGDINLKKSRVSRAVASVAVAAASEIEAESSEITGSGSVRGTGSGQQRRLWVKDRSRAWWEECSRLDYPEEDFKKAFRMSKSTFELICDELNSAVAKEDTALRNAIPVRQRVAVCIWRLATGEPLRLVSKKFGLGISTCHKLVLEVCKAIKDVLMPKYLQWPDDESLRNIRERFESVSGIPNVVGSMYTTHIPIIAPKISVASYFNKRHTERNQKTSYSITIQAVVNPKGVFTDLCIGWPGSMPDDKVLEKSLLYQRANNGGLLKGMWVAGGPGHPLLDWVLVPYTQQNLTWTQHAFNEKMSEVQGVAKEAFGRLKGRWACLQKRTEVKLQDLPTVLGACCVLHNICEMREEKMEPELMVEVIDDEVLPENVLRSVNAMKARDTISHNLLHHGLAGTSFL

SEQ ID NO: 2795 - DNA, 939 bp, Arabidopsis thaliana
  misc_feature (1)..(939): Ceres Seq. ID no. 12390589
ataacaaaccagggtcagggttttatcttccatattcttttcccactgattcttacaatcgatctaagggaatctacgaactgtttggtaatttctggtgggaaaagtcttgatcttgctgtttggtttggagtaatggtgagtgcttggtttgttgttggctcaccggtgatggactcttcgagcagtccatgtttatgtctggatgctcacacgacgggtaccatcaggaggaagaagatccttggcaaagcaagaaatctggaattaggaagctctttcactggctcacgcattgtttttaggctttctccgaagcgtgtatcgagaattgcgaatcgaaagagcaaaaagctcttgattgtgaatgaggatgttgctggtaattacgacgataccttcggtgatgtacaaaagcaaattgttaattattttacatacaaagctgtgaggacggttcttcatcagctgtacgaaatgaatcctcctcaatacacttggttctataatcatatcataacaaacagaccgacggatggcaaacgtttcctccgtgccctcggcaaggagagtcaggagcttgcagaaagagtgatgatcacgcgtcttcacttgtatggcaaatggatcaagaaatgcgaccatgggaagatataccaggaaatatcggatgaaaacttggcgttgatgcgtgaacgcctgatggagaccgtgatatggccttccgatgacacaaactcaaggtaataggctgaagaagacagcgcacaccacagcacaacatttgctttgtcaatttgcttctcagtttttaggacttcgagttttttagtttgattacatattactatagtgaaagagcagtgtgtatatgatgtctattcttggcatgtactatatgatattaggggcaaaaaacaacacccttcttgtgctcct

SEQ ID NO: 2796 - protein, 248 aa, Arabidopsis thaliana
  peptide (1)..(248): Ceres Seq. ID no. 12390590
  misc_feature (139)..(205): Pfam Name: Pfam Description:  RbcX protein
  misc_feature (46)..(248): NCBI GI NO: 18420050 NR Description: Expressed protein; protein id: At5g19855
  misc_feature (83)..(247): NCBI GI NO: 30103018 NR Description: unknown protein
  misc_feature (106)..(247): NCBI GI NO: 33146778 NR Description: unknown protein
  misc_feature (136)..(205): NCBI GI NO: 23040626 NR Description: hypothetical protein
  misc_feature (139)..(205): NCBI GI NO: 22299048 NR Description: ORF_ID:tll1505~hypothetical protein
  misc_feature (136)..(205): NCBI GI NO: 2463339 NR Description: putative [Planktothrix agardhii]
  misc_feature (136)..(205): NCBI GI NO: 2463391 NR Description: putative [Planktothrix rubescens]
  misc_feature (136)..(205): NCBI GI NO: 2126547 NR Description: rbcX protein - Anabaena sp
  misc_feature (136)..(205): NCBI GI NO: 541323 NR Description: hypothetical 15.2K protein - Anabaena sp
  misc_feature (136)..(205): NCBI GI NO: 2463298 NR Description: putative [Nostoc commune]
ITNQGQGFIFHILFPLILTIDLRESTNCLVISGGKSLDLAVWFGVMVSAWFVVGSPVMDSSSSPCLCLDAHTTGTIRRKKILGKARNLELGSSFTGSRIVFRLSPKRVSRIANRKSKKLLIVNEDVAGNYDDTFGDVQKQIVNYFTYKAVRTVLHQLYEMNPPQYTWFYNHIITNRPTDGKRFLRALGKESQELAERVMITRLHLYGKWIKKCDHGKIYQEISDENLALMRERLMETVIWPSDDTNSR

SEQ ID NO: 2797 - protein, 203 aa, Arabidopsis thaliana
  peptide (1)..(203): Ceres Seq. ID no. 12390591
  misc_feature (94)..(160): Pfam Name: Pfam Description:  RbcX protein
  misc_feature (1)..(203): NCBI GI NO: 18420050 NR Description: Expressed protein; protein id: At5g19855
  misc_feature (38)..(202): NCBI GI NO: 30103018 NR Description: unknown protein
  misc_feature (61)..(202): NCBI GI NO: 33146778 NR Description: unknown protein
  misc_feature (91)..(160): NCBI GI NO: 23040626 NR Description: hypothetical protein
  misc_feature (94)..(160): NCBI GI NO: 22299048 NR Description: ORF_ID:tll1505~hypothetical protein
  misc_feature (91)..(160): NCBI GI NO: 2463339 NR Description: putative [Planktothrix agardhii]
  misc_feature (91)..(160): NCBI GI NO: 2463391 NR Description: putative [Planktothrix rubescens]
  misc_feature (91)..(160): NCBI GI NO: 2126547 NR Description: rbcX protein - Anabaena sp
  misc_feature (91)..(160): NCBI GI NO: 541323 NR Description: hypothetical 15.2K protein - Anabaena sp
  misc_feature (91)..(160): NCBI GI NO: 2463298 NR Description: putative [Nostoc commune]
MVSAWFVVGSPVMDSSSSPCLCLDAHTTGTIRRKKILGKARNLELGSSFTGSRIVFRLSPKRVSRIANRKSKKLLIVNEDVAGNYDDTFGDVQKQIVNYFTYKAVRTVLHQLYEMNPPQYTWFYNHIITNRPTDGKRFLRALGKESQELAERVMITRLHLYGKWIKKCDHGKIYQEISDENLALMRERLMETVIWPSDDTNSR

SEQ ID NO: 2798 - protein, 191 aa, Arabidopsis thaliana
  peptide (1)..(191): Ceres Seq. ID no. 12390592
  misc_feature (82)..(148): Pfam Name: Pfam Description:  RbcX protein
  misc_feature (1)..(191): NCBI GI NO: 18420050 NR Description: Expressed protein; protein id: At5g19855
  misc_feature (26)..(190): NCBI GI NO: 30103018 NR Description: unknown protein
  misc_feature (49)..(190): NCBI GI NO: 33146778 NR Description: unknown protein
  misc_feature (79)..(148): NCBI GI NO: 23040626 NR Description: hypothetical protein
  misc_feature (82)..(148): NCBI GI NO: 22299048 NR Description: ORF_ID:tll1505~hypothetical protein
  misc_feature (79)..(148): NCBI GI NO: 2463339 NR Description: putative [Planktothrix agardhii]
  misc_feature (79)..(148): NCBI GI NO: 2463391 NR Description: putative [Planktothrix rubescens]
  misc_feature (79)..(148): NCBI GI NO: 2126547 NR Description: rbcX protein - Anabaena sp
  misc_feature (79)..(148): NCBI GI NO: 541323 NR Description: hypothetical 15.2K protein - Anabaena sp
  misc_feature (79)..(148): NCBI GI NO: 2463319 NR Description: putative [Nostoc sp.]
MDSSSSPCLCLDAHTTGTIRRKKILGKARNLELGSSFTGSRIVFRLSPKRVSRIANRKSKKLLIVNEDVAGNYDDTFGDVQKQIVNYFTYKAVRTVLHQLYEMNPPQYTWFYNHIITNRPTDGKRFLRALGKESQELAERVMITRLHLYGKWIKKCDHGKIYQEISDENLALMRERLMETVIWPSDDTNSR

SEQ ID NO: 2799 - DNA, 1413 bp, Arabidopsis thaliana
  misc_feature (1)..(1413): Ceres Seq. ID no. 13509128
gcagtgtgttttcttacagcgaagagccccaaagagaagaacaaaatttcgaaaatagagaaagagaagaagttgacgatggattcaaaggcgaagcagatgattctttcagctctctgcaaacacttctctttggatcctgaaccttttgtgggcggagcgggtgaaagtgatatcaagacactttattctaatgtattgaaggcatctggaaaggaagtatctgcacaaaacaacgatgttttgaagtggctagattttgcggaaggtttctcttcagattcaaaggattggttttcagctcttgaaaagttgaatttagagttagctaccaagtcagtgctcttgggaaacggattgacgccatcggcagctgatgttgctgtgttttcagctctgcattcttcagtgcttggcctctcagattcagacaaggagaaagtaccacatgtcataagatgggtgaattacatccagaataaagaagagttgtcgacattatttgcaccaatacctgtgaagctaccagaatttagcttcgaggtaccaaaacctgccattaaggtggaaacaaattctaattcaaaaaaagctgcagaaggtgtaaagcctgttgacaagccagatgtgcagccgcagctgggcacaaagaaaactgagccagaggaaccaaagaaaaatgcagcaaaagagaaggatgccaaaaaggaaaagaagaagcctgctgaaccagaaccagctaagaaagaggcagagcttagtgtcagtttgcttaacattcaggttggtctaattcgtaaagcatggaagcacccatcggcggatagtttgctggtggaagaaatagatgtcggggaggataaagtgagacaagtagttagtggcttagcaaagttctgcagtcctgaggatctaacgaaccgcctcgttgcactcatcacaaatgtcaaacctggaaagctaagagatgtaatgtcacaaggactggttctttgtgcttcaagtgaagatcactcggtggtagagccgttgctaccacctgctggtgctaaaccaggagagcgtgtttcattttcagggattgaaggaaagccagaagatgtactgaacccaaaaaagaagcaactagagaagataacaccgggtctctacactgatgaaaatggcgtagccacatacaaaggcatacaattcatgacctcggctggaccttgcacttccagcatccccaaggcgaccatcaagtagtaaactcagttgatacttctctcctctactctagcgtttttctttgatattcgcaaactcagttggaaaaagaaaagatgttctttttgtcacaattcgaattaatctaaaaactttcttcttattagctttttgacaaacatcattgtttcaatttccgttttg

SEQ ID NO: 2800 - protein, 415 aa, Arabidopsis thaliana
  peptide (1)..(415): Ceres Seq. ID no. 13509129
  misc_feature (260)..(355): Pfam Name: Pfam Description:  Putative tRNA binding domain
  misc_feature (1)..(415): NCBI GI NO: 25408718 NR Description: probable methionyl-tRNA synthetase
  misc_feature (27)..(415): NCBI GI NO: 18405465 NR Description: methionyl-tRNA synthetase -related
  misc_feature (188)..(415): NCBI GI NO: 34907808 NR Description: similar to methionyl-tRNA synthetase
  misc_feature (81)..(394): NCBI GI NO: 19115568 NR Description: putative Cofactor for methionyl-and glutamyl-tRNAsynthetases and
  misc_feature (227)..(415): NCBI GI NO: 15236350 NR Description: methionyl-tRNA synthetase - like protein
  misc_feature (161)..(410): NCBI GI NO: 28302254 NR Description: Similar to small inducible cytokine subfamily E
  misc_feature (211)..(415): NCBI GI NO: 12230649 NR Description: Probable methionyl-tRNA synthetase
  misc_feature (175)..(405): NCBI GI NO: 26352830 NR Description: unnamed protein product [Mus musculus]
  misc_feature (215)..(405): NCBI GI NO: 1082350 NR Description: endothelial monocyte-activating protein II precursor -human
  misc_feature (222)..(405): NCBI GI NO: 34860578 NR Description: endothelial monocyte activating polypeptide 2
AVCFLTAKSPKEKNKISKIEKEKKLTMDSKAKQMILSALCKHFSLDPEPFVGGAGESDIKTLYSNVLKASGKEVSAQNNDVLKWLDFAEGFSSDSKDWFSALEKLNLELATKSVLLGNGLTPSAADVAVFSALHSSVLGLSDSDKEKVPHVIRWVNYIQNKEELSTLFAPIPVKLPEFSFEVPKPAIKVETNSNSKKAAEGVKPVDKPDVQPQLGTKKTEPEEPKKNAAKEKDAKKEKKKPAEPEPAKKEAELSVSLLNIQVGLIRKAWKHPSADSLLVEEIDVGEDKVRQVVSGLAKFCSPEDLTNRLVALITNVKPGKLRDVMSQGLVLCASSEDHSVVEPLLPPAGAKPGERVSFSGIEGKPEDVLNPKKKQLEKITPGLYTDENGVATYKGIQFMTSAGPCTSSIPKATIK

SEQ ID NO: 2801 - protein, 389 aa, Arabidopsis thaliana
  peptide (1)..(389): Ceres Seq. ID no. 13509130
  misc_feature (234)..(329): Pfam Name: Pfam Description:  Putative tRNA binding domain
  misc_feature (1)..(389): NCBI GI NO: 25408718 NR Description: probable methionyl-tRNA synthetase
  misc_feature (1)..(389): NCBI GI NO: 18405465 NR Description: methionyl-tRNA synthetase -related
  misc_feature (162)..(389): NCBI GI NO: 34907808 NR Description: similar to methionyl-tRNA synthetase
  misc_feature (55)..(368): NCBI GI NO: 19115568 NR Description: putative Cofactor for methionyl-and glutamyl-tRNAsynthetases and
  misc_feature (201)..(389): NCBI GI NO: 15236350 NR Description: methionyl-tRNA synthetase - like protein
  misc_feature (135)..(384): NCBI GI NO: 28302254 NR Description: Similar to small inducible cytokine subfamily E
  misc_feature (185)..(389): NCBI GI NO: 12230649 NR Description: Probable methionyl-tRNA synthetase
  misc_feature (149)..(379): NCBI GI NO: 26352830 NR Description: unnamed protein product [Mus musculus]
  misc_feature (189)..(379): NCBI GI NO: 1082350 NR Description: endothelial monocyte-activating protein II precursor -human
  misc_feature (196)..(379): NCBI GI NO: 34860578 NR Description: endothelial monocyte activating polypeptide 2
MDSKAKQMILSALCKHFSLDPEPFVGGAGESDIKTLYSNVLKASGKEVSAQNNDVLKWLDFAEGFSSDSKDWFSALEKLNLELATKSVLLGNGLTPSAADVAVFSALHSSVLGLSDSDKEKVPHVIRWVNYIQNKEELSTLFAPIPVKLPEFSFEVPKPAIKVETNSNSKKAAEGVKPVDKPDVQPQLGTKKTEPEEPKKNAAKEKDAKKEKKKPAEPEPAKKEAELSVSLLNIQVGLIRKAWKHPSADSLLVEEIDVGEDKVRQVVSGLAKFCSPEDLTNRLVALITNVKPGKLRDVMSQGLVLCASSEDHSVVEPLLPPAGAKPGERVSFSGIEGKPEDVLNPKKKQLEKITPGLYTDENGVATYKGIQFMTSAGPCTSSIPKATIK

SEQ ID NO: 2802 - protein, 382 aa, Arabidopsis thaliana
  peptide (1)..(382): Ceres Seq. ID no. 13509131
  misc_feature (227)..(322): Pfam Name: Pfam Description:  Putative tRNA binding domain
  misc_feature (1)..(382): NCBI GI NO: 25408718 NR Description: probable methionyl-tRNA synthetase
  misc_feature (1)..(382): NCBI GI NO: 18405465 NR Description: methionyl-tRNA synthetase -related
  misc_feature (155)..(382): NCBI GI NO: 34907808 NR Description: similar to methionyl-tRNA synthetase
  misc_feature (48)..(361): NCBI GI NO: 19115568 NR Description: putative Cofactor for methionyl-and glutamyl-tRNAsynthetases and
  misc_feature (194)..(382): NCBI GI NO: 15236350 NR Description: methionyl-tRNA synthetase - like protein
  misc_feature (128)..(377): NCBI GI NO: 28302254 NR Description: Similar to small inducible cytokine subfamily E
  misc_feature (178)..(382): NCBI GI NO: 12230649 NR Description: Probable methionyl-tRNA synthetase
  misc_feature (142)..(372): NCBI GI NO: 26352830 NR Description: unnamed protein product [Mus musculus]
  misc_feature (182)..(372): NCBI GI NO: 1082350 NR Description: endothelial monocyte-activating protein II precursor -human
  misc_feature (189)..(372): NCBI GI NO: 34860578 NR Description: endothelial monocyte activating polypeptide 2
MILSALCKHFSLDPEPFVGGAGESDIKTLYSNVLKASGKEVSAQNNDVLKWLDFAEGFSSDSKDWFSALEKLNLELATKSVLLGNGLTPSAADVAVFSALHSSVLGLSDSDKEKVPHVIRWVNYIQNKEELSTLFAPIPVKLPEFSFEVPKPAIKVETNSNSKKAAEGVKPVDKPDVQPQLGTKKTEPEEPKKNAAKEKDAKKEKKKPAEPEPAKKEAELSVSLLNIQVGLIRKAWKHPSADSLLVEEIDVGEDKVRQVVSGLAKFCSPEDLTNRLVALITNVKPGKLRDVMSQGLVLCASSEDHSVVEPLLPPAGAKPGERVSFSGIEGKPEDVLNPKKKQLEKITPGLYTDENGVATYKGIQFMTSAGPCTSSIPKATIK

SEQ ID NO: 2803 - DNA, 981 bp, Arabidopsis thaliana
  misc_feature (1)..(981): Ceres Seq. ID no. 12337818
atcacgatcaaaaatgccatagtacataaagtatccattaaaacgtagatctagtctcttcacaacacttcaactaataacgcaaaaatcagtttctctttgagtaagtgtttactacaattaaactaactcaggcaagtctatgatcatggcttcttctgctgctgcatcgatctctatgataactctaaggaacctctctcgcaatcatcaatctcaccaaagcactcttctcggtttctctagatccttccataaccaaaggatctcatctaacagtccaggtctctccacacgagcaagatccaccacttcctccactggaggtttcttcagaaccatttgcagcagcagcagcaacgacaactccagaccaactaagatccaagagcttaacgtctacgagttcaacgaaggtgatcgaaactccagcggttttaaaactagggaaaaaaccagatcagctttgtctcggagatcttgtccccttcacaaacaaactctacacaggagatctcacaaaacgcataggaatcaccgcaggtctctgcgttttgatccaacacgttccagagaagaaaggtgatcgctttgaagcttcttacagtttctacttcggagattacggtcacatatcagttcaaggaccttatctcacttacgaggatacgtttcttgctatcaccggtggctccggcgtgtttgaaggagcttacggacaggtcaagcttcgtcagcttgtgtatcctacgaagctgttttacactttttacttgaaaggtgttgctgctgatttaccggtggagcttaccgggaaacatgttgagccgtaaggaagtgaaaccggcggctgaagctcaggcgactcagcccggcgctacgatcgctaactttactaattgaaatctaaatctttgtgggtgtctttgtcatggatcttattgggctgttgttcattgtgtttacattttaataatgggc

SEQ ID NO: 2804 - protein, 147 aa, Arabidopsis thaliana
  peptide (1)..(147): Ceres Seq. ID no. 12337819
  misc_feature (1)..(96): NCBI GI NO: 15222241 NR Description: allene oxide cyclase, putative
  misc_feature (3)..(96): NCBI GI NO: 18404658 NR Description: expressed protein; protein id: At3g25780
  misc_feature (3)..(96): NCBI GI NO: 18404656 NR Description: expressed protein; protein id: At3g25770
  misc_feature (3)..(96): NCBI GI NO: 15230874 NR Description: hypothetical protein; protein id: At3g25760.1
  misc_feature (10)..(96): NCBI GI NO: 15320414 NR Description: ERD12 protein [Arabidopsis thaliana]
  misc_feature (6)..(109): NCBI GI NO: 40644132 NR Description: allene oxide cyclase [Medicago truncatula]
  misc_feature (7)..(109): NCBI GI NO: 23956574 NR Description: allene oxide cyclase [Solanum tuberosum]
MIMASSAAASISMITLRNLSRNHQSHQSTLLGFSRSFHNQRISSNSPGLSTRARSTTSSTGGFFRTICSSSSNDNSRPTKIQELNVYEFNEGDRNSSGFKTREKTRSALSRRSCPLHKQTLHRRSHKTHRNHRRSLRFDPTRSREER

SEQ ID NO: 2805 - protein, 145 aa, Arabidopsis thaliana
  peptide (1)..(145): Ceres Seq. ID no. 12337820
  misc_feature (1)..(94): NCBI GI NO: 15222241 NR Description: allene oxide cyclase, putative
  misc_feature (1)..(94): NCBI GI NO: 18404658 NR Description: expressed protein; protein id: At3g25780
  misc_feature (1)..(94): NCBI GI NO: 18404656 NR Description: expressed protein; protein id: At3g25770
  misc_feature (1)..(94): NCBI GI NO: 15230874 NR Description: hypothetical protein; protein id: At3g25760.1
  misc_feature (8)..(94): NCBI GI NO: 15320414 NR Description: ERD12 protein [Arabidopsis thaliana]
  misc_feature (4)..(107): NCBI GI NO: 40644132 NR Description: allene oxide cyclase [Medicago truncatula]
  misc_feature (5)..(107): NCBI GI NO: 23956574 NR Description: allene oxide cyclase [Solanum tuberosum]
MASSAAASISMITLRNLSRNHQSHQSTLLGFSRSFHNQRISSNSPGLSTRARSTTSSTGGFFRTICSSSSNDNSRPTKIQELNVYEFNEGDRNSSGFKTREKTRSALSRRSCPLHKQTLHRRSHKTHRNHRRSLRFDPTRSREER

SEQ ID NO: 2806 - protein, 135 aa, Arabidopsis thaliana
  peptide (1)..(135): Ceres Seq. ID no. 12337821
  misc_feature (1)..(84): NCBI GI NO: 15222241 NR Description: allene oxide cyclase, putative
  misc_feature (1)..(84): NCBI GI NO: 18404658 NR Description: expressed protein; protein id: At3g25780
  misc_feature (1)..(84): NCBI GI NO: 18404656 NR Description: expressed protein; protein id: At3g25770
  misc_feature (1)..(84): NCBI GI NO: 15230874 NR Description: hypothetical protein; protein id: At3g25760.1
  misc_feature (1)..(84): NCBI GI NO: 15320414 NR Description: ERD12 protein [Arabidopsis thaliana]
  misc_feature (1)..(97): NCBI GI NO: 40644132 NR Description: allene oxide cyclase [Medicago truncatula]
  misc_feature (1)..(97): NCBI GI NO: 23956574 NR Description: allene oxide cyclase [Solanum tuberosum]
MITLRNLSRNHQSHQSTLLGFSRSFHNQRISSNSPGLSTRARSTTSSTGGFFRTICSSSSNDNSRPTKIQELNVYEFNEGDRNSSGFKTREKTRSALSRRSCPLHKQTLHRRSHKTHRNHRRSLRFDPTRSREER

SEQ ID NO: 2807 - DNA, 1011 bp, Arabidopsis thaliana
  misc_feature (1)..(1011): Ceres Seq. ID no. 12738934
ctgtttctttttgcttccttagacttctccgtcgattaacccttgccgagggtcatttttttttcttgaattttttcaccaagtgttcgttcacggcattgcttgtcctccagtatgagtatctccggtgctgcagttggttcaggcagaaatttaagaagagcggtagagtttgggaaaactcatgtggttaggcctaaagggaaacatcaagcaactattgtctggttacatgggcttggggacaatggctcgagctggtcccagcttttggagacccttccccttccaaatatcaaatggatttgcccgactgctccttctcaaccaataagtttatttggtggttttccctccacagcttggtttgatgttgtggacatcaatgaagatggacctgatgatatggaaggattggatgtggctgctgcacatgttgcaaatctgttgtcgaatgagcctgctgacattaaattaggtgttggaggattcagcatgggtgcggcgacatctctatattctgcaacttgttttgctctcggtaaatatggaaatggcaatccataccctatcaatttaagcgcaatcataggcttaagcggctggcttccttgtgcaaagacattggctggcaaactagaagaggaacagatcaagaaccgagctgcatcgttacccattgttgtctgtcatggaaaagctgatgatgtggtaccgttcaagtttggggagaaatcttcacaggctttgctttcaaatgggtttaagaaggtgaccttcaaaccttacagtgcacttggtcaccacacaatcccacaggagttggatgagttgtgcgcatggttgacatccacgctcagcctcgaaggttgatacttcctatgatgtagctttctgatgaaaacccttcaactcttgagagtttgattgaattggatgtttcaggatttcacaatgttttcattggaatatttgtgtaagacacattcgtctagtagcaaatcttctccc

SEQ ID NO: 2808 - protein, 252 aa, Arabidopsis thaliana
  peptide (1)..(252): Ceres Seq. ID no. 12738935
  misc_feature (20)..(248): Pfam Name: Pfam Description:  Phospholipase/Carboxylesterase
  misc_feature (1)..(252): NCBI GI NO: 15241251 NR Description: putative protein; protein id: At5g20060
  misc_feature (1)..(250): NCBI GI NO: 34910274 NR Description: OSJNBa0089K24.24
  misc_feature (1)..(250): NCBI GI NO: 29409364 NR Description: biostress-resistance-related protein
  misc_feature (1)..(252): NCBI GI NO: 15232645 NR Description: putative lysophospholipase; protein id: At3g15650
  misc_feature (1)..(182): NCBI GI NO: 15219072 NR Description: unknown protein; protein id: At1g52700.1
  misc_feature (196)..(252): NCBI GI NO: 15219072 NR Description: unknown protein; protein id: At1g52700.1
  misc_feature (1)..(182): NCBI GI NO: 5903036 NR Description: F6D8.5 [Arabidopsis thaliana]
  misc_feature (196)..(225): NCBI GI NO: 5903036 NR Description: F6D8.5 [Arabidopsis thaliana]
  misc_feature (102)..(252): NCBI GI NO: 28932772 NR Description: FPh1 [Gossypium hirsutum]
  misc_feature (85)..(251): NCBI GI NO: 34912598 NR Description: P0046B10.16
MSISGAAVGSGRNLRRAVEFGKTHVVRPKGKHQATIVWLHGLGDNGSSWSQLLETLPLPNIKWICPTAPSQPISLFGGFPSTAWFDVVDINEDGPDDMEGLDVAAAHVANLLSNEPADIKLGVGGFSMGAATSLYSATCFALGKYGNGNPYPINLSAIIGLSGWLPCAKTLAGKLEEEQIKNRAASLPIVVCHGKADDVVPFKFGEKSSQALLSNGFKKVTFKPYSALGHHTIPQELDELCAWLTSTLSLEG

SEQ ID NO: 2809 - protein, 155 aa, Arabidopsis thaliana
  peptide (1)..(155): Ceres Seq. ID no. 12738936
  misc_feature (1)..(151): Pfam Name: Pfam Description:  Phospholipase/Carboxylesterase
  misc_feature (1)..(155): NCBI GI NO: 15241251 NR Description: putative protein; protein id: At5g20060
  misc_feature (1)..(153): NCBI GI NO: 34910274 NR Description: OSJNBa0089K24.24
  misc_feature (1)..(153): NCBI GI NO: 29409364 NR Description: biostress-resistance-related protein
  misc_feature (1)..(155): NCBI GI NO: 15232645 NR Description: putative lysophospholipase; protein id: At3g15650
  misc_feature (1)..(85): NCBI GI NO: 15219072 NR Description: unknown protein; protein id: At1g52700.1
  misc_feature (99)..(155): NCBI GI NO: 15219072 NR Description: unknown protein; protein id: At1g52700.1
  misc_feature (1)..(85): NCBI GI NO: 5903036 NR Description: F6D8.5 [Arabidopsis thaliana]
  misc_feature (99)..(128): NCBI GI NO: 5903036 NR Description: F6D8.5 [Arabidopsis thaliana]
  misc_feature (5)..(155): NCBI GI NO: 28932772 NR Description: FPh1 [Gossypium hirsutum]
  misc_feature (1)..(154): NCBI GI NO: 34912598 NR Description: P0046B10.16
MEGLDVAAAHVANLLSNEPADIKLGVGGFSMGAATSLYSATCFALGKYGNGNPYPINLSAIIGLSGWLPCAKTLAGKLEEEQIKNRAASLPIVVCHGKADDVVPFKFGEKSSQALLSNGFKKVTFKPYSALGHHTIPQELDELCAWLTSTLSLEG

SEQ ID NO: 2810 - DNA, 1420 bp, Arabidopsis thaliana
  misc_feature (1)..(1420): Ceres Seq. ID no. 12602555
aaacagacaaaacaaaaacacttcttttgttggttccttgtcggtttccaagggtttttgtttagggttttcattttctttttccttatctatctaatcctctgtttctctccacatcaaaaaaaacctcaaaattaagagacgaattcgagataatgggttcgcttaaggaaggtcaaggaagagacatggaagaaggtgaatcagaagagccgcttttgatggctcagaaccagagattcactatgttccccattaggtacaaatctatttgggagatgtataagaaggctgaagccagtttctggactgctgaagaggttgatctttccactgatgtgcaacagtgggaggccttgacggattcagagaaacactttatcagccatattctggcgtttttcgcagcgtcagatggtattgttttggagaatttggctgctagattcttgaatgatgtccaagttccagaggctcgtgctttctatgggtttcaaatagccatggagaacattcattcagagatgtacagcttacttctggagacattcataaaggactcgaaggagaaggatagattgttcaatgctatcgagaccattccttgtatatccaagaaggcaaaatggtgtttagattggattcaaagtcctatgtcgtttgctgtgaggctggtcgcttttgcatgtgtcgaaggaatcttcttctcaggaagcttctgtgccatcttctggctaaagaagaggggtcttatgccgggtttgaccttctcaaacgagcttatatcgagagacgaggggctccactgtgactttgcgtgtctcttgtacagtttgctgcagaagcagcttccattggagaaagtttatcaaattgttcacgaggcagtggaaattgagacagagtttgtctgcaaggctcttccatgtgatctgatcggaatgaactcaaacctcatgagtcaatacatacaatttgtcgctgaccgtcttctggttaccttgggatgtgaaaggacatacaaagcagaaaatccatttgactggatggagttcatatctctgcaaggaaagacaaacttctttgagaagagagtgggagagtatcagaaggcatcagttatgtcgaacctccaaaatggaaatcagaactacgaattcacgactgaagaggacttttgaatgaatccgccatcgaatctggaagggctcatcaaagtttagattctttatgagtcactctcattctttttagcccaaatccattagtagtagtctagtaagactagtagtagtagcaatggatgttatttgtgttctctatttcaccatcacttgtcccttctccattgtgtaataatattactatcttagttaatcaaatctataaaaaaaaaaaacattaatggaacaaaaacatt

SEQ ID NO: 2811 - protein, 341 aa, Arabidopsis thaliana
  peptide (1)..(341): Ceres Seq. ID no. 12602556
  misc_feature (1)..(341): NCBI GI NO: 15229476 NR Description: ribonucleoside-diphosphate reductase small chain
  misc_feature (1)..(341): NCBI GI NO: 7433352 NR Description: ribonucleoside-diphosphate reductase (EC 1
  misc_feature (1)..(341): NCBI GI NO: 4894211 NR Description: ribonucleotide reductase small subunit
  misc_feature (18)..(341): NCBI GI NO: 1710401 NR Description: RIBONUCLEOSIDE-DIPHOSPHATE REDUCTASE SMALL CHAIN
  misc_feature (18)..(341): NCBI GI NO: 15232077 NR Description: ribonucleotide reductase small subunit, putative
  misc_feature (18)..(341): NCBI GI NO: 34898038 NR Description: putative ribonucleoside-diphosphate reductase
  misc_feature (1)..(341): NCBI GI NO: 929959 NR Description: ribonuleotide reductase small subunit
  misc_feature (10)..(341): NCBI GI NO: 2465173 NR Description: ribonucleotide reductase (Class I)
  misc_feature (13)..(341): NCBI GI NO: 3914640 NR Description: RIBONUCLEOSIDE-DIPHOSPHATE REDUCTASE SMALL CHAIN
  misc_feature (17)..(341): NCBI GI NO: 31199959 NR Description: ENSANGP00000013211 [Anopheles gambiae]
MGSLKEGQGRDMEEGESEEPLLMAQNQRFTMFPIRYKSIWEMYKKAEASFWTAEEVDLSTDVQQWEALTDSEKHFISHILAFFAASDGIVLENLAARFLNDVQVPEARAFYGFQIAMENIHSEMYSLLLETFIKDSKEKDRLFNAIETIPCISKKAKWCLDWIQSPMSFAVRLVAFACVEGIFFSGSFCAIFWLKKRGLMPGLTFSNELISRDEGLHCDFACLLYSLLQKQLPLEKVYQIVHEAVEIETEFVCKALPCDLIGMNSNLMSQYIQFVADRLLVTLGCERTYKAENPFDWMEFISLQGKTNFFEKRVGEYQKASVMSNLQNGNQNYEFTTEEDF

SEQ ID NO: 2812 - protein, 330 aa, Arabidopsis thaliana
  peptide (1)..(330): Ceres Seq. ID no. 12602557
  misc_feature (1)..(330): NCBI GI NO: 15229476 NR Description: ribonucleoside-diphosphate reductase small chain
  misc_feature (1)..(330): NCBI GI NO: 7433352 NR Description: ribonucleoside-diphosphate reductase (EC 1
  misc_feature (1)..(330): NCBI GI NO: 4894211 NR Description: ribonucleotide reductase small subunit
  misc_feature (7)..(330): NCBI GI NO: 1710401 NR Description: RIBONUCLEOSIDE-DIPHOSPHATE REDUCTASE SMALL CHAIN
  misc_feature (7)..(330): NCBI GI NO: 15232077 NR Description: ribonucleotide reductase small subunit, putative
  misc_feature (7)..(330): NCBI GI NO: 34898038 NR Description: putative ribonucleoside-diphosphate reductase
  misc_feature (1)..(330): NCBI GI NO: 929959 NR Description: ribonuleotide reductase small subunit
  misc_feature (1)..(330): NCBI GI NO: 2465173 NR Description: ribonucleotide reductase (Class I)
  misc_feature (2)..(330): NCBI GI NO: 3914640 NR Description: RIBONUCLEOSIDE-DIPHOSPHATE REDUCTASE SMALL CHAIN
  misc_feature (6)..(330): NCBI GI NO: 31199959 NR Description: ENSANGP00000013211 [Anopheles gambiae]
MEEGESEEPLLMAQNQRFTMFPIRYKSIWEMYKKAEASFWTAEEVDLSTDVQQWEALTDSEKHFISHILAFFAASDGIVLENLAARFLNDVQVPEARAFYGFQIAMENIHSEMYSLLLETFIKDSKEKDRLFNAIETIPCISKKAKWCLDWIQSPMSFAVRLVAFACVEGIFFSGSFCAIFWLKKRGLMPGLTFSNELISRDEGLHCDFACLLYSLLQKQLPLEKVYQIVHEAVEIETEFVCKALPCDLIGMNSNLMSQYIQFVADRLLVTLGCERTYKAENPFDWMEFISLQGKTNFFEKRVGEYQKASVMSNLQNGNQNYEFTTEEDF

SEQ ID NO: 2813 - protein, 319 aa, Arabidopsis thaliana
  peptide (1)..(319): Ceres Seq. ID no. 12602558
  misc_feature (1)..(319): NCBI GI NO: 15229476 NR Description: ribonucleoside-diphosphate reductase small chain
  misc_feature (1)..(319): NCBI GI NO: 7433352 NR Description: ribonucleoside-diphosphate reductase (EC 1
  misc_feature (1)..(319): NCBI GI NO: 4894211 NR Description: ribonucleotide reductase small subunit
  misc_feature (1)..(319): NCBI GI NO: 1710401 NR Description: RIBONUCLEOSIDE-DIPHOSPHATE REDUCTASE SMALL CHAIN
  misc_feature (1)..(319): NCBI GI NO: 15232077 NR Description: ribonucleotide reductase small subunit, putative
  misc_feature (1)..(319): NCBI GI NO: 34898038 NR Description: putative ribonucleoside-diphosphate reductase
  misc_feature (1)..(319): NCBI GI NO: 929959 NR Description: ribonuleotide reductase small subunit
  misc_feature (1)..(319): NCBI GI NO: 2465173 NR Description: ribonucleotide reductase (Class I)
  misc_feature (1)..(319): NCBI GI NO: 3914640 NR Description: RIBONUCLEOSIDE-DIPHOSPHATE REDUCTASE SMALL CHAIN
  misc_feature (1)..(319): NCBI GI NO: 31199959 NR Description: ENSANGP00000013211 [Anopheles gambiae]
MAQNQRFTMFPIRYKSIWEMYKKAEASFWTAEEVDLSTDVQQWEALTDSEKHFISHILAFFAASDGIVLENLAARFLNDVQVPEARAFYGFQIAMENIHSEMYSLLLETFIKDSKEKDRLFNAIETIPCISKKAKWCLDWIQSPMSFAVRLVAFACVEGIFFSGSFCAIFWLKKRGLMPGLTFSNELISRDEGLHCDFACLLYSLLQKQLPLEKVYQIVHEAVEIETEFVCKALPCDLIGMNSNLMSQYIQFVADRLLVTLGCERTYKAENPFDWMEFISLQGKTNFFEKRVGEYQKASVMSNLQNGNQNYEFTTEEDF

SEQ ID NO: 2814 - DNA, 1699 bp, Arabidopsis thaliana
  misc_feature (1)..(1699): Ceres Seq. ID no. 12369916
cccaaaagatgaaaaacgatactctactttttatgaatcctttaattgaacaaacggaaccaacacaacaacagattgtgaagaagaaagaaaaaacaacaatggcttcacaaaccaaactcaagaaacctaattctcattttagcctttgtactttcctcttcttcaccgtcctctttaccatcccggctctctttctcctccgcacctcctcttgctcctcctccaccgctgcagtctcctcctcctctgacacagaccagccaccgtggtctggcgacctccaaaccgcccaatttgcctggaaccgccttgatttctccttaaccaaccctcctcccaaaacactaaaactcgctgttttctcccggaaatggcccacgggtcccaatcctggcggcatggaacgccacgccttcactctatacactgccttagctcgccgtggacatcgtgtccacgttttcacctctcccttagaccaatcccctgaaaccaacaaaattccccctgtttccgaccaaatcatttaccctataatccattctcacggagacgcggagcccggaaaatggcggtacaacaaagcgtgggagctttaccaagaagaaaacaagaaagaacctttcgatgcggttcactctgaaagtgttgctttacctcactggatcgcccgggaggttccaaacctcgctgtatcctggcacggcattgcgttagagagcttacaatcaagcatttaccaagacctgatccgtaaaccagacgaaccaagatcacaaggcttcaatgcaagtctatacggtgccgtgcttcccaagatactagacgaaatcagattcttccacaactacgctcaccacatcgctatcagcgatagctgtggagaaatgctaagagacgtttaccaaatcccggaaaaaagggttcacgtgatcctcaacggagtcgacgaaaacggattcacatcagacaagaagctacgtactctgtttaggtcaaaattagggttaccagaaaactcatcaacgattgttttaggagctgctgggagattagtcaaagacaaaggacatccattgctattcgaagctttcgcgaaactaatccaaacgtattcaaatgtctacctcgtagtagctggatcagggccatgggagcaacgatacaaagaattaggcgaaaaagtttccattttgggatctctaaacccaaacgaactcaagggtttctacaacgggatcgatttgttcgtgaatccaacgcttagaccacaaggtcttgatttaacgttaatggaagcgatgttgagtggtaaaccagtgatggcgtcgaggtacgcaagcataaagagaagtatagtggtgaatgatgagtttgggtttatgtttgcgccaaatgtggaagctctgacggcggtaatggaggttgctgtggcggaaggagcggagagattggcggagagagggaggaagtgtaaagagtatgcggcggagatgtttacggcgagtaagatggctttggcttatgagaggctttttctttgtattaacgatcagaaattttgtatttatccttaattagtaatttactcaacatcttaatttttttttcattattggaaaagtgagtcgtattatactcatggcaaagataatcaaatacatatgcgacccttacatatctaaagttatctttt

SEQ ID NO: 2815 - protein, 525 aa, Arabidopsis thaliana
  peptide (1)..(525): Ceres Seq. ID no. 12369917
  misc_feature (329)..(492): Pfam Name: Pfam Description:  Glycosyl transferases group 1
  misc_feature (11)..(525): NCBI GI NO: 18415319 NR Description: putative protein; protein id: At4g19460
  misc_feature (34)..(525): NCBI GI NO: 21593749 NR Description: unknown [Arabidopsis thaliana]
  misc_feature (11)..(505): NCBI GI NO: 7487719 NR Description: hypothetical protein T5K18
  misc_feature (34)..(507): NCBI GI NO: 7486088 NR Description: hypothetical protein F24J7
  misc_feature (34)..(507): NCBI GI NO: 25407571 NR Description: hypothetical protein AT4g19460
  misc_feature (57)..(525): NCBI GI NO: 34911892 NR Description: OSJNBb0032K15.23
  misc_feature (45)..(525): NCBI GI NO: 15219398 NR Description: putative glycosyl transferase
  misc_feature (45)..(525): NCBI GI NO: 5903105 NR Description: Hypothetical protein [Arabidopsis thaliana]
  misc_feature (273)..(522): NCBI GI NO: 10177634 NR Description: glycosyl transferase-like [Arabidopsis thaliana]
  misc_feature (201)..(255): NCBI GI NO: 10177634 NR Description: glycosyl transferase-like [Arabidopsis thaliana]
QKMKNDTLLFMNPLIEQTEPTQQQIVKKKEKTTMASQTKLKKPNSHFSLCTFLFFTVLFTIPALFLLRTSSCSSSTAAVSSSSDTDQPPWSGDLQTAQFAWNRLDFSLTNPPPKTLKLAVFSRKWPTGPNPGGMERHAFTLYTALARRGHRVHVFTSPLDQSPETNKIPPVSDQIIYPIIHSHGDAEPGKWRYNKAWELYQEENKKEPFDAVHSESVALPHWIAREVPNLAVSWHGIALESLQSSIYQDLIRKPDEPRSQGFNASLYGAVLPKILDEIRFFHNYAHHIAISDSCGEMLRDVYQIPEKRVHVILNGVDENGFTSDKKLRTLFRSKLGLPENSSTIVLGAAGRLVKDKGHPLLFEAFAKLIQTYSNVYLVVAGSGPWEQRYKELGEKVSILGSLNPNELKGFYNGIDLFVNPTLRPQGLDLTLMEAMLSGKPVMASRYASIKRSIVVNDEFGFMFAPNVEALTAVMEVAVAEGAERLAERGRKCKEYAAEMFTASKMALAYERLFLCINDQKFCIYP

SEQ ID NO: 2816 - protein, 523 aa, Arabidopsis thaliana
  peptide (1)..(523): Ceres Seq. ID no. 12369918
  misc_feature (327)..(490): Pfam Name: Pfam Description:  Glycosyl transferases group 1
  misc_feature (9)..(523): NCBI GI NO: 18415319 NR Description: putative protein; protein id: At4g19460
  misc_feature (32)..(523): NCBI GI NO: 21593749 NR Description: unknown [Arabidopsis thaliana]
  misc_feature (9)..(503): NCBI GI NO: 7487719 NR Description: hypothetical protein T5K18
  misc_feature (32)..(505): NCBI GI NO: 7486088 NR Description: hypothetical protein F24J7
  misc_feature (32)..(505): NCBI GI NO: 25407571 NR Description: hypothetical protein AT4g19460
  misc_feature (55)..(523): NCBI GI NO: 34911892 NR Description: OSJNBb0032K15.23
  misc_feature (43)..(523): NCBI GI NO: 15219398 NR Description: putative glycosyl transferase
  misc_feature (43)..(523): NCBI GI NO: 5903105 NR Description: Hypothetical protein [Arabidopsis thaliana]
  misc_feature (271)..(520): NCBI GI NO: 10177634 NR Description: glycosyl transferase-like [Arabidopsis thaliana]
  misc_feature (199)..(253): NCBI GI NO: 10177634 NR Description: glycosyl transferase-like [Arabidopsis thaliana]
MKNDTLLFMNPLIEQTEPTQQQIVKKKEKTTMASQTKLKKPNSHFSLCTFLFFTVLFTIPALFLLRTSSCSSSTAAVSSSSDTDQPPWSGDLQTAQFAWNRLDFSLTNPPPKTLKLAVFSRKWPTGPNPGGMERHAFTLYTALARRGHRVHVFTSPLDQSPETNKIPPVSDQIIYPIIHSHGDAEPGKWRYNKAWELYQEENKKEPFDAVHSESVALPHWIAREVPNLAVSWHGIALESLQSSIYQDLIRKPDEPRSQGFNASLYGAVLPKILDEIRFFHNYAHHIAISDSCGEMLRDVYQIPEKRVHVILNGVDENGFTSDKKLRTLFRSKLGLPENSSTIVLGAAGRLVKDKGHPLLFEAFAKLIQTYSNVYLVVAGSGPWEQRYKELGEKVSILGSLNPNELKGFYNGIDLFVNPTLRPQGLDLTLMEAMLSGKPVMASRYASIKRSIVVNDEFGFMFAPNVEALTAVMEVAVAEGAERLAERGRKCKEYAAEMFTASKMALAYERLFLCINDQKFCIYP

SEQ ID NO: 2817 - protein, 515 aa, Arabidopsis thaliana
  peptide (1)..(515): Ceres Seq. ID no. 12369919
  misc_feature (319)..(482): Pfam Name: Pfam Description:  Glycosyl transferases group 1
  misc_feature (1)..(515): NCBI GI NO: 18415319 NR Description: putative protein; protein id: At4g19460
  misc_feature (24)..(515): NCBI GI NO: 21593749 NR Description: unknown [Arabidopsis thaliana]
  misc_feature (1)..(495): NCBI GI NO: 7487719 NR Description: hypothetical protein T5K18
  misc_feature (24)..(497): NCBI GI NO: 7486088 NR Description: hypothetical protein F24J7
  misc_feature (24)..(497): NCBI GI NO: 25407571 NR Description: hypothetical protein AT4g19460
  misc_feature (47)..(515): NCBI GI NO: 34911892 NR Description: OSJNBb0032K15.23
  misc_feature (35)..(515): NCBI GI NO: 15219398 NR Description: putative glycosyl transferase
  misc_feature (35)..(515): NCBI GI NO: 5903105 NR Description: Hypothetical protein [Arabidopsis thaliana]
  misc_feature (263)..(512): NCBI GI NO: 10177634 NR Description: glycosyl transferase-like [Arabidopsis thaliana]
  misc_feature (191)..(245): NCBI GI NO: 10177634 NR Description: glycosyl transferase-like [Arabidopsis thaliana]
MNPLIEQTEPTQQQIVKKKEKTTMASQTKLKKPNSHFSLCTFLFFTVLFTIPALFLLRTSSCSSSTAAVSSSSDTDQPPWSGDLQTAQFAWNRLDFSLTNPPPKTLKLAVFSRKWPTGPNPGGMERHAFTLYTALARRGHRVHVFTSPLDQSPETNKIPPVSDQIIYPIIHSHGDAEPGKWRYNKAWELYQEENKKEPFDAVHSESVALPHWIAREVPNLAVSWHGIALESLQSSIYQDLIRKPDEPRSQGFNASLYGAVLPKILDEIRFFHNYAHHIAISDSCGEMLRDVYQIPEKRVHVILNGVDENGFTSDKKLRTLFRSKLGLPENSSTIVLGAAGRLVKDKGHPLLFEAFAKLIQTYSNVYLVVAGSGPWEQRYKELGEKVSILGSLNPNELKGFYNGIDLFVNPTLRPQGLDLTLMEAMLSGKPVMASRYASIKRSIVVNDEFGFMFAPNVEALTAVMEVAVAEGAERLAERGRKCKEYAAEMFTASKMALAYERLFLCINDQKFCIYP

SEQ ID NO: 2818 - DNA, 1272 bp, Arabidopsis thaliana
  misc_feature (1)..(1272): Ceres Seq. ID no. 12384472
agtgaacagtaaaactcccaaatttgcaaatgactcatcttcttcacctggagagaatctagggttccagatttactcttcgtcttcctctcttcgcttcttccccactgggattttccttttcttctccttttttctctacccatcgatctacacatcctgatcttcttagaagccccaatccttatacattccgggaacaaaaaacctagctttttttttattccggcttaaccagttttcgaaaaaccctagcttccatggcgaaaactcgacctggtgtcgcctccaaaattaagacgggaaggaaggagctggactcttataccatcaagggcaccaacaaagttgtgagagcgggagactgtgtgttgatgcgcccatcagatgctggtaaaccaccatatgtggcccgtgttgagaagattgaagctgatgcgaggaacaatgtgaaggtgcactgtcgatggtattaccgccctgaggagtcacttggtggtaggagacaatttcatggagccaaagagcttttcttgtctgaccattttgatgttcaaagtgcacacaccattgagggaaaatgcattgttcacaccttcaaaaactacacgaggcttgaaaacgttggggcagaggattattattgtagattcgagtacaaggctgctactggcgcatttacccctgatcgagttgctgtgtactgcaaatgtgaaatgccttacaatccagacgatctcatggtgcagtgtgaaggctgcaaagactggtatcatcctgcgtgtgttggcatgacgattgaagaagcaaagaagcttgatcactttgtatgtgctgaatgcagttctgatgacgatgtcaaaaaatcgcagaatgggtttacttcatctccagctgatgatgttaaggtggaaacgaagcgcagaaaaaggtaatcgcgagttcttggggataaaagccacaagagatgataagttatataacttgggaagctctttggtgcagattttagtaagttagggtttatctttgtcggtctttgtcgtctatggttgtgatgtctgtatggtgcgttccaaaacttagagaaatgtgaaaaagaggagagatcagagagatgatgaagaaaactatgttggcagaatcagttgtatagacttccgtggggtttaagttaactttaggtttgtttattgttatggtctgttgttattttgtggctgatgagaacagatgaacatgaacaacgcttttgacttgggtcatctcagc

SEQ ID NO: 2819 - protein, 224 aa, Arabidopsis thaliana
  peptide (1)..(224): Ceres Seq. ID no. 12384473
  misc_feature (34)..(144): Pfam Name: Pfam Description:  BAH domain
  misc_feature (34)..(217): NCBI GI NO: 11292613 NR Description: receptor like protein - Arabidopsis thaliana
  misc_feature (39)..(217): NCBI GI NO: 15234729 NR Description: receptor like protein
  misc_feature (10)..(224): NCBI GI NO: 37573088 NR Description: receptor like protein
  misc_feature (10)..(210): NCBI GI NO: 34904940 NR Description: OSJNBa0077M12.13
  misc_feature (10)..(224): NCBI GI NO: 33146914 NR Description: putative ES43 protein
  misc_feature (39)..(221): NCBI GI NO: 22328317 NR Description: putative ES43-like protein; protein id: At4g04260
  misc_feature (11)..(221): NCBI GI NO: 18420377 NR Description: ES43 like protein; protein id: At4g39100
  misc_feature (11)..(221): NCBI GI NO: 21595796 NR Description: ES43 like protein [Arabidopsis thaliana]
  misc_feature (11)..(217): NCBI GI NO: 7484948 NR Description: ES43 protein homolog F19H22
  misc_feature (1)..(224): NCBI GI NO: 34897170 NR Description: putative DNA-binding protein
MAKTRPGVASKIKTGRKELDSYTIKGTNKVVRAGDCVLMRPSDAGKPPYVARVEKIEADARNNVKVHCRWYYRPEESLGGRRQFHGAKELFLSDHFDVQSAHTIEGKCIVHTFKNYTRLENVGAEDYYCRFEYKAATGAFTPDRVAVYCKCEMPYNPDDLMVQCEGCKDWYHPACVGMTIEEAKKLDHFVCAECSSDDDVKKSQNGFTSSPADDVKVETKRRKR

SEQ ID NO: 2820 - protein, 186 aa, Arabidopsis thaliana
  peptide (1)..(186): Ceres Seq. ID no. 12384474
  misc_feature (1)..(106): Pfam Name: Pfam Description:  BAH domain
  misc_feature (1)..(179): NCBI GI NO: 11292613 NR Description: receptor like protein - Arabidopsis thaliana
  misc_feature (1)..(179): NCBI GI NO: 15234729 NR Description: receptor like protein
  misc_feature (1)..(186): NCBI GI NO: 37573088 NR Description: receptor like protein
  misc_feature (1)..(172): NCBI GI NO: 34904940 NR Description: OSJNBa0077M12.13
  misc_feature (1)..(186): NCBI GI NO: 33146914 NR Description: putative ES43 protein
  misc_feature (1)..(183): NCBI GI NO: 22328317 NR Description: putative ES43-like protein; protein id: At4g04260
  misc_feature (1)..(183): NCBI GI NO: 18420377 NR Description: ES43 like protein; protein id: At4g39100
  misc_feature (1)..(183): NCBI GI NO: 21595796 NR Description: ES43 like protein [Arabidopsis thaliana]
  misc_feature (1)..(179): NCBI GI NO: 7484948 NR Description: ES43 protein homolog F19H22
  misc_feature (1)..(186): NCBI GI NO: 34897170 NR Description: putative DNA-binding protein
MRPSDAGKPPYVARVEKIEADARNNVKVHCRWYYRPEESLGGRRQFHGAKELFLSDHFDVQSAHTIEGKCIVHTFKNYTRLENVGAEDYYCRFEYKAATGAFTPDRVAVYCKCEMPYNPDDLMVQCEGCKDWYHPACVGMTIEEAKKLDHFVCAECSSDDDVKKSQNGFTSSPADDVKVETKRRKR

SEQ ID NO: 2821 - DNA, 1391 bp, Arabidopsis thaliana
  misc_feature (1)..(1391): Ceres Seq. ID no. 13580630
atggaagaattagaaaaaacccagaaatttcagaagaagaagaagcaacaacaagagaaacaagaccagtcttcaccaatcaacttcgagatgtcttcaagatcatcacttcattcattaccacaaacaacgattgaatcacctcctgattcaccaaccctctcttcaatccccgatagccatggatcttctcctcacacgattattccaactccttctgtggccaagacggagactccttttagggttactaacggagaggaggagaagaaagtcagcgagagtaggagacaattgagaccgagcttttcttcttcttcttctactccgcgtgaatcgaaatgggcaagtttgattaggaaagctctacttggatttagggttattgcgtttgtttcgtgtcttgtttcgttctctgtaatggtttctgatagagataaaggatgggctcatgattctttctacaactacaaagaattcaggttctgtttggctgcgaatgtgattggttttgtctactctggttttatgatatgtgatcttgtatacctgttatctactagcatccgaagatcacgacataacctgcgacatttcttggaatttggtcttgatcaaatgctagcttatcttcttgcatcagcttcaacttcagcttcgatccgcgtagatgattggcaatcaaactggggagcagacaagttcccagacttagctagagcatctgtcgcactgtcttacgtctcctttgtcgcattcgccttctgctcattggcttccggttatgctctatgtgcactccggtccatctaaactaaacaagcgcaagctcgagacaaaaagtctcattttgtctactctcagaagttgtatccttgaccctaaacgggtccagtttctgatttttagaagaaacttttattttatatagtggagaatattccatcttgttaaaagatggtgcgaatgctcgtttatacatcactttatctatttcactttttattatatagttctaagaaaagctatatgatgctatcttctccccaaaaaaaaaaaaaaaaaaatcaagaattcgcacgagaccattacctagaacatcctaatcaaaaaaattgggttattagtacgaattttataatgagtgtgccataatttacctaaaaaagaaaaaaaaagaaaaaaagagtgttgtatgtacgtgtgtttgacttggataattagtgacattttaagcaaatgtgtatttggaaaagtgatgtcaatgaaatatgaatatgggtcgaataaagaagcgaagatccgtagactgttgcttctctgcatctgttgttgtattcccgatcatattgttgtatgtttataatttattaaaagcaaattgtcttccc

SEQ ID NO: 2822 - protein, 270 aa, Arabidopsis thaliana
  peptide (1)..(270): Ceres Seq. ID no. 13580631
  misc_feature (116)..(252): Pfam Name: DUF588 Pfam Description: Domain of unknown function
  misc_feature (1)..(270): NCBI GI NO: 15242642 NR Description: expressed protein [Arabidopsis thaliana]
  misc_feature (24)..(264): NCBI GI NO: 27754604 NR Description: unknown protein [Arabidopsis thaliana]
  misc_feature (105)..(264): NCBI GI NO: 15241975 NR Description: hypothetical protein [Arabidopsis thaliana]
  misc_feature (111)..(265): NCBI GI NO: 2598569 NR Description: putative start codon [Medicago truncatula]
  misc_feature (105)..(166): NCBI GI NO: 10177460 NR Description: gene_id:MQB2.14~unknown protein
  misc_feature (210)..(264): NCBI GI NO: 10177460 NR Description: gene_id:MQB2.14~unknown protein
  misc_feature (173)..(264): NCBI GI NO: 15227628 NR Description: expressed protein [Arabidopsis thaliana]
  misc_feature (121)..(264): NCBI GI NO: 28876007 NR Description: hypothetical protein
  misc_feature (24)..(209): NCBI GI NO: 15227628 NR Description: expressed protein [Arabidopsis thaliana]
MEELEKTQKFQKKKKQQQEKQDQSSPINFEMSSRSSLHSLPQTTIESPPDSPTLSSIPDSHGSSPHTIIPTPSVAKTETPFRVTNGEEEKKVSESRRQLRPSFSSSSSTPRESKWASLIRKALLGFRVIAFVSCLVSFSVMVSDRDKGWAHDSFYNYKEFRFCLAANVIGFVYSGFMICDLVYLLSTSIRRSRHNLRHFLEFGLDQMLAYLLASASTSASIRVDDWQSNWGADKFPDLARASVALSYVSFVAFAFCSLASGYALCALRSI

SEQ ID NO: 2823 - protein, 240 aa, Arabidopsis thaliana
  peptide (1)..(240): Ceres Seq. ID no. 13580632
  misc_feature (86)..(222): Pfam Name: DUF588 Pfam Description: Domain of unknown function
  misc_feature (1)..(240): NCBI GI NO: 15242642 NR Description: expressed protein [Arabidopsis thaliana]
  misc_feature (1)..(234): NCBI GI NO: 27754604 NR Description: unknown protein [Arabidopsis thaliana]
  misc_feature (75)..(234): NCBI GI NO: 15241975 NR Description: hypothetical protein [Arabidopsis thaliana]
  misc_feature (81)..(235): NCBI GI NO: 2598569 NR Description: putative start codon [Medicago truncatula]
  misc_feature (75)..(136): NCBI GI NO: 10177460 NR Description: gene_id:MQB2.14~unknown protein
  misc_feature (180)..(234): NCBI GI NO: 10177460 NR Description: gene_id:MQB2.14~unknown protein
  misc_feature (143)..(234): NCBI GI NO: 15227628 NR Description: expressed protein [Arabidopsis thaliana]
  misc_feature (91)..(234): NCBI GI NO: 28876007 NR Description: hypothetical protein
  misc_feature (1)..(179): NCBI GI NO: 15227628 NR Description: expressed protein [Arabidopsis thaliana]
MSSRSSLHSLPQTTIESPPDSPTLSSIPDSHGSSPHTIIPTPSVAKTETPFRVTNGEEEKKVSESRRQLRPSFSSSSSTPRESKWASLIRKALLGFRVIAFVSCLVSFSVMVSDRDKGWAHDSFYNYKEFRFCLAANVIGFVYSGFMICDLVYLLSTSIRRSRHNLRHFLEFGLDQMLAYLLASASTSASIRVDDWQSNWGADKFPDLARASVALSYVSFVAFAFCSLASGYALCALRSI

SEQ ID NO: 2824 - DNA, 1667 bp, Arabidopsis thaliana
  misc_feature (1)..(1667): Ceres Seq. ID no. 13487703
aagcaaagtaaaacctaaaaaaaaaaaaagaccgtaagtagttacaagggtggaagtataaaggagcagtcttttcttcttctttcaaccccacggcgcagatcctacgagtttggtctttgtctctatcttttcaatctttctctctcaatcgctcttcaatttgataacagcaaagtcatggcaggaatggcatctgatggaactcaatatgatcctcgtcagtttgatactaagatgaatgccattctcggcgaggaaggagaggaaacattctacactaactatgacgaagtttgcgacagctttgatgcaatggaattgcaaccagatcttctcaggggtatttatgcttacggtttcgagaagccttctgctattcagcaaagaggaattattccattctgcaagggtcttgatgtgatccagcaagctcaatctggaactggaaagaccgctaccttttgctctggtgttttacagcagctcgatattagtttggttcaatgccaagctcttgttttggcacctacccgagaacttgcccagcaaattgaaaaggttatgagggcacttggtgactaccttggcgtcaaggctcaggcttgtgttggtggaacaagtgttcgtgaggatcaacgtgttcttcagtctggtgttcatgttgttgttggaacccctggtcgtgtctttgacttgttacgcagacaatccctccgtgctgatgcaatcaaaatgtttgttcttgatgaagctgatgaaatgctctctcgtggtttcaaggatcagatatacgacatcttccagcttcttccttccaaggttcaggttggtgttttctctgctacaatgcctcccgaagcccttgagatcacaaggaagttcatgaacaaaccagtcaggattctggtcaagcgagacgagctgactcttgaaggtatcaagcagttttatgtcaatgtagacaaggaagagtggaaactcgagacactatgcgatctctacgagacactggccatcactcaaagcgtcatctttgtgaacacaaggcgtaaggttgattggctaaccgacaaaatgagaagccgtgaccacactgtttcagctacacacggagacatggaccagaacacaagagacatcatcatgcgcgaattccgctctgggtcttcccgtgtcctcataaccactgacctccttgctcgtggtatcgatgttcagcaagtctctctggtcataaactttgacctcccaacccaaccggagaattaccttcatcgtattggaagaagtggaaggtttgggagaaagggagtagcaatcaatttcatgacatcggaggatgagagaatgatggctgatattcagaggttttacaatgtggtcgttgaggagttgccaagcaatgttgctgatcttctctgaagcctttcttttttctgttttttactgagaaagtgctgtgtttacccctttttttggcagcttctctatgctttgatttttgttttcaggctactacttagatttatagttcttggctaaaagcgaacataactcattacatgattttgcttttttggcaatcaagaatttcggcattatttatctttttgtgaacgtggcttacaaggaaggatactctatgagactaaagacttttctct

SEQ ID NO: 2825 - protein, 414 aa, Arabidopsis thaliana
  peptide (1)..(414): Ceres Seq. ID no. 13487704
  misc_feature (54)..(257): Pfam Name: Pfam Description:  DEAD/DEAH box helicase
  misc_feature (1)..(414): NCBI GI NO: 11358803 NR Description: RNA helicase RH23
  misc_feature (1)..(414): NCBI GI NO: 15218574 NR Description: eukaryotic translation initiation factor 4A
  misc_feature (1)..(414): NCBI GI NO: 1170511 NR Description: Eukaryotic initiation factor 4A-10
  misc_feature (1)..(414): NCBI GI NO: 2119934 NR Description: translation initiation factor eIF-4A
  misc_feature (1)..(414): NCBI GI NO: 1170506 NR Description: Eukaryotic initiation factor 4A-2
  misc_feature (1)..(414): NCBI GI NO: 2119938 NR Description: translation initiation factor eIF-4A
  misc_feature (1)..(414): NCBI GI NO: 18400210 NR Description: eukaryotic translation initiation factor 4A-1
  misc_feature (1)..(414): NCBI GI NO: 2119935 NR Description: translation initiation factor eIF-4A
  misc_feature (1)..(414): NCBI GI NO: 2500516 NR Description: Eukaryotic initiation factor 4A-7
  misc_feature (1)..(414): NCBI GI NO: 2500521 NR Description: Eukaryotic initiation factor 4A-15
MAGMASDGTQYDPRQFDTKMNAILGEEGEETFYTNYDEVCDSFDAMELQPDLLRGIYAYGFEKPSAIQQRGIIPFCKGLDVIQQAQSGTGKTATFCSGVLQQLDISLVQCQALVLAPTRELAQQIEKVMRALGDYLGVKAQACVGGTSVREDQRVLQSGVHVVVGTPGRVFDLLRRQSLRADAIKMFVLDEADEMLSRGFKDQIYDIFQLLPSKVQVGVFSATMPPEALEITRKFMNKPVRILVKRDELTLEGIKQFYVNVDKEEWKLETLCDLYETLAITQSVIFVNTRRKVDWLTDKMRSRDHTVSATHGDMDQNTRDIIMREFRSGSSRVLITTDLLARGIDVQQVSLVINFDLPTQPENYLHRIGRSGRFGRKGVAINFMTSEDERMMADIQRFYNVVVEELPSNVADLL

SEQ ID NO: 2826 - protein, 411 aa, Arabidopsis thaliana
  peptide (1)..(411): Ceres Seq. ID no. 13487705
  misc_feature (51)..(254): Pfam Name: Pfam Description:  DEAD/DEAH box helicase
  misc_feature (1)..(411): NCBI GI NO: 11358803 NR Description: RNA helicase RH23
  misc_feature (1)..(411): NCBI GI NO: 15218574 NR Description: eukaryotic translation initiation factor 4A
  misc_feature (1)..(411): NCBI GI NO: 1170511 NR Description: Eukaryotic initiation factor 4A-10
  misc_feature (1)..(411): NCBI GI NO: 2119934 NR Description: translation initiation factor eIF-4A
  misc_feature (1)..(411): NCBI GI NO: 1170506 NR Description: Eukaryotic initiation factor 4A-2
  misc_feature (1)..(411): NCBI GI NO: 2119938 NR Description: translation initiation factor eIF-4A
  misc_feature (1)..(411): NCBI GI NO: 18400210 NR Description: eukaryotic translation initiation factor 4A-1
  misc_feature (1)..(411): NCBI GI NO: 2119935 NR Description: translation initiation factor eIF-4A
  misc_feature (1)..(411): NCBI GI NO: 2500516 NR Description: Eukaryotic initiation factor 4A-7
  misc_feature (1)..(411): NCBI GI NO: 2500521 NR Description: Eukaryotic initiation factor 4A-15
MASDGTQYDPRQFDTKMNAILGEEGEETFYTNYDEVCDSFDAMELQPDLLRGIYAYGFEKPSAIQQRGIIPFCKGLDVIQQAQSGTGKTATFCSGVLQQLDISLVQCQALVLAPTRELAQQIEKVMRALGDYLGVKAQACVGGTSVREDQRVLQSGVHVVVGTPGRVFDLLRRQSLRADAIKMFVLDEADEMLSRGFKDQIYDIFQLLPSKVQVGVFSATMPPEALEITRKFMNKPVRILVKRDELTLEGIKQFYVNVDKEEWKLETLCDLYETLAITQSVIFVNTRRKVDWLTDKMRSRDHTVSATHGDMDQNTRDIIMREFRSGSSRVLITTDLLARGIDVQQVSLVINFDLPTQPENYLHRIGRSGRFGRKGVAINFMTSEDERMMADIQRFYNVVVEELPSNVADLL

SEQ ID NO: 2827 - protein, 395 aa, Arabidopsis thaliana
  peptide (1)..(395): Ceres Seq. ID no. 13487706
  misc_feature (35)..(238): Pfam Name: Pfam Description:  DEAD/DEAH box helicase
  misc_feature (1)..(395): NCBI GI NO: 11358803 NR Description: RNA helicase RH23
  misc_feature (1)..(395): NCBI GI NO: 15218574 NR Description: eukaryotic translation initiation factor 4A
  misc_feature (1)..(395): NCBI GI NO: 1170511 NR Description: Eukaryotic initiation factor 4A-10
  misc_feature (1)..(395): NCBI GI NO: 2119934 NR Description: translation initiation factor eIF-4A
  misc_feature (1)..(395): NCBI GI NO: 1170506 NR Description: Eukaryotic initiation factor 4A-2
  misc_feature (1)..(395): NCBI GI NO: 2119938 NR Description: translation initiation factor eIF-4A
  misc_feature (1)..(395): NCBI GI NO: 2119935 NR Description: translation initiation factor eIF-4A
  misc_feature (1)..(395): NCBI GI NO: 18400210 NR Description: eukaryotic translation initiation factor 4A-1
  misc_feature (1)..(395): NCBI GI NO: 2500516 NR Description: Eukaryotic initiation factor 4A-7
  misc_feature (1)..(395): NCBI GI NO: 2500521 NR Description: Eukaryotic initiation factor 4A-15
MNAILGEEGEETFYTNYDEVCDSFDAMELQPDLLRGIYAYGFEKPSAIQQRGIIPFCKGLDVIQQAQSGTGKTATFCSGVLQQLDISLVQCQALVLAPTRELAQQIEKVMRALGDYLGVKAQACVGGTSVREDQRVLQSGVHVVVGTPGRVFDLLRRQSLRADAIKMFVLDEADEMLSRGFKDQIYDIFQLLPSKVQVGVFSATMPPEALEITRKFMNKPVRILVKRDELTLEGIKQFYVNVDKEEWKLETLCDLYETLAITQSVIFVNTRRKVDWLTDKMRSRDHTVSATHGDMDQNTRDIIMREFRSGSSRVLITTDLLARGIDVQQVSLVINFDLPTQPENYLHRIGRSGRFGRKGVAINFMTSEDERMMADIQRFYNVVVEELPSNVADLL

SEQ ID NO: 2828 - DNA, 1167 bp, Arabidopsis thaliana
  misc_feature (1)..(1167): Ceres Seq. ID no. 12661399
tgcccccagctagtcacatactcatgattgcaaaatctctctctctctctgcctctctatatattaacctttcttcttcctttactttctcatcttctatctctcaaaagaaaagcagacaactttatttgcaaaaacagagtttttttttcttatcttgagaaagttcaacagaagatgatgttcgagaaagacgatctgggtctaagcttaggcttgaattttccaaagaaacagatcaatctcaaatcaaatccatctgtttctgttactccttcttcttcttcttttggattattcagaagatcttcatggaacgagagttttacttcttcagttccaaactcagattcgtcacaaaaagaaacaagaactttcatccgaggaatcgacgtgaacagaccaccgtctacagcggaatacggcgacgaagacgctggagtatcttcacctaacagtacagtctcaagctctacagggaaaagaagcgagagagaagaagacacagatccacaaggctcaagaggaatcagtgacgatgaagatggtgataactccaggaaaaagcttagactttccaaagatcaatctgctattcttgaagagaccttcaaagatcacagtactctcaatccgaagcagaagcaagcattggctaaacaattagggttacgagcaagacaagtggaagtttggtttcagaacagacgagcaagaacaaagctgaagcaaacggaggtagactgcgagttcttacggagatgctgcgagaatctaacggaagagaaccgtcggctacaaaaagaagtaacggaattgagagcacttaagctctctcctcagttctacatgcacatgagcccacccactactttgaccatgtgcccttcatgtgaacacgtgtcggtcccgccaccacaacctcaggctgctacgtcagcgcaccaccggtcgttgccggtcaatgcgtgggctcctgcgacgaggatatctcacggcttgacttttgacgctcttcgtcctaggtcctaagtctttttacttgcaaccaaagggcattttggtcgttttttaagtttcatggaccagatatgcatgtagttgttaacatgtatgtattttcttagaaagaaagaaaaacagattaatatttttctagcttaaacc

SEQ ID NO: 2829 - protein, 284 aa, Arabidopsis thaliana
  peptide (1)..(284): Ceres Seq. ID no. 12661400
  misc_feature (1)..(109): Pfam Name: Pfam Description:  HD-ZIP protein N terminus
  misc_feature (1)..(284): NCBI GI NO: 15235882 NR Description: homeobox-leucine zipper protein HAT4
  misc_feature (1)..(284): NCBI GI NO: 22759 NR Description: HAT4 [Arabidopsis thaliana]
  misc_feature (1)..(284): NCBI GI NO: 8919876 NR Description: hypothetical protein [Capsella rubella]
  misc_feature (1)..(274): NCBI GI NO: 7446242 NR Description: homeobox-leucine zipper protein homolog h1
  misc_feature (1)..(280): NCBI GI NO: 25487873 NR Description: homeobox-leucine zipper protein
  misc_feature (99)..(237): NCBI GI NO: 20271001 NR Description: HAT4 [Arabidopsis lyrata subsp. petraea]
  misc_feature (1)..(284): NCBI GI NO: 15238078 NR Description: homeobox-leucine zipper protein-like
  misc_feature (58)..(284): NCBI GI NO: 25487870 NR Description: homeobox-leucine zipper protein PHZ1
  misc_feature (108)..(238): NCBI GI NO: 27752841 NR Description: HAT4 [Arabidopsis thaliana]
  misc_feature (58)..(284): NCBI GI NO: 25487872 NR Description: homeobox-leucine zipper protein PHZ2
MMFEKDDLGLSLGLNFPKKQINLKSNPSVSVTPSSSSFGLFRRSSWNESFTSSVPNSDSSQKETRTFIRGIDVNRPPSTAEYGDEDAGVSSPNSTVSSSTGKRSEREEDTDPQGSRGISDDEDGDNSRKKLRLSKDQSAILEETFKDHSTLNPKQKQALAKQLGLRARQVEVWFQNRRARTKLKQTEVDCEFLRRCCENLTEENRRLQKEVTELRALKLSPQFYMHMSPPTTLTMCPSCEHVSVPPPQPQAATSAHHRSLPVNAWAPATRISHGLTFDALRPRS

SEQ ID NO: 2830 - protein, 283 aa, Arabidopsis thaliana
  peptide (1)..(283): Ceres Seq. ID no. 12661401
  misc_feature (1)..(108): Pfam Name: Pfam Description:  HD-ZIP protein N terminus
  misc_feature (1)..(283): NCBI GI NO: 15235882 NR Description: homeobox-leucine zipper protein HAT4
  misc_feature (1)..(283): NCBI GI NO: 22759 NR Description: HAT4 [Arabidopsis thaliana]
  misc_feature (1)..(283): NCBI GI NO: 8919876 NR Description: hypothetical protein [Capsella rubella]
  misc_feature (1)..(273): NCBI GI NO: 7446242 NR Description: homeobox-leucine zipper protein homolog h1
  misc_feature (1)..(279): NCBI GI NO: 25487873 NR Description: homeobox-leucine zipper protein
  misc_feature (98)..(236): NCBI GI NO: 20271001 NR Description: HAT4 [Arabidopsis lyrata subsp. petraea]
  misc_feature (1)..(283): NCBI GI NO: 15238078 NR Description: homeobox-leucine zipper protein-like
  misc_feature (57)..(283): NCBI GI NO: 25487870 NR Description: homeobox-leucine zipper protein PHZ1
  misc_feature (107)..(237): NCBI GI NO: 27752841 NR Description: HAT4 [Arabidopsis thaliana]
  misc_feature (57)..(283): NCBI GI NO: 25487872 NR Description: homeobox-leucine zipper protein PHZ2
MFEKDDLGLSLGLNFPKKQINLKSNPSVSVTPSSSSFGLFRRSSWNESFTSSVPNSDSSQKETRTFIRGIDVNRPPSTAEYGDEDAGVSSPNSTVSSSTGKRSEREEDTDPQGSRGISDDEDGDNSRKKLRLSKDQSAILEETFKDHSTLNPKQKQALAKQLGLRARQVEVWFQNRRARTKLKQTEVDCEFLRRCCENLTEENRRLQKEVTELRALKLSPQFYMHMSPPTTLTMCPSCEHVSVPPPQPQAATSAHHRSLPVNAWAPATRISHGLTFDALRPRS

SEQ ID NO: 2831 - DNA, 465 bp, Arabidopsis thaliana
  misc_feature (1)..(465): Ceres Seq. ID no. 12558719
gctcattagggtttctcatctacgacggcgtggtgttcctccttcctgctctgaaaaatggcgaagagaacgaagaaggttggaatcgtcggcaaatacggaacacgttatggtgcgagtatcaggaagcagattaagaagatggaggtcagccagcacagcaagtacttctgtgagttctgtggcaagtacggagtgaagcgaaaggctgttggtatctggggttgcaaggattgtggcaaggtcaaggcaggtggtgcttacacaatgaacaccgccagtgcggtcactgttagaagcacgatcagaaggttgagggagcagatcgagggttaaaagtctgctggctttttatatttggtttccttgttttgacaatttaagttttgcaaactctatgcttgtgattttgaatcaagacttatacattgagcagtttaagcaggtttttattttttgttgagt

SEQ ID NO: 2832 - protein, 92 aa, Arabidopsis thaliana [sequence omitted]

SEQ ID NO: 2833 - protein, 65 aa, Arabidopsis thaliana; identical to SEQ ID NO: 2458
  peptide (1)..(65): Ceres Seq. ID no. 12558721

SEQ ID NO: 2834 - protein, 64 aa, Arabidopsis thaliana; identical to SEQ ID NO: 2459
  peptide (1)..(64): Ceres Seq. ID no. 12558722
  misc_feature (1)..(64): NCBI GI NO: 18411538 NR Description: Expressed protein; protein id: At3g60245
  misc_feature (1)..(64): NCBI GI NO: 1173045 NR Description: 60S RIBOSOMAL PROTEIN L37A
  misc_feature (1)..(63): NCBI GI NO: 34911166 NR Description: putative 60S ribosomal protein L37a
  misc_feature (1)..(64): NCBI GI NO: 6831607 NR Description: 60S ribosomal protein L37a
  misc_feature (1)..(63): NCBI GI NO: 6831602 NR Description: 60S RIBOSOMAL PROTEIN L37A
  misc_feature (1)..(63): NCBI GI NO: 15228411 NR Description: putative 60S ribosomal protein L37a
  misc_feature (1)..(64): NCBI GI NO: 11358898 NR Description: translation initiation factor eIF-4 gamma homolog F27H5
  misc_feature (1)..(63): NCBI GI NO: 6093889 NR Description: 60S RIBOSOMAL PROTEIN L37A
  misc_feature (1)..(60): NCBI GI NO: 7441206 NR Description: ribosomal protein L37a
  misc_feature (1)..(61): NCBI GI NO: 33637090 NR Description: N1 [Toxoplasma gondii]

SEQ ID NO: 2835 - DNA, 1205 bp, Arabidopsis thaliana
  misc_feature (1)..(1205): Ceres Seq. ID no. 12324679
acaacaacattgaaacccatttcttcgcctttaaccttacttgaatttttgtgtgggtcctttttttttctttctccaagccattgaataaaaaggcagagaaaatggagttttttggtaaaatgataatttcattgagtcttattatgatgataatgtggaagagcgtggatggttacagtagtggttgggtcaatgctcgagccacattctatggaggagctgatgcttctggcaccatgggcggcgcgtgtggttacggaaacttatacagtcaaggatacggcactaacacggcggctctaagcacggctctattcaacggcggccaaagctgtggtgcttgttttcagataaaatgcgtaaacgacccaaaatggtgtatcggtggaacaatcaccgtcaccggaacaaacttttgtccacccaactttgctcaagccaacaacgccggaggttggtgtaatcctcctcaacaccacttcgatttagctcagcccatcttcctccgtattgctcaatacaaagccggcgtcgtccctgtccaataccggagagtggcttgccggagaaaaggaggaataagattcacgatcaacggtcattcatacttcaacctcgtacttataaccaacgtcgccggcgccggagatgttatctccgtctccattaaaggaaccaatacacgttggcaaagcatgtcaagaaactggggacaaaactggcaaagcaatgcaaaacttgatggtcaagctttgtcctttaaagtaacaactagtgatggccgtacagttatatctaacaatgctacaccacgtaactggagctttggacagacttataccggaaaacagttccgggctcagaggtgatgatgacgtggactgtctggagggaaaaaaaaaagttttacttattactgattttggagttttctagagtttgcatagtttgaaaaaagttttcaggaattaaccctaatcaaaataaccaatttctaaatggcggaaatcgaggttttttctcactggcagcttttgtaattcgccggtgagactgaggtgttttcacccgccgcctgagtgattgagttttttttttttttttttttgtactttgtttggcttttaagatgttcaatggtctgtttctttaagacattgtctactgaaataataataaaatcaagttaatttataattttt

SEQ ID NO: 2836 - protein, 255 aa, Arabidopsis thaliana
  peptide (1)..(255): Ceres Seq. ID no. 12324680
  misc_feature (160)..(237): Pfam Name: Pfam Description:  Pollen allergen
  misc_feature (1)..(255): NCBI GI NO: 15241183 NR Description: expansin, putative; protein id: At5g56320
  misc_feature (7)..(255): NCBI GI NO: 21593755 NR Description: expansin [Arabidopsis thaliana]
  misc_feature (1)..(252): NCBI GI NO: 29467505 NR Description: expansin [Pyrus communis]
  misc_feature (3)..(252): NCBI GI NO: 22325441 NR Description: expansin, putative; protein id: At2g03090
  misc_feature (11)..(252): NCBI GI NO: 17484121 NR Description: alpha-expansin [Prunus cerasus]
  misc_feature (21)..(252): NCBI GI NO: 20137710 NR Description: Alpha-expansin 15 precursor
  misc_feature (8)..(252): NCBI GI NO: 21615407 NR Description: alpha-expansin 3 [Cicer arietinum]
  misc_feature (11)..(252): NCBI GI NO: 29466641 NR Description: expansin [Prunus persica]
  misc_feature (16)..(252): NCBI GI NO: 38046730 NR Description: alpha-expansin 3
  misc_feature (13)..(252): NCBI GI NO: 29467507 NR Description: expansin [Pyrus communis]
MEFFGKMIISLSLIMMIMWKSVDGYSSGWVNARATFYGGADASGTMGGACGYGNLYSQGYGTNTAALSTALFNGGQSCGACFQIKCVNDPKWCIGGTITVTGTNFCPPNFAQANNAGGWCNPPQHHFDLAQPIFLRIAQYKAGVVPVQYRRVACRRKGGIRFTINGHSYFNLVLITNVAGAGDVISVSIKGTNTRWQSMSRNWGQNWQSNAKLDGQALSFKVTTSDGRTVISNNATPRNWSFGQTYTGKQFRAQR

SEQ ID NO: 2837 - protein, 249 aa, Arabidopsis thaliana
  peptide (1)..(249): Ceres Seq. ID no. 12324681
  misc_feature (154)..(231): Pfam Name: Pfam Description:  Pollen allergen
  misc_feature (1)..(249): NCBI GI NO: 15241183 NR Description: expansin, putative; protein id: At5g56320
  misc_feature (1)..(249): NCBI GI NO: 21593755 NR Description: expansin [Arabidopsis thaliana]
  misc_feature (1)..(246): NCBI GI NO: 29467505 NR Description: expansin [Pyrus communis]
  misc_feature (1)..(246): NCBI GI NO: 22325441 NR Description: expansin, putative; protein id: At2g03090
  misc_feature (5)..(246): NCBI GI NO: 17484121 NR Description: alpha-expansin [Prunus cerasus]
  misc_feature (15)..(246): NCBI GI NO: 20137710 NR Description: Alpha-expansin 15 precursor
  misc_feature (2)..(246): NCBI GI NO: 21615407 NR Description: alpha-expansin 3 [Cicer arietinum]
  misc_feature (5)..(246): NCBI GI NO: 29466641 NR Description: expansin [Prunus persica]
  misc_feature (10)..(246): NCBI GI NO: 38046730 NR Description: alpha-expansin 3
  misc_feature (7)..(246): NCBI GI NO: 29467507 NR Description: expansin [Pyrus communis]
MIISLSLIMMIMWKSVDGYSSGWVNARATFYGGADASGTMGGACGYGNLYSQGYGTNTAALSTALFNGGQSCGACFQIKCVNDPKWCIGGTITVTGTNFCPPNFAQANNAGGWCNPPQHHFDLAQPIFLRIAQYKAGVVPVQYRRVACRRKGGIRFTINGHSYFNLVLITNVAGAGDVISVSIKGTNTRWQSMSRNWGQNWQSNAKLDGQALSFKVTTSDGRTVISNNATPRNWSFGQTYTGKQFRAQR

SEQ ID NO: 2838 - protein, 241 aa, Arabidopsis thaliana
  peptide (1)..(241): Ceres Seq. ID no. 12324682
  misc_feature (146)..(223): Pfam Name: Pfam Description:  Pollen allergen
  misc_feature (1)..(241): NCBI GI NO: 15241183 NR Description: expansin, putative; protein id: At5g56320
  misc_feature (1)..(241): NCBI GI NO: 21593755 NR Description: expansin [Arabidopsis thaliana]
  misc_feature (1)..(238): NCBI GI NO: 29467505 NR Description: expansin [Pyrus communis]
  misc_feature (1)..(238): NCBI GI NO: 22325441 NR Description: expansin, putative; protein id: At2g03090
  misc_feature (1)..(238): NCBI GI NO: 17484121 NR Description: alpha-expansin [Prunus cerasus]
  misc_feature (7)..(238): NCBI GI NO: 20137710 NR Description: Alpha-expansin 15 precursor
  misc_feature (1)..(238): NCBI GI NO: 21615407 NR Description: alpha-expansin 3 [Cicer arietinum]
  misc_feature (1)..(238): NCBI GI NO: 29466641 NR Description: expansin [Prunus persica]
  misc_feature (2)..(238): NCBI GI NO: 38046730 NR Description: alpha-expansin 3
  misc_feature (1)..(238): NCBI GI NO: 29467507 NR Description: expansin [Pyrus communis]
MMIMWKSVDGYSSGWVNARATFYGGADASGTMGGACGYGNLYSQGYGTNTAALSTALFNGGQSCGACFQIKCVNDPKWCIGGTITVTGTNFCPPNFAQANNAGGWCNPPQHHFDLAQPIFLRIAQYKAGVVPVQYRRVACRRKGGIRFTINGHSYFNLVLITNVAGAGDVISVSIKGTNTRWQSMSRNWGQNWQSNAKLDGQALSFKVTTSDGRTVISNNATPRNWSFGQTYTGKQFRAQR

SEQ ID NO: 2839 - DNA, 1032 bp, Arabidopsis thaliana
  misc_feature (1)..(1032): Ceres Seq. ID no. 12385678
aacctcccttaggcactttctacagagcagctaatcaaaaaaaaaaaaaaaaaaccttgttcttctcttcttcttcttcctctctcacaaatttgactttcatagaagaaaaaaatggtgactacatcgtcacgaaccaagtcaaacggaccggtgcttcgttcacaatcaccgtcaggtcgattttgcggtggttactcaagagccgttccgtcatcttcttcatcagctttcgcttcatcaacgagttctagcttttcatctccgtcgtcagcttttttcagcaatcaccgtcatcacgagagcaatcacagtcaccaccgatctgcgtcaccgactcgtgtgaatctctacacagcgcaaccgatgtctcagtcgtttcgttactctctcgatagcagatctatatctccgactaacaaatcgatctccgtttcgaagaatcagccaccgagccataatcacaagatctcaaggagatgtatgtgttctccgacgacgcatccaggatctttcagatgcagtctacataagaacgtagcgaatccacatggtcaaggtacagcttcgtatacaacgaatggattgaatatgcgtcgatctgcgatgactaattcgctggtgagaattggtggtgttgaaggagagtgggtgagaagagctttgactactttgattcgaccttcttcgcatcatctgaaaagacgagctgcttatcagccacgtcctagtcgactctcaatcatggcgaaagctgatgagaattgattttgatctggattttggttaattcaggtttgttttgtttgttgttcttctctctttaaacgaaaaccaccacaggatttagtagatccggcgaagaagtcttgttatgaagctaaggtctgcgaagaagaatcatcctcgagaaatcgagattttgtaaaaggaagaaacacacacctatcataatttttttgttgttgggtgaaagaagatgctagaatgcattgtacatacgttctcttttttactgtttttgttgctccc

SEQ ID NO: 2840 - protein, 217 aa, Arabidopsis thaliana
  peptide (1)..(217): Ceres Seq. ID no. 12385679
  misc_feature (1)..(217): NCBI GI NO: 15238947 NR Description: putative protein; protein id: At5g11090
  misc_feature (1)..(216): NCBI GI NO: 15238753 NR Description: serine-rich protein; protein id: At5g25280.1
  misc_feature (1)..(216): NCBI GI NO: 21618161 NR Description: serine-rich protein [Arabidopsis thaliana]
  misc_feature (2)..(216): NCBI GI NO: 24461857 NR Description: CTV.15 [Poncirus trifoliata]
  misc_feature (42)..(207): NCBI GI NO: 15241329 NR Description: putative protein; protein id: At5g20370.1
  misc_feature (135)..(214): NCBI GI NO: 30017516 NR Description: hypothetical protein
MVTTSSRTKSNGPVLRSQSPSGRFCGGYSRAVPSSSSSAFASSTSSSFSSPSSAFFSNHRHHESNHSHHRSASPTRVNLYTAQPMSQSFRYSLDSRSISPTNKSISVSKNQPPSHNHKISRRCMCSPTTHPGSFRCSLHKNVANPHGQGTASYTTNGLNMRRSAMTNSLVRIGGVEGEWVRRALTTLIRPSSHHLKRRAAYQPRPSRLSIMAKADEN

SEQ ID NO: 2841 - protein, 133 aa, Arabidopsis thaliana
  peptide (1)..(133): Ceres Seq. ID no. 12385680
  misc_feature (1)..(133): NCBI GI NO: 15238947 NR Description: putative protein; protein id: At5g11090
  misc_feature (1)..(132): NCBI GI NO: 15238753 NR Description: serine-rich protein; protein id: At5g25280.1
  misc_feature (1)..(132): NCBI GI NO: 21618161 NR Description: serine-rich protein [Arabidopsis thaliana]
  misc_feature (1)..(132): NCBI GI NO: 24461857 NR Description: CTV.15 [Poncirus trifoliata]
  misc_feature (1)..(123): NCBI GI NO: 15241329 NR Description: putative protein; protein id: At5g20370.1
  misc_feature (51)..(130): NCBI GI NO: 30017516 NR Description: hypothetical protein
MSQSFRYSLDSRSISPTNKSISVSKNQPPSHNHKISRRCMCSPTTHPGSFRCSLHKNVANPHGQGTASYTTNGLNMRRSAMTNSLVRIGGVEGEWVRRALTTLIRPSSHHLKRRAAYQPRPSRLSIMAKADEN

SEQ ID NO: 2842 - DNA, 1714 bp, Arabidopsis thaliana
  misc_feature (1)..(1714): Ceres Seq. ID no. 12369888
aaagtcctttgcttcatttcttataaaactaaaccaccttcttcatcatcattcatcaccaatctatctcatattcaatatactgaatatggactcattctacttctgtatatacacatgggatccaaacttaaactttaccctctcttaaatcactcatccgtttttcacccagacagtcgttaccaatcggcccctacaatggaggaagagcaacaacaacttcgtgttctcttcgcgaaatacgagatgggaaggttactaggcaaaggaacattcggaaaagtttattacggcaaagagataacaaccggagaaagcgttgcaatcaaaatcatcaacaaagatcaagtcaaacgtgaaggtatgatggaacaaatcaaacgagagatctcaatcatgagacttgttcgtcatccaaacatcgttgagttaaaagaagtcatggctacaaaaacaaagatcttctttatcatggaatacgttaaaggcggtgaacttttctccaagatcgttaatggaaagcttaaagaagactctgctcgtaagtatttccaacaattaatctcagccgttgatttttgtcatagtagaggcgtttctcaccgagatctaaaaccggagaatctcttagttgacgagaacggagatcttaaggtttcagattttggtctctctgctttaccggaacagattttacaagacggtttgcttcatactcagtgtggaactccggcgtatgttgcaccggaggttttgaggaagaaaggttacgacggagctaaagctgatatttggtcgtgtggtttatcttgtacgtgcttctcgctggattcttaccgtttcaagatgagaacctaatgaaaatgtatcggaagatcttcaaatcggagtttgagtatccgccgtggttttcaccggagtccaagaggttgatttcaaagcttttagttgttgatcctaacaaacggatctcgataccggcgattatgcgaacaccgtggtttcgtaaaaacatcaactctccgatcgagttcaagatcgatgagctcgagatccaaaacgtagaagacgaaacaccaacaacaacagcaacaacagcaacaacagcaacaacaacaacaacaccggtctcgccgaagttctttaacgcgtttgaattcatctcttctatgtcatcaggatttgatctatcaagtttgttcgagagtaagaggaagctgagatctatgtttacgtcacggtggtcggcgtcggagataatggggaagcttgaagggatagggaaagagatgaatatgaaggtgaagaggactaaagactttaaggtgaagttgtttgggaaaacggaagggaggaaaggacagattgcggtgacggctgaggttttcgaggttgcgccggaggttgccgtcgttgagttgtgtaagtcggcgggagatactttggagtataataggttgtatgaagaacatgtccggccagcgttggaggagatagtgtggtcgtggcacggtgataatcataataataatattgttaagagtaatggtaattatgttagtgatgaaaattctggtagtgactgctaagagaatgtaatgatagttatgtaaattaaactgtgtatttttgttaatcagttggtagattcaaggaagtttttgtaaattgtgtatatagaagttgaggtttattattattctctttgagc

SEQ ID NO: 2843 - protein, 286 aa, Arabidopsis thaliana
  peptide (1)..(286): Ceres Seq. ID no. 12369889
  misc_feature (82)..(270): Pfam Name: Pfam Description:  Protein kinase domain
  misc_feature (40)..(270): NCBI GI NO: 18420882 NR Description: serine/threonine protein kinase-like protein
  misc_feature (40)..(270): NCBI GI NO: 15215664 NR Description: AT5g25110/T11H3_120 [Arabidopsis thaliana]
  misc_feature (68)..(270): NCBI GI NO: 30683398 NR Description: CBL-interacting protein kinase 5
  misc_feature (68)..(270): NCBI GI NO: 24899813 NR Description: serine/threonine protein kinase-like protein
  misc_feature (68)..(270): NCBI GI NO: 15224679 NR Description: putative protein kinase; protein id: At2g25090
  misc_feature (77)..(270): NCBI GI NO: 15242509 NR Description: serine threonine protein kinase
  misc_feature (72)..(270): NCBI GI NO: 33146431 NR Description: putative Serine/threonine Kinase
  misc_feature (72)..(270): NCBI GI NO: 34903780 NR Description: unnamed protein product
  misc_feature (77)..(270): NCBI GI NO: 23428550 NR Description: Serine/threonine Kinase [Persea americana]
  misc_feature (77)..(270): NCBI GI NO: 34907870 NR Description: putative serine/threonine protein kinase
KVLCFISYKTKPPSSSSFITNLSHIQYTEYGLILLLYIHMGSKLKLYPLLNHSSVFHPDSRYQSAPTMEEEQQQLRVLFAKYEMGRLLGKGTFGKVYYGKEITTGESVAIKIINKDQVKREGMMEQIKREISIMRLVRHPNIVELKEVMATKTKIFFIMEYVKGGELFSKIVNGKLKEDSARKYFQQLISAVDFCHSRGVSHRDLKPENLLVDENGDLKVSDFGLSALPEQILQDGLLHTQCGTPAYVAPEVLRKKGYDGAKADIWSCGLSCTCFSLDSYRFKMRT

SEQ ID NO: 2844 - protein, 247 aa, Arabidopsis thaliana
  peptide (1)..(247): Ceres Seq. ID no. 12369890
  misc_feature (43)..(231): Pfam Name: Pfam Description:  Protein kinase domain
  misc_feature (1)..(231): NCBI GI NO: 18420882 NR Description: serine/threonine protein kinase-like protein
  misc_feature (1)..(231): NCBI GI NO: 15215664 NR Description: AT5g25110/T11H3_120 [Arabidopsis thaliana]
  misc_feature (29)..(231): NCBI GI NO: 30683398 NR Description: CBL-interacting protein kinase 5
  misc_feature (29)..(231): NCBI GI NO: 24899813 NR Description: serine/threonine protein kinase-like protein
  misc_feature (29)..(231): NCBI GI NO: 15224679 NR Description: putative protein kinase; protein id: At2g25090
  misc_feature (38)..(231): NCBI GI NO: 15242509 NR Description: serine threonine protein kinase
  misc_feature (33)..(231): NCBI GI NO: 33146431 NR Description: putative Serine/threonine Kinase
  misc_feature (33)..(231): NCBI GI NO: 34903780 NR Description: unnamed protein product
  misc_feature (38)..(231): NCBI GI NO: 23428550 NR Description: Serine/threonine Kinase [Persea americana]
  misc_feature (38)..(231): NCBI GI NO: 34907870 NR Description: putative serine/threonine protein kinase
MGSKLKLYPLLNHSSVFHPDSRYQSAPTMEEEQQQLRVLFAKYEMGRLLGKGTFGKVYYGKEITTGESVAIKIINKDQVKREGMMEQIKREISIMRLVRHPNIVELKEVMATKTKIFFIMEYVKGGELFSKIVNGKLKEDSARKYFQQLISAVDFCHSRGVSHRDLKPENLLVDENGDLKVSDFGLSALPEQILQDGLLHTQCGTPAYVAPEVLRKKGYDGAKADIWSCGLSCTCFSLDSYRFKMRT

SEQ ID NO: 2845 - protein, 243 aa, Arabidopsis thaliana
  peptide (1)..(243): Ceres Seq. ID no. 12369891
  misc_feature (92)..(151): Pfam Name: Pfam Description:  NAF domain
  misc_feature (1)..(243): NCBI GI NO: 18420882 NR Description: serine/threonine protein kinase-like protein
  misc_feature (1)..(243): NCBI GI NO: 15215664 NR Description: AT5g25110/T11H3_120 [Arabidopsis thaliana]
  misc_feature (1)..(225): NCBI GI NO: 30683398 NR Description: CBL-interacting protein kinase 5
  misc_feature (1)..(216): NCBI GI NO: 24899813 NR Description: serine/threonine protein kinase-like protein
  misc_feature (1)..(238): NCBI GI NO: 15224679 NR Description: putative protein kinase; protein id: At2g25090
  misc_feature (1)..(225): NCBI GI NO: 15242509 NR Description: serine threonine protein kinase
  misc_feature (1)..(220): NCBI GI NO: 33146431 NR Description: putative Serine/threonine Kinase
  misc_feature (1)..(230): NCBI GI NO: 34903780 NR Description: unnamed protein product
  misc_feature (1)..(220): NCBI GI NO: 23428550 NR Description: Serine/threonine Kinase [Persea americana]
  misc_feature (1)..(225): NCBI GI NO: 34907870 NR Description: putative serine/threonine protein kinase
MKMYRKIFKSEFEYPPWFSPESKRLISKLLVVDPNKRISIPAIMRTPWFRKNINSPIEFKIDELEIQNVEDETPTTTATTATTATTTTTPVSPKFFNAFEFISSMSSGFDLSSLFESKRKLRSMFTSRWSASEIMGKLEGIGKEMNMKVKRTKDFKVKLFGKTEGRKGQIAVTAEVFEVAPEVAVVELCKSAGDTLEYNRLYEEHVRPALEEIVWSWHGDNHNNNIVKSNGNYVSDENSGSDC

SEQ ID NO: 2846 - DNA, 1060 bp, Arabidopsis thaliana
  misc_feature (1)..(1060): Ceres Seq. ID no. 12389046
gcataaagagaaactaacattttcaattcaatgacaaagccacatagctaataaatcgaaacctcaaaaaacaaacaagagcttatgacattgtcagattgtctctcactgttgtttagcttcgaccttcttcttctgccagagcctgtccacgccactgtctgcgtctccctgagcacggacaaatccgcagagagcaaaagtggtgaattggccagtgtagagaccattagcatcaagatgaccaatgttaagctgaactgaagcatgatcctttgatgtgatcattctgtttgttgccgagcatttccttggaatgtagagctctgtgacctgacctgcgtcgttctccatttttgagatttagcttcaaaaaaaaatcgatctgcgaggaagaagaagaatctgagagaggtttggcggcgacaaagatagcagattctcagctttcgataacaataatggatcttgttcaacaagctactaactacaagcagcttaagaagggagctaatgaagctaccaaaacattgaaccgtggaatctctgagttcgttgttatggctgctgatgctgaaccacttgagattcttcttcatcttcctttgcttgccgaagataagaatgtgccatatgtgtttgtaccttcgaaacaagcattgggaagagcatgtggagtaacaagacctgttattgcttgttcagtgacatcgaatgaggcaagccagttgaaatcgcagattcagcatctcaaggatgcgattgagaagctcctgatctaaggatttctgctcagtatgaagagtctctgcaatgtggaatggctctgactgaagttagtttgtgtgatttacctatttgaagaatgtattgtgactggtgttaatgcttagtatgtggatcatcatcgctcatttgtgcaattgagtttcttagatttttattttggtgcttgccaagcactgcttggtttgtgttgagacataacaggtaaagagccgtcatggttctttaactgtctgtttattacactaacgatctatccttaagtcccattacg

SEQ ID NO: 2847 - protein, 106 aa, Arabidopsis thaliana
  peptide (1)..(106): Ceres Seq. ID no. 12389047
  misc_feature (1)..(92): Pfam Name: Pfam Description:  Ribosomal protein L7Ae/L30e/S12e/Gadd45 family
  misc_feature (1)..(106): NCBI GI NO: 15236127 NR Description: Ribosomal protein L7Ae - like
  misc_feature (1)..(106): NCBI GI NO: 15241276 NR Description: ribosomal protein L7Ae-like; protein id: At5g20160
  misc_feature (1)..(106): NCBI GI NO: 21592866 NR Description: Ribosomal protein L7Ae-like [Arabidopsis thaliana]
  misc_feature (1)..(106): NCBI GI NO: 15235416 NR Description: Ribosomal protein L7Ae -like
  misc_feature (20)..(106): NCBI GI NO: 30687670 NR Description: ribosomal protein L7Ae family
  misc_feature (1)..(24): NCBI GI NO: 30687670 NR Description: ribosomal protein L7Ae family
  misc_feature (1)..(106): NCBI GI NO: 37530712 NR Description: putative ribosomal protein L7Ae-like
  misc_feature (1)..(86): NCBI GI NO: 25295061 NR Description: Ribosomal protein L7Ae-like (partial)
  misc_feature (1)..(106): NCBI GI NO: 28302201 NR Description: Similar to NHP2 non-histone chromosome protein 2-like 1
  misc_feature (1)..(106): NCBI GI NO: 17535189 NR Description: Ribosomal protein L7Ae/L30e/S12e/Gadd45 family (14
MDLVQQATNYKQLKKGANEATKTLNRGISEFVVMAADAEPLEILLHLPLLAEDKNVPYVFVPSKQALGRACGVTRPVIACSVTSNEASQLKSQIQHLKDAIEKLLI

SEQ ID NO: 2848 - protein, 73 aa, Arabidopsis thaliana
  peptide (1)..(73): Ceres Seq. ID no. 12389048
  misc_feature (1)..(59): Pfam Name: Pfam Description:  Ribosomal protein L7Ae/L30e/S12e/Gadd45 family
  misc_feature (1)..(73): NCBI GI NO: 15236127 NR Description: Ribosomal protein L7Ae - like
  misc_feature (1)..(73): NCBI GI NO: 15241276 NR Description: ribosomal protein L7Ae-like; protein id: At5g20160
  misc_feature (1)..(73): NCBI GI NO: 21592866 NR Description: Ribosomal protein L7Ae-like [Arabidopsis thaliana]
  misc_feature (1)..(73): NCBI GI NO: 15235416 NR Description: Ribosomal protein L7Ae -like
  misc_feature (1)..(73): NCBI GI NO: 30687670 NR Description: ribosomal protein L7Ae family
  misc_feature (1)..(73): NCBI GI NO: 37530712 NR Description: putative ribosomal protein L7Ae-like
  misc_feature (1)..(53): NCBI GI NO: 25295061 NR Description: Ribosomal protein L7Ae-like (partial)
  misc_feature (1)..(73): NCBI GI NO: 28302201 NR Description: Similar to NHP2 non-histone chromosome protein 2-like 1
  misc_feature (1)..(73): NCBI GI NO: 17535189 NR Description: Ribosomal protein L7Ae/L30e/S12e/Gadd45 family (14
  misc_feature (1)..(73): NCBI GI NO: 38174386 NR Description: Unknown (protein for MGC:75724)
MAADAEPLEILLHLPLLAEDKNVPYVFVPSKQALGRACGVTRPVIACSVTSNEASQLKSQIQHLKDAIEKLLI

SEQ ID NO: 2849 - protein, 59 aa, Arabidopsis thaliana
  peptide (1)..(59): Ceres Seq. ID no. 12389049
MTLSDCLSLLFSFDLLLLPEPVHATVCVSLSTDKSAESKSGELASVETISIKMTNVKLN

SEQ ID NO: 2850 - DNA, 1028 bp, Arabidopsis thaliana
  misc_feature (1)..(1028): Ceres Seq. ID no. 12331321
atgacaaaatgtttgttttttgggtttggtctgaaacaggatggggtaccaacgagaagctgatcatatcaatactagctcacaggaacgcagcacaacgcagcttgatccgcagcgtttatgcagctacctacaatgaggatcttctcaaagcattagacaaagagctttctagcgactttgagagagctgtgatgttgtggactcttgatccaccagagagagatgcttatttggctaaagaatccaccaagatgttcaccaagaacaattgggttcttgttgaaatcgcttgcacaaggcctgctcttgagcttatcaaggtcaagcaagcttaccaagctcgatacaagaaatcaatcgaggaagatgtcgcgcaacacacatctggtgaccttcgtaagctcttggcttcctcttgtgagcactttcaggtatgaaggagatgatgtgaacatgatgcttgcaagatctgaagctaagatacttcacgagaaggtctcagagaaatcctacagtgacgatgacttcatcagaatcttgacaacaagaagcaaagcacactcggtgcaacactcaaccactacaacaacgagtatggaaacgccattaacaagaacttgaaggaagagtcggacgacaatgactacatgaaactactaagagctgtaatcacatgtttgacataccctgagaagcattttgagaaggttcttcgtctatcaatcaacaaaatgggaacagacgaatggggactaacccgagtcgtgactacacgaactgaagttgacatggaacgcatcaaagaggaatatcagcgaagaaacagcattcctttggaccgtgctatcgccaaagacacttctggtgactatgaggacatgcttgttgctcttctcggacatggcgatgcttgaaactgtttcaactttcgagttcctcctttctcttactgcatggtttgttttaaataaaagagttgtgaaactggttctgcaactatttatcaatgatcgtttgagtttgtc

SEQ ID NO: 2851 - protein, 145 aa, Arabidopsis thaliana
  peptide (1)..(145): Ceres Seq. ID no. 12331322
  misc_feature (13)..(136): NCBI GI NO: 7441509 NR Description: annexin - alfalfa (fragment)
  misc_feature (13)..(136): NCBI GI NO: 3928134 NR Description: annexin P38 [Capsicum annuum]
  misc_feature (13)..(136): NCBI GI NO: 3378208 NR Description: annexin p34 [Lycopersicon esculentum]
  misc_feature (13)..(136): NCBI GI NO: 8247363 NR Description: annexin p34 [Solanum tuberosum]
  misc_feature (13)..(136): NCBI GI NO: 2129923 NR Description: annexin - pepper
  misc_feature (13)..(136): NCBI GI NO: 12084607 NR Description: Chain A, Crystal Structure Of Annexin 24
  misc_feature (13)..(136): NCBI GI NO: 2467253 NR Description: annexin [Nicotiana tabacum]
  misc_feature (13)..(136): NCBI GI NO: 3979715 NR Description: annexin cap32 [Capsicum annuum]
  misc_feature (12)..(145): NCBI GI NO: 7441510 NR Description: annexin - upland cotton (fragment)
  misc_feature (10)..(145): NCBI GI NO: 21264397 NR Description: Annexin-like protein RJ4
DKMFVFWVWSETGWGTNEKLIISILAHRNAAQRSLIRSVYAATYNEDLLKALDKELSSDFERAVMLWTLDPPERDAYLAKESTKMFTKNNWVLVEIACTRPALELIKVKQAYQARYKKSIEEDVAQHTSGDLRKLLASSCEHFQV

SEQ ID NO: 2852 - protein, 143 aa, Arabidopsis thaliana
  peptide (1)..(143): Ceres Seq. ID no. 12331323
  misc_feature (11)..(134): NCBI GI NO: 7441509 NR Description: annexin - alfalfa (fragment)
  misc_feature (11)..(134): NCBI GI NO: 3928134 NR Description: annexin P38 [Capsicum annuum]
  misc_feature (11)..(134): NCBI GI NO: 3378208 NR Description: annexin p34 [Lycopersicon esculentum]
  misc_feature (11)..(134): NCBI GI NO: 8247363 NR Description: annexin p34 [Solanum tuberosum]
  misc_feature (11)..(134): NCBI GI NO: 2129923 NR Description: annexin - pepper
  misc_feature (11)..(134): NCBI GI NO: 12084607 NR Description: Chain A, Crystal Structure Of Annexin 24
  misc_feature (11)..(134): NCBI GI NO: 2467253 NR Description: annexin [Nicotiana tabacum]
  misc_feature (11)..(134): NCBI GI NO: 3979715 NR Description: annexin cap32 [Capsicum annuum]
  misc_feature (10)..(143): NCBI GI NO: 7441510 NR Description: annexin - upland cotton (fragment)
  misc_feature (8)..(143): NCBI GI NO: 21264397 NR Description: Annexin-like protein RJ4
MFVFWVWSETGWGTNEKLIISILAHRNAAQRSLIRSVYAATYNEDLLKALDKELSSDFERAVMLWTLDPPERDAYLAKESTKMFTKNNWVLVEIACTRPALELIKVKQAYQARYKKSIEEDVAQHTSGDLRKLLASSCEHFQV

SEQ ID NO: 2853 - protein, 132 aa, Arabidopsis thaliana
  peptide (1)..(132): Ceres Seq. ID no. 12331324
  misc_feature (63)..(112): NCBI GI NO: 7441509 NR Description: annexin - alfalfa (fragment)
  misc_feature (63)..(111): NCBI GI NO: 3928134 NR Description: annexin P38 [Capsicum annuum]
  misc_feature (63)..(112): NCBI GI NO: 3378208 NR Description: annexin p34 [Lycopersicon esculentum]
  misc_feature (63)..(112): NCBI GI NO: 8247363 NR Description: annexin p34 [Solanum tuberosum]
  misc_feature (63)..(112): NCBI GI NO: 2129923 NR Description: annexin - pepper
  misc_feature (63)..(112): NCBI GI NO: 12084607 NR Description: Chain A, Crystal Structure Of Annexin 24
  misc_feature (63)..(112): NCBI GI NO: 2467253 NR Description: annexin [Nicotiana tabacum]
  misc_feature (63)..(112): NCBI GI NO: 3979715 NR Description: annexin cap32 [Capsicum annuum]
  misc_feature (63)..(112): NCBI GI NO: 15238320 NR Description: annexin; protein id: At5g65020
  misc_feature (63)..(112): NCBI GI NO: 15238105 NR Description: annexin -like protein; protein id: At5g10230
MLIWLKNPPRCSPRTIGFLLKSLAQGLLLSLSRSSKLTKLDTRNQSRKMSRNTHLVTFVSSWLPLVSTFRYEGDDVNMMLARSEAKILHEKVSEKSYSDDDFIRILTTRSKAHSVQHSTTTTTSMETPLTRT

SEQ ID NO: 2854 - DNA, 1249 bp, Arabidopsis thaliana
  misc_feature (1)..(1249): Ceres Seq. ID no. 12369904
attctaaagatttttctctccggagacgttaagagaagaaacagccaacggattagggatcttaccgttctgcgattcgccgagtttgaagctttttttagagacttcaatggtgagccaaggaatggtatctcttacaaagtctctatgcactatgactccaagagtccgtctcaagaatccgaatatgttgcagaaactaaagactggatcttgtaatttccgtttcagaaatctccgtgtcttatgcacaacaaagctgtctcagtgggaaccgtcacctttcattcatgcttctgcagaagaagctgctgatatagtattggacaaaaccgcgaatgtgttcgaatctattgtctccgagagtgcagaggaagagaaagtagatatgtcagcgcaacaacgaactaattctcaagttcaggtacttaaatggccaatatggcttttgggtccatctgttctcctcacaagcggtatggcgcctactttatggcttccgttgtcatcggtttttctcggttccaacgtggttagtctactttctttgatcggtctagattgcattttcaatcttggagcaacccttttcctcttaatggctgattcttgcgcacgtcctaaagacccatcacagtcctgcaacagcaaaccaccatttagctataagttctggaacatgttttcactcataatcgggtttctagtcccaatgttacttctcttcggatcccaatctggccttctcgcttctctccagccccagattcctttcctctcgtccgctgttatcctcttcccgtacttcattctccttgctgttcagacattaacagagatcctcacatggcactggcaatcaccggtctggctagtcacaccagttgtctacgaggcttacagaatcttgcaactgatgagagggttgacacttagtgcagaggtcaacgcaccggtttgggtggttcatatgcttcgtgggcttgtctcttggtgggtattgatcttgggaatgcaactcatgagagttgcttggtttgctggttttgcatctagaacaacaacaggtcagcaaccacaatctgttgcttctaagtaaagacagataaatgtttcttcgtttagtttttaaagtcatgtcaaagatttgtaactctttcttcactgtatagcttttattattcgtgggttggtgataaggattaaaaaaaaacacatattctttatgatcatattcgctcttttagtg

SEQ ID NO: 2855 - protein, 329 aa, Arabidopsis thaliana
  peptide (1)..(329): Ceres Seq. ID no. 12369905
  misc_feature (1)..(329): NCBI GI NO: 11281196 NR Description: hypothetical protein T8B10
  misc_feature (94)..(329): NCBI GI NO: 30695235 NR Description: expressed protein [Arabidopsis thaliana]
  misc_feature (164)..(329): NCBI GI NO: 30695238 NR Description: expressed protein [Arabidopsis thaliana]
  misc_feature (40)..(319): NCBI GI NO: 38605903 NR Description: OSJNBb0020O11.15
  misc_feature (111)..(275): NCBI GI NO: 34910348 NR Description: P0684B02.8
  misc_feature (43)..(274): NCBI GI NO: 15221197 NR Description: unknown protein; protein id: At1g48460.1
  misc_feature (142)..(297): NCBI GI NO: 23127993 NR Description: hypothetical protein [Nostoc punctiforme]
  misc_feature (43)..(274): NCBI GI NO: 25405928 NR Description: protein T1N15.7 [imported] - Arabidopsis thaliana
MVSQGMVSLTKSLCTMTPRVRLKNPNMLQKLKTGSCNFRFRNLRVLCTTKLSQWEPSPFIHASAEEAADIVLDKTANVFESIVSESAEEEKVDMSAQQRTNSQVQVLKWPIWLLGPSVLLTSGMAPTLWLPLSSVFLGSNVVSLLSLIGLDCIFNLGATLFLLMADSCARPKDPSQSCNSKPPFSYKFWNMFSLIIGFLVPMLLLFGSQSGLLASLQPQIPFLSSAVILFPYFILLAVQTLTEILTWHWQSPVWLVTPVVYEAYRILQLMRGLTLSAEVNAPVWVVHMLRGLVSWWVLILGMQLMRVAWFAGFASRTTTGQQPQSVASK

SEQ ID NO: 2856 - protein, 324 aa, Arabidopsis thaliana
  peptide (1)..(324): Ceres Seq. ID no. 12369906
  misc_feature (1)..(324): NCBI GI NO: 11281196 NR Description: hypothetical protein T8B10
  misc_feature (89)..(324): NCBI GI NO: 30695235 NR Description: expressed protein [Arabidopsis thaliana]
  misc_feature (159)..(324): NCBI GI NO: 30695238 NR Description: expressed protein [Arabidopsis thaliana]
  misc_feature (35)..(314): NCBI GI NO: 38605903 NR Description: OSJNBb0020O11.15
  misc_feature (106)..(270): NCBI GI NO: 34910348 NR Description: P0684B02.8
  misc_feature (38)..(269): NCBI GI NO: 15221197 NR Description: unknown protein; protein id: At1g48460.1
  misc_feature (137)..(292): NCBI GI NO: 23127993 NR Description: hypothetical protein [Nostoc punctiforme]
  misc_feature (38)..(269): NCBI GI NO: 25405928 NR Description: protein T1N15.7 [imported] - Arabidopsis thaliana
MVSLTKSLCTMTPRVRLKNPNMLQKLKTGSCNFRFRNLRVLCTTKLSQWEPSPFIHASAEEAADIVLDKTANVFESIVSESAEEEKVDMSAQQRTNSQVQVLKWPIWLLGPSVLLTSGMAPTLWLPLSSVFLGSNVVSLLSLIGLDCIFNLGATLFLLMADSCARPKDPSQSCNSKPPFSYKFWNMFSLIIGFLVPMLLLFGSQSGLLASLQPQIPFLSSAVILFPYFILLAVQTLTEILTWHWQSPVWLVTPVVYEAYRILQLMRGLTLSAEVNAPVWVVHMLRGLVSWWVLILGMQLMRVAWFAGFASRTTTGQQPQSVASK

SEQ ID NO: 2857 - protein, 314 aa, Arabidopsis thaliana
  peptide (1)..(314): Ceres Seq. ID no. 12369907
  misc_feature (1)..(314): NCBI GI NO: 11281196 NR Description: hypothetical protein T8B10
  misc_feature (79)..(314): NCBI GI NO: 30695235 NR Description: expressed protein [Arabidopsis thaliana]
  misc_feature (149)..(314): NCBI GI NO: 30695238 NR Description: expressed protein [Arabidopsis thaliana]
  misc_feature (25)..(304): NCBI GI NO: 38605903 NR Description: OSJNBb0020O11.15
  misc_feature (96)..(260): NCBI GI NO: 34910348 NR Description: P0684B02.8
  misc_feature (28)..(259): NCBI GI NO: 15221197 NR Description: unknown protein; protein id: At1g48460.1
  misc_feature (127)..(282): NCBI GI NO: 23127993 NR Description: hypothetical protein [Nostoc punctiforme]
  misc_feature (28)..(259): NCBI GI NO: 25405928 NR Description: protein T1N15.7 [imported] - Arabidopsis thaliana
MTPRVRLKNPNMLQKLKTGSCNFRFRNLRVLCTTKLSQWEPSPFIHASAEEAADIVLDKTANVFESIVSESAEEEKVDMSAQQRTNSQVQVLKWPIWLLGPSVLLTSGMAPTLWLPLSSVFLGSNVVSLLSLIGLDCIFNLGATLFLLMADSCARPKDPSQSCNSKPPFSYKFWNMFSLIIGFLVPMLLLFGSQSGLLASLQPQIPFLSSAVILFPYFILLAVQTLTEILTWHWQSPVWLVTPVVYEAYRILQLMRGLTLSAEVNAPVWVVHMLRGLVSWWVLILGMQLMRVAWFAGFASRTTTGQQPQSVASK

SEQ ID NO: 2858 - DNA, 1502 bp, Arabidopsis thaliana
  misc_feature (1)..(1502): Ceres Seq. ID no. 12576395
aaggtatctatttgcctagccagagttatatataggattgattgtctagtcttttcttatatgatttttgttctcatttactaatcaaagttctgcaaacttgtagttgttgtaggatttgttgctctggctctggtggtaggtctatgaaatcaacccatatcgtgaatggactgcaacatggtatcttcgtcccagtgggattgggagcatttgatcatgtccaatccgtcaaggactgaagatgacagcaaacagctacctactgagtgggaaattgaaaaaggtgaaggaattgaatctatagttccacatttctcaggccttgagagagtcagtagtggctctgccaccagcttctggcacactgctgtatcgaaaagctcacagtcgacctctatcaactcatcatctcccgaagccaaacgatgcaagcttgcatcagaaagttcccctggagattcttgcagcaacatagactttgtccaggtgaaggctcccacagctctcgaggtatccgttgcctcagctgaatcagatctttgtttaaaactaggaaagcggacatactctgaagaatactggggtagaaacaataatgaaatttcagcggtttctatgaagttgttaactccatctgttgtcgctgggaaatccaaattgtgtggtcagagcatgccagtcccgcgttgccaaattgatggctgtgaactggatctctcatctgctaagggttatcatcgtaagcacaaagtctgcgaaaagcattcaaagtgcccaaaagttagcgtgagtggcctggaacgtcggttctgccaacagtgtagcaggttccatgctgtctctgaatttgatgagaagaaacgaagctgccgaaaacgtctttctcatcataatgcgaggcgtcgtaagccacaaggagtattttcaatgaatcccgagagggtgtatgatcgaagacagcatacaaatatgttgtggaatggggtgtcccttaacgcgagatctgaagaaatgtatgaatggggtaataacacttatgatacaaagcctagacaaacggaaaaaagctttactctgagcttccagagaggtaatggctctgaggaccagctggttgctagtagcagccgtatgttctctacatctcaaacctcaggtgggttcccagcaggaaagtccaagtttcaacttcatggcgaagatgtgggagaatactcaggagtcctccatgaatctcaagatatccaccgtgctctctctcttctgtcaacctcttcggatcccctggcccaaccacatgtgcagccattttctctactctgttcatatgatgttgtaccaaaatagatgagtaagtaatgtgtaatttgtaaacctgttactcagttggtggatacttttccaaacctatgataaaaacctcgtcctagatcccgttaaatgccaaactttcggctactataactatgttatcgttatcattatcattgtttaacacc

SEQ ID NO: 2859 - protein, 393 aa, Arabidopsis thaliana
  peptide (1)..(393): Ceres Seq. ID no. 12576396
  misc_feature (174)..(252): Pfam Name: Pfam Description:  SBP domain
  misc_feature (1)..(393): NCBI GI NO: 18396302 NR Description: putative squamosa-promoter binding protein 2
  misc_feature (5)..(393): NCBI GI NO: 25403307 NR Description: protein F17L21.14
  misc_feature (1)..(378): NCBI GI NO: 22329813 NR Description: putative squamosa-promoter binding protein 2
  misc_feature (1)..(378): NCBI GI NO: 18650611 NR Description: At1g27370/F17L21_16 [Arabidopsis thaliana]
  misc_feature (5)..(378): NCBI GI NO: 9802546 NR Description: F17L21.15 [Arabidopsis thaliana]
  misc_feature (1)..(371): NCBI GI NO: 25456646 NR Description: squamosa promoter binding protein 2
  misc_feature (1)..(291): NCBI GI NO: 15239820 NR Description: squamosa promoter binding protein-like 2
  misc_feature (117)..(381): NCBI GI NO: 18423163 NR Description: putative protein; protein id: At5g50570
  misc_feature (117)..(381): NCBI GI NO: 21536841 NR Description: unknown [Arabidopsis thaliana]
  misc_feature (127)..(373): NCBI GI NO: 15227896 NR Description: putative squamosa-promoter binding protein
MDCNMVSSSQWDWEHLIMSNPSRTEDDSKQLPTEWEIEKGEGIESIVPHFSGLERVSSGSATSFWHTAVSKSSQSTSINSSSPEAKRCKLASESSPGDSCSNIDFVQVKAPTALEVSVASAESDLCLKLGKRTYSEEYWGRNNNEISAVSMKLLTPSVVAGKSKLCGQSMPVPRCQIDGCELDLSSAKGYHRKHKVCEKHSKCPKVSVSGLERRFCQQCSRFHAVSEFDEKKRSCRKRLSHHNARRRKPQGVFSMNPERVYDRRQHTNMLWNGVSLNARSEEMYEWGNNTYDTKPRQTEKSFTLSFQRGNGSEDQLVASSSRMFSTSQTSGGFPAGKSKFQLHGEDVGEYSGVLHESQDIHRALSLLSTSSDPLAQPHVQPFSLLCSYDVVPK

SEQ ID NO: 2860 - protein, 389 aa, Arabidopsis thaliana
  peptide (1)..(389): Ceres Seq. ID no. 12576397
  misc_feature (170)..(248): Pfam Name: Pfam Description:  SBP domain
  misc_feature (1)..(389): NCBI GI NO: 18396302 NR Description: putative squamosa-promoter binding protein 2
  misc_feature (1)..(389): NCBI GI NO: 25403307 NR Description: protein F17L21.14
  misc_feature (1)..(374): NCBI GI NO: 22329813 NR Description: putative squamosa-promoter binding protein 2
  misc_feature (1)..(374): NCBI GI NO: 18650611 NR Description: At1g27370/F17L21_16 [Arabidopsis thaliana]
  misc_feature (1)..(374): NCBI GI NO: 9802546 NR Description: F17L21.15 [Arabidopsis thaliana]
  misc_feature (1)..(367): NCBI GI NO: 25456646 NR Description: squamosa promoter binding protein 2
  misc_feature (1)..(287): NCBI GI NO: 15239820 NR Description: squamosa promoter binding protein-like 2
  misc_feature (113)..(377): NCBI GI NO: 18423163 NR Description: putative protein; protein id: At5g50570
  misc_feature (113)..(377): NCBI GI NO: 21536841 NR Description: unknown [Arabidopsis thaliana]
  misc_feature (123)..(369): NCBI GI NO: 15227896 NR Description: putative squamosa-promoter binding protein
MVSSSQWDWEHLIMSNPSRTEDDSKQLPTEWEIEKGEGIESIVPHFSGLERVSSGSATSFWHTAVSKSSQSTSINSSSPEAKRCKLASESSPGDSCSNIDFVQVKAPTALEVSVASAESDLCLKLGKRTYSEEYWGRNNNEISAVSMKLLTPSVVAGKSKLCGQSMPVPRCQIDGCELDLSSAKGYHRKHKVCEKHSKCPKVSVSGLERRFCQQCSRFHAVSEFDEKKRSCRKRLSHHNARRRKPQGVFSMNPERVYDRRQHTNMLWNGVSLNARSEEMYEWGNNTYDTKPRQTEKSFTLSFQRGNGSEDQLVASSSRMFSTSQTSGGFPAGKSKFQLHGEDVGEYSGVLHESQDIHRALSLLSTSSDPLAQPHVQPFSLLCSYDVVPK

SEQ ID NO: 2861 - protein, 376 aa, Arabidopsis thaliana
  peptide (1)..(376): Ceres Seq. ID no. 12576398
  misc_feature (157)..(235): Pfam Name: Pfam Description:  SBP domain
  misc_feature (1)..(376): NCBI GI NO: 18396302 NR Description: putative squamosa-promoter binding protein 2
  misc_feature (1)..(376): NCBI GI NO: 25403307 NR Description: protein F17L21.14
  misc_feature (1)..(361): NCBI GI NO: 22329813 NR Description: putative squamosa-promoter binding protein 2
  misc_feature (1)..(361): NCBI GI NO: 18650611 NR Description: At1g27370/F17L21_16 [Arabidopsis thaliana]
  misc_feature (1)..(361): NCBI GI NO: 9802546 NR Description: F17L21.15 [Arabidopsis thaliana]
  misc_feature (1)..(354): NCBI GI NO: 25456646 NR Description: squamosa promoter binding protein 2
  misc_feature (1)..(274): NCBI GI NO: 15239820 NR Description: squamosa promoter binding protein-like 2
  misc_feature (100)..(364): NCBI GI NO: 18423163 NR Description: putative protein; protein id: At5g50570
  misc_feature (100)..(364): NCBI GI NO: 21536841 NR Description: unknown [Arabidopsis thaliana]
  misc_feature (110)..(356): NCBI GI NO: 15227896 NR Description: putative squamosa-promoter binding protein
MSNPSRTEDDSKQLPTEWEIEKGEGIESIVPHFSGLERVSSGSATSFWHTAVSKSSQSTSINSSSPEAKRCKLASESSPGDSCSNIDFVQVKAPTALEVSVASAESDLCLKLGKRTYSEEYWGRNNNEISAVSMKLLTPSVVAGKSKLCGQSMPVPRCQIDGCELDLSSAKGYHRKHKVCEKHSKCPKVSVSGLERRFCQQCSRFHAVSEFDEKKRSCRKRLSHHNARRRKPQGVFSMNPERVYDRRQHTNMLWNGVSLNARSEEMYEWGNNTYDTKPRQTEKSFTLSFQRGNGSEDQLVASSSRMFSTSQTSGGFPAGKSKFQLHGEDVGEYSGVLHESQDIHRALSLLSTSSDPLAQPHVQPFSLLCSYDVVPK

SEQ ID NO: 2862 - DNA, 787 bp, Arabidopsis thaliana
  misc_feature (1)..(787): Ceres Seq. ID no. 12327422
acatttttcaaaaatctcttttgcccagagagagaagaagagacagatcggaaggagttgagtaagaatggcgaagctggtgctcttcaccgccgtaattatcgctattttctcccatggatcctccgtcgatgacaaatgcgccgcttgcaacgccgtcgctgaggaattagagttacagcttttaaaggaaaagccacgaaaccatcttgatatgagaaaccggctcaattctaaaggccagcgtgaaggaaaggtcattgattacagaataagcgacctgagggtggttgatttgttggacggtctgtgtgatagaatgcaggactatactctacaaaaggtggaacctaagaatagacaatgggtgaaagtaggaaattttgacaatctaacaaataaacaggaagcgaaagcgcatgcaaatgacatttcaacttattgtggaagattgctggaggaaactgaagatgagctaggtgaggtgataaagaatggctccctaaaagcaggagaagtccgaaaggttctgtgtcaaactttgagtaaccactgccgacaatcaagtgaaacagactcagaggatgaggaggacgacgatgcagatgaattataactcaatccagtgaaaagttcacgtcaaattaagatcccatcttagtagctatgttatagatacatccatccacaactcatatgtaacttaagacacctttcactttttaagttatgtcgaaactcgggtctagattcttatttatattgtggcaattgttcgttttccccc

SEQ ID NO: 2863 - protein, 182 aa, Arabidopsis thaliana
  peptide (1)..(182): Ceres Seq. ID no. 12327423
  misc_feature (1)..(182): NCBI GI NO: 18400653 NR Description: expressed protein; protein id: At1g42480
  misc_feature (1)..(182): NCBI GI NO: 21593763 NR Description: unknown [Arabidopsis thaliana]
  misc_feature (112)..(182): NCBI GI NO: 25373216 NR Description: unknown protein [imported] - Arabidopsis thaliana
  misc_feature (1)..(64): NCBI GI NO: 25373216 NR Description: unknown protein [imported] - Arabidopsis thaliana
  misc_feature (73)..(110): NCBI GI NO: 25373216 NR Description: unknown protein [imported] - Arabidopsis thaliana
MAKLVLFTAVIIAIFSHGSSVDDKCAACNAVAEELELQLLKEKPRNHLDMRNRLNSKGQREGKVIDYRISDLRVVDLLDGLCDRMQDYTLQKVEPKNRQWVKVGNFDNLTNKQEAKAHANDISTYCGRLLEETEDELGEVIKNGSLKAGEVRKVLCQTLSNHCRQSSETDSEDEEDDDADEL

SEQ ID NO: 2864 - protein, 133 aa, Arabidopsis thaliana
  peptide (1)..(133): Ceres Seq. ID no. 12327424
  misc_feature (1)..(133): NCBI GI NO: 18400653 NR Description: expressed protein; protein id: At1g42480
  misc_feature (1)..(133): NCBI GI NO: 21593763 NR Description: unknown [Arabidopsis thaliana]
  misc_feature (63)..(133): NCBI GI NO: 25373216 NR Description: unknown protein [imported] - Arabidopsis thaliana
  misc_feature (1)..(15): NCBI GI NO: 25373216 NR Description: unknown protein [imported] - Arabidopsis thaliana
  misc_feature (24)..(61): NCBI GI NO: 25373216 NR Description: unknown protein [imported] - Arabidopsis thaliana
MRNRLNSKGQREGKVIDYRISDLRVVDLLDGLCDRMQDYTLQKVEPKNRQWVKVGNFDNLTNKQEAKAHANDISTYCGRLLEETEDELGEVIKNGSLKAGEVRKVLCQTLSNHCRQSSETDSEDEEDDDADEL

SEQ ID NO: 2865 - protein, 98 aa, Arabidopsis thaliana
  peptide (1)..(98): Ceres Seq. ID no. 12327425
  misc_feature (1)..(98): NCBI GI NO: 18400653 NR Description: expressed protein; protein id: At1g42480
  misc_feature (1)..(98): NCBI GI NO: 21593763 NR Description: unknown [Arabidopsis thaliana]
  misc_feature (28)..(98): NCBI GI NO: 25373216 NR Description: unknown protein [imported] - Arabidopsis thaliana
  misc_feature (1)..(26): NCBI GI NO: 25373216 NR Description: unknown protein [imported] - Arabidopsis thaliana
MQDYTLQKVEPKNRQWVKVGNFDNLTNKQEAKAHANDISTYCGRLLEETEDELGEVIKNGSLKAGEVRKVLCQTLSNHCRQSSETDSEDEEDDDADEL

SEQ ID NO: 2866 - DNA, 936 bp, Arabidopsis thaliana
  misc_feature (1)..(936): Ceres Seq. ID no. 13493724
aacccacaaattgatctcttctctcttctcttacaccatcttcttcattcaccatgggaagatctccttgttgtgaaaaagctcacacaaacaaaggagcttggactaaagaagaagatcaacgtctcgtagattatatccgtaatcacggtgaaggttgttggcgttctcttcctaaatccgctggattgttgcgttgtggtaaaagttgtagattgagatggattaattaccttcgtcctgatcttaaacgtggtaattttactgatgatgaagatcaaatcatcatcaaactccatagcttactcggtaacaaatggtcattgatagctggaagattaccaggaagaacagataacgaaataaagaattattggaacactcatattaagaggaagcttcttagtcacggtattgatccacaaactcatcgtcagattaacgaatccaaaacggtgtcgtctcaagttgttgttcctattcaaaacgatgccgttgagtattctttttccaatttagccgttaaaccgaagacggaaaattcctccgataacggagcttcgactagcggcacgacgacggacgaggatctccggcagaatggggagtgttattatagtgataattcaggacatataaagctgaatttggatttaactcttgggtttggatcctggtcgggtcggatagtcggagtcgggtcatcggctgattctaaaccgtggtgcgacccggtgatggaggcgcgtttgtcactgttgtaataatttgtcaaaaaaatcccaaaaaatgggttttgttacttcattttttttttgcttgagtccttttggataaatatagaaattctttacttcagtttctttggtatttttgttttagtttttgttcatattaccttttgaagaaaaagaaaaaaaacgatacatggtttcc

SEQ ID NO: 2867 - protein, 236 aa, Arabidopsis thaliana
  peptide (1)..(236): Ceres Seq. ID no. 13493725
  misc_feature (14)..(61): Pfam Name: Pfam Description:  Myb-like DNA-binding domain
  misc_feature (1)..(236): NCBI GI NO: 15233894 NR Description: myb family transcription factor
  misc_feature (1)..(217): NCBI GI NO: 30693208 NR Description: myb family transcription factor
  misc_feature (84)..(217): NCBI GI NO: 25403442 NR Description: protein F15O4.43 [imported] - Arabidopsis thaliana
  misc_feature (1)..(88): NCBI GI NO: 25403442 NR Description: protein F15O4.43 [imported] - Arabidopsis thaliana
  misc_feature (1)..(219): NCBI GI NO: 82310 NR Description: myb-related protein 330 - garden snapdragon
  misc_feature (1)..(224): NCBI GI NO: 30687964 NR Description: myb family transcription factor
  misc_feature (1)..(182): NCBI GI NO: 23476279 NR Description: myb-like transcription factor 1
  misc_feature (1)..(179): NCBI GI NO: 7438345 NR Description: myb-related protein A - upland cotton
  misc_feature (1)..(225): NCBI GI NO: 11273985 NR Description: myb-related transcription factor MYB4
  misc_feature (1)..(225): NCBI GI NO: 15233968 NR Description: transcription factor (MYB4) -related
MGRSPCCEKAHTNKGAWTKEEDQRLVDYIRNHGEGCWRSLPKSAGLLRCGKSCRLRWINYLRPDLKRGNFTDDEDQIIIKLHSLLGNKWSLIAGRLPGRTDNEIKNYWNTHIKRKLLSHGIDPQTHRQINESKTVSSQVVVPIQNDAVEYSFSNLAVKPKTENSSDNGASTSGTTTDEDLRQNGECYYSDNSGHIKLNLDLTLGFGSWSGRIVGVGSSADSKPWCDPVMEARLSLL

SEQ ID NO: 2868 - DNA, 1110 bp, Arabidopsis thaliana
  misc_feature (1)..(1110): Ceres Seq. ID no. 13487022
tacattgtcgacattggtaggataagtaggactctttctcattgcttttcgcttcgtcttcttctctctaaaactctttctctgcaagaaaaccaatctctctctctttcactttcttaaaccctttatctctctaaaaccctcctttttaggtaaaaaagttttggtgctgactcaaaaaaggttcggtcttttactgcattttgaaatggcgattgaagattacgagaacccaaatcgagaaatcaaacctaagaacagaagattcatggaaggagagaatcagtggcctatatggctcaaacctttactaaaccaacacttttttgctcaatgcaagtttcatggacacttacctagaaccgaatgcaaaatgtattgcttagactgtaccaatgactcgttttgttctctctgtctttctgaacacgagaatcatcgtaccattcagataaggatatcatcttatcataatgtgacaaaggtcgatgagatacagaaatacttagacatatcaagcattcagacatatgtgatcaatagctcaaaggttttgttcttgaatgagaggcctcagtctaagcctggtaaaggttttactaatgcctgcatggtctgttatcgtggccttgccgaaaactgcttccgcttctgctctattggctgcaaggttgcaggaacatctggagtcttccagaagagagtgaagcatacaacgaatgactcagataattcaaacaacagttctggagtggagaataacagttctggagcagagaatggtaattcaaatctgcagagtctcagtccgcctacacctcaatttcctcctcgttctctgcgaaagcgactaaggaagggaattcctcaccgagctccatttagttgagattgtgatcaagaaaaagaagaagaagcttgtgttacgtagtgctatggattagtcaaacaactagtaagtgtatatatatatatacaatatcttcttgtaaagttttggtgtgatgcaatgagactagacagtgagtggtttatggtgtttttatgactatttccttgttctaaattttgtttttgattagattatatgacaaaaatagataattagtc

SEQ ID NO: 2869 - protein, 226 aa, Arabidopsis thaliana
  peptide (1)..(226): Ceres Seq. ID no. 15218717
  misc_feature (25)..(219): Pfam Name: Pfam Description:  Protein of unknown function, DUF597
  misc_feature (1)..(226): NCBI GI NO: 15237491 NR Description: expressed protein [Arabidopsis thaliana]
  misc_feature (1)..(196): NCBI GI NO: 15236696 NR Description: expressed protein [Arabidopsis thaliana]
  misc_feature (1)..(225): NCBI GI NO: 6714272 NR Description: F6N18.8 [Arabidopsis thaliana]
  misc_feature (22)..(225): NCBI GI NO: 18398555 NR Description: expressed protein [Arabidopsis thaliana]
  misc_feature (22)..(225): NCBI GI NO: 21554139 NR Description: unknown [Arabidopsis thaliana]
  misc_feature (24)..(225): NCBI GI NO: 38346725 NR Description: OSJNBa0086O06.23
  misc_feature (14)..(225): NCBI GI NO: 37537092 NR Description: unknown protein
  misc_feature (21)..(225): NCBI GI NO: 15217560 NR Description: hypothetical protein [Arabidopsis thaliana]
  misc_feature (28)..(168): NCBI GI NO: 18411153 NR Description: expressed protein [Arabidopsis thaliana]
  misc_feature (28)..(168): NCBI GI NO: 25337904 NR Description: unknown protein F14G6.19
MAIEDYENPNREIKPKNRRFMEGENQWPIWLKPLLNQHFFAQCKFHGHLPRTECKMYCLDCTNDSFCSLCLSEHENHRTIQIRISSYHNVTKVDEIQKYLDISSIQTYVINSSKVLFLNERPQSKPGKGFTNACMVCYRGLAENCFRFCSIGCKVAGTSGVFQKRVKHTTNDSDNSNNSSGVENNSSGAENGNSNLQSLSPPTPQFPPRSLRKRLRKGIPHRAPFS

SEQ ID NO: 2870 - protein, 206 aa, Arabidopsis thaliana
  peptide (1)..(206): Ceres Seq. ID no. 15218718
  misc_feature (5)..(199): Pfam Name: Pfam Description:  Protein of unknown function, DUF597
  misc_feature (1)..(206): NCBI GI NO: 15237491 NR Description: expressed protein [Arabidopsis thaliana]
  misc_feature (1)..(176): NCBI GI NO: 15236696 NR Description: expressed protein [Arabidopsis thaliana]
  misc_feature (1)..(205): NCBI GI NO: 6714272 NR Description: F6N18.8 [Arabidopsis thaliana]
  misc_feature (2)..(205): NCBI GI NO: 18398555 NR Description: expressed protein [Arabidopsis thaliana]
  misc_feature (2)..(205): NCBI GI NO: 21554139 NR Description: unknown [Arabidopsis thaliana]
  misc_feature (4)..(205): NCBI GI NO: 38346725 NR Description: OSJNBa0086O06.23
  misc_feature (1)..(205): NCBI GI NO: 37537092 NR Description: unknown protein
  misc_feature (1)..(205): NCBI GI NO: 15217560 NR Description: hypothetical protein [Arabidopsis thaliana]
  misc_feature (8)..(148): NCBI GI NO: 18411153 NR Description: expressed protein [Arabidopsis thaliana]
  misc_feature (8)..(148): NCBI GI NO: 25337904 NR Description: unknown protein F14G6.19
MEGENQWPIWLKPLLNQHFFAQCKFHGHLPRTECKMYCLDCTNDSFCSLCLSEHENHRTIQIRISSYHNVTKVDEIQKYLDISSIQTYVINSSKVLFLNERPQSKPGKGFTNACMVCYRGLAENCFRFCSIGCKVAGTSGVFQKRVKHTTNDSDNSNNSSGVENNSSGAENGNSNLQSLSPPTPQFPPRSLRKRLRKGIPHRAPFS

SEQ ID NO: 2871 - protein, 171 aa, Arabidopsis thaliana
  peptide (1)..(171): Ceres Seq. ID no. 15218719
  misc_feature (1)..(164): Pfam Name: Pfam Description:  Protein of unknown function, DUF597
  misc_feature (1)..(171): NCBI GI NO: 15237491 NR Description: expressed protein [Arabidopsis thaliana]
  misc_feature (1)..(141): NCBI GI NO: 15236696 NR Description: expressed protein [Arabidopsis thaliana]
  misc_feature (1)..(170): NCBI GI NO: 6714272 NR Description: F6N18.8 [Arabidopsis thaliana]
  misc_feature (1)..(170): NCBI GI NO: 18398555 NR Description: expressed protein [Arabidopsis thaliana]
  misc_feature (1)..(170): NCBI GI NO: 21554139 NR Description: unknown [Arabidopsis thaliana]
  misc_feature (1)..(170): NCBI GI NO: 38346725 NR Description: OSJNBa0086O06.23
  misc_feature (1)..(170): NCBI GI NO: 37537092 NR Description: unknown protein
  misc_feature (1)..(170): NCBI GI NO: 15217560 NR Description: hypothetical protein [Arabidopsis thaliana]
  misc_feature (1)..(113): NCBI GI NO: 18411153 NR Description: expressed protein [Arabidopsis thaliana]
  misc_feature (1)..(113): NCBI GI NO: 25337904 NR Description: unknown protein F14G6.19
MYCLDCTNDSFCSLCLSEHENHRTIQIRISSYHNVTKVDEIQKYLDISSIQTYVINSSKVLFLNERPQSKPGKGFTNACMVCYRGLAENCFRFCSIGCKVAGTSGVFQKRVKHTTNDSDNSNNSSGVENNSSGAENGNSNLQSLSPPTPQFPPRSLRKRLRKGIPHRAPFS

SEQ ID NO: 2872 - DNA, 1433 bp, Arabidopsis thaliana
  misc_feature (1)..(1433): Ceres Seq. ID no. 12324669
atgtgttatgtcccttactacacaagaatctccttctcctcaaccttctgctttcactcccgccttatctcctgattatcaacagagagagaaggaattgcataaacaagagagtaacaacatgagactggttatttcactagcagctacattttccttagttggtataatcttactttgctctctgctttattggttttgccataggagaagaaacctcaagagctcaggttgtgggtgtagtggaatcacattcttgaatcggtttagtcgctcaaaaacattagacaagagaactacaaagcagggaacagtgtcattgatcgattacaatatactagaagaaggaactagtggtttcaaggagagtaacattttgggtcaaggtggatttggatgtgtatattctgccacattagagaacaacatttcagctgcggttaagaagctagactgtgccaatgaagatgcagcaaaggaatttaagagtgaggttgagatattgagtaagctccagcacccgaacataatatcccttttgggttatagcacgaatgataaggcgagattcattgtctatgagctgatgccaaacgtttctctggaatctcatttgcacggatcttctcggggttcggcgatcacatggcctatgaggatgaagattgctcttgatgtaacaaggggattagaatatttgcatgaacattgtcatccagcaatcattcacagggacttgaaatcatccaacatcttattagatagcaatttcaatgctaagatttcagattttggtctagctgttgttgatgggccaaagaacaagaaccataaactttccgggacagttggctacgttgcaccagagtatcttctcaacggccaattgacagaaaagagcgacgtgtatgcttttggagtagtgttattagagcttttactcgggaaaaaacctgtgtagaaactagctcccggtgaatgccaatccatcatcacttgggcaatgccttatctcactgatagaaccaagttaccaagcgtcatagatcctgcgattaaagatacgatggacttgaaacacctttaccaggtagcggcagtggcgattttgtgcgtgcagccagaaccgagttatagaccgttgattacagacgtcttgcattctcttatacctttggttccaatggaacttggtggaaccttaaaaaccatcaaatgtgcttcaatggatcactgttaaacaccatagaaaaccggtgtttttttttatagaaattcggtttaatattgaccggtaggtggttttgatgtgtatattgggttagaagttgtaaccggaacattacagtatccttttgaaatgcttacttgcgcactgttgatgaactcttttctcatgtgatttctatttacgaaaaaaaatgaaaattatt

SEQ ID NO: 2873 - protein, 319 aa, Arabidopsis thaliana
  peptide (1)..(319): Ceres Seq. ID no. 12324670
  misc_feature (120)..(318): Pfam Name: Pfam Description:  Protein kinase domain
  misc_feature (41)..(319): NCBI GI NO: 30683447 NR Description: protein kinase family [Arabidopsis thaliana]
  misc_feature (102)..(319): NCBI GI NO: 11358833 NR Description: ser/thr specific protein kinase-like protein
  misc_feature (1)..(24): NCBI GI NO: 11358833 NR Description: ser/thr specific protein kinase-like protein
  misc_feature (102)..(319): NCBI GI NO: 11259774 NR Description: ser/thr specific protein kinase-like protein
  misc_feature (3)..(319): NCBI GI NO: 15220195 NR Description: putative protein kinase; protein id: At1g80640.1
  misc_feature (2)..(177): NCBI GI NO: 30689231 NR Description: protein kinase family [Arabidopsis thaliana]
  misc_feature (230)..(319): NCBI GI NO: 30689231 NR Description: protein kinase family [Arabidopsis thaliana]
  misc_feature (100)..(319): NCBI GI NO: 11358842 NR Description: serine/threonine-specific protein kinase-like protein -Arabidopsis thaliana
  misc_feature (207)..(319): NCBI GI NO: 29367521 NR Description: protein kinase-like protein
  misc_feature (76)..(319): NCBI GI NO: 34910468 NR Description: putative protein kinase
CVMSLTTQESPSPQPSAFTPALSPDYQQREKELHKQESNNMRLVISLAATFSLVGIILLCSLLYWFCHRRRNLKSSGCGCSGITFLNRFSRSKTLDKRTTKQGTVSLIDYNILEEGTSGFKESNILGQGGFGCVYSATLENNISAAVKKLDCANEDAAKEFKSEVEILSKLQHPNIISLLGYSTNDKARFIVYELMPNVSLESHLHGSSRGSAITWPMRMKIALDVTRGLEYLHEHCHPAIIHRDLKSSNILLDSNFNAKISDFGLAVVDGPKNKNHKLSGTVGYVAPEYLLNGQLTEKSDVYAFGVVLLELLLGKKPV

SEQ ID NO: 2874 - protein, 317 aa, Arabidopsis thaliana
  peptide (1)..(317): Ceres Seq. ID no. 12324671
  misc_feature (118)..(316): Pfam Name: Pfam Description:  Protein kinase domain
  misc_feature (39)..(317): NCBI GI NO: 30683447 NR Description: protein kinase family [Arabidopsis thaliana]
  misc_feature (100)..(317): NCBI GI NO: 11358833 NR Description: ser/thr specific protein kinase-like protein
  misc_feature (1)..(22): NCBI GI NO: 11358833 NR Description: ser/thr specific protein kinase-like protein
  misc_feature (100)..(317): NCBI GI NO: 11259774 NR Description: ser/thr specific protein kinase-like protein
  misc_feature (1)..(317): NCBI GI NO: 15220195 NR Description: putative protein kinase; protein id: At1g80640.1
  misc_feature (1)..(175): NCBI GI NO: 30689231 NR Description: protein kinase family [Arabidopsis thaliana]
  misc_feature (228)..(317): NCBI GI NO: 30689231 NR Description: protein kinase family [Arabidopsis thaliana]
  misc_feature (98)..(317): NCBI GI NO: 11358842 NR Description: serine/threonine-specific protein kinase-like protein -Arabidopsis thaliana
  misc_feature (205)..(317): NCBI GI NO: 29367521 NR Description: protein kinase-like protein
  misc_feature (74)..(317): NCBI GI NO: 34910468 NR Description: putative protein kinase
MSLTTQESPSPQPSAFTPALSPDYQQREKELHKQESNNMRLVISLAATFSLVGIILLCSLLYWFCHRRRNLKSSGCGCSGITFLNRFSRSKTLDKRTTKQGTVSLIDYNILEEGTSGFKESNILGQGGFGCVYSATLENNISAAVKKLDCANEDAAKEFKSEVEILSKLQHPNIISLLGYSTNDKARFIVYELMPNVSLESHLHGSSRGSAITWPMRMKIALDVTRGLEYLHEHCHPAIIHRDLKSSNILLDSNFNAKISDFGLAVVDGPKNKNHKLSGTVGYVAPEYLLNGQLTEKSDVYAFGVVLLELLLGKKPV

SEQ ID NO: 2875 - protein, 279 aa, Arabidopsis thaliana
  peptide (1)..(279): Ceres Seq. ID no. 12324672
  misc_feature (80)..(278): Pfam Name: Pfam Description:  Protein kinase domain
  misc_feature (1)..(279): NCBI GI NO: 30683447 NR Description: protein kinase family [Arabidopsis thaliana]
  misc_feature (62)..(279): NCBI GI NO: 11358833 NR Description: ser/thr specific protein kinase-like protein
  misc_feature (62)..(279): NCBI GI NO: 11259774 NR Description: ser/thr specific protein kinase-like protein
  misc_feature (1)..(279): NCBI GI NO: 15220195 NR Description: putative protein kinase; protein id: At1g80640.1
  misc_feature (1)..(137): NCBI GI NO: 30689231 NR Description: protein kinase family [Arabidopsis thaliana]
  misc_feature (190)..(279): NCBI GI NO: 30689231 NR Description: protein kinase family [Arabidopsis thaliana]
  misc_feature (60)..(279): NCBI GI NO: 11358842 NR Description: serine/threonine-specific protein kinase-like protein -Arabidopsis thaliana
  misc_feature (167)..(279): NCBI GI NO: 29367521 NR Description: protein kinase-like protein
  misc_feature (36)..(279): NCBI GI NO: 34910468 NR Description: putative protein kinase
  misc_feature (190)..(279): NCBI GI NO: 7434336 NR Description: hypothetical protein F10N7
MRLVISLAATFSLVGIILLCSLLYWFCHRRRNLKSSGCGCSGITFLNRFSRSKTLDKRTTKQGTVSLIDYNILEEGTSGFKESNILGQGGFGCVYSATLENNISAAVKKLDCANEDAAKEFKSEVEILSKLQHPNIISLLGYSTNDKARFIVYELMPNVSLESHLHGSSRGSAITWPMRMKIALDVTRGLEYLHEHCHPAIIHRDLKSSNILLDSNFNAKISDFGLAVVDGPKNKNHKLSGTVGYVAPEYLLNGQLTEKSDVYAFGVVLLELLLGKKPV

SEQ ID NO: 2876 - DNA, 663 bp, Arabidopsis thaliana
  misc_feature (1)..(663): Ceres Seq. ID no. 12323564
agaaacactatcgaacctcaaaatctctgttgccggaaattttcttcaccgaaactgaaagaagtcgaaagagagaagagaagaaattgaagcaatggagggagcagaggaagctggggctgagatagcggttgattcaaaggacttgcagcaacaaagcaaagctttcgacaagctcaccgatcgtgtcgaggatcgccagctcgattcctctcgtgttcaatcggctatggcttcgattgctgcttctagggaggctgatctgaatgctaagaggttgagggagaaagaactggcctctgtgaagatcaatcctgcagatgttgagtttattgtaaacgaacttgagatagaaaagaatgtggcggaaagaactctaagggagcacaaaggtgatgcggttgctgcgactaggcaattgctttcacgatatcctctatgatggagcaggaccattctttacttccaaggttttttgtatgtttgagaggttgagagcaagtctcctaatatttaaccgagttaaaattgtctattgctgaaccgatctctctgagaagccctgaatacagttacaatcgattctggggtggtgttttgtggttctacctgaagtttgaagttcaatcttattatcaagatataagaatgtgttcttcgttt

SEQ ID NO: 2877 - protein, 115 aa, Arabidopsis thaliana
  peptide (1)..(115): Ceres Seq. ID no. 12323565
  misc_feature (1)..(115): NCBI GI NO: 18397632 NR Description: expressed protein; protein id: At3g06610
  misc_feature (1)..(105): NCBI GI NO: 7020527 NR Description: unnamed protein product [Homo sapiens]
  misc_feature (1)..(105): NCBI GI NO: 27229055 NR Description: RIKEN cDNA 2310003F16 [Mus musculus]
  misc_feature (1)..(105): NCBI GI NO: 34856780 NR Description: similar to RIKEN cDNA 2310003F16
  misc_feature (1)..(105): NCBI GI NO: 27734984 NR Description: Huntingtin interacting protein K
  misc_feature (1)..(105): NCBI GI NO: 3329429 NR Description: huntingtin interacting protein HYPK [Homo sapiens]
  misc_feature (1)..(105): NCBI GI NO: 6841494 NR Description: HSPC136 [Homo sapiens]
  misc_feature (1)..(111): NCBI GI NO: 21358275 NR Description: CG9922-PA [Drosophila melanogaster]
MEGAEEAGAEIAVDSKDLQQQSKAFDKLTDRVEDRQLDSSRVQSAMASIAASREADLNAKRLREKELASVKINPADVEFIVNELEIEKNVAERTLREHKGDAVAATRQLLSRYPL

SEQ ID NO: 2878 - protein, 70 aa, Arabidopsis thaliana
  peptide (1)..(70): Ceres Seq. ID no. 12323566
  misc_feature (1)..(70): NCBI GI NO: 18397632 NR Description: expressed protein; protein id: At3g06610
  misc_feature (1)..(60): NCBI GI NO: 7020527 NR Description: unnamed protein product [Homo sapiens]
  misc_feature (1)..(60): NCBI GI NO: 27229055 NR Description: RIKEN cDNA 2310003F16 [Mus musculus]
  misc_feature (1)..(60): NCBI GI NO: 34856780 NR Description: similar to RIKEN cDNA 2310003F16
  misc_feature (1)..(60): NCBI GI NO: 27734984 NR Description: Huntingtin interacting protein K
  misc_feature (1)..(60): NCBI GI NO: 3329429 NR Description: huntingtin interacting protein HYPK [Homo sapiens]
  misc_feature (1)..(60): NCBI GI NO: 6841494 NR Description: HSPC136 [Homo sapiens]
  misc_feature (1)..(66): NCBI GI NO: 21358275 NR Description: CG9922-PA [Drosophila melanogaster]
MASIAASREADLNAKRLREKELASVKINPADVEFIVNELEIEKNVAERTLREHKGDAVAATRQLLSRYPL

SEQ ID NO: 2879 - DNA, 1227 bp, Arabidopsis thaliana
  misc_feature (1)..(1227): Ceres Seq. ID no. 12340140
aagggttatattctcaaggaacccattggcgtagttggcatgattactccatggaactatccgttattgatggctgtctggaaagtcgctccttcacttgctgctgggtgcacggctatactgaaaccttcagagttggcctccctgacatgtttggagctcgctgatatttgccgcgaggtgggtctaccacctggtgttcttaatattctgactggtttaggaactgaagcaggtgctccactggcatcgcatccacatgttgacaagattgtattcactggaagcacaacaactggaagcagcattatgacttccgctgccaaattggtgaaaccagtttccttggagcttgggggtaaaagccctatcattgtctttgatgatgtcgatattgataaagctatggaatggactatgtttggttgtttctggacgaatgggcagatttgtagtgccacatctcgacttcttgtgcatgaaaggattgctgacgagtttttggacaagctggtaaagtggaccaagaacattaagatttcagatccttttgaagaaggctgtaggcttggtcctgttgtcagtaaaggacagtacgagagagttctaaagtttgtctcaaacgctaggaatgaaggtgcaactgttctttgtggaggagttcgtcctgagcatttaaagaagggatactttgttgaacctgcgattgtttcaaatgtgactacttcaatggaaatctggagagaggaagtctttggtcctgctctgtgtgtgaaaacattctccaccgaggatgaggcaattcagcttgcaaatgactctcaatatggattagcaggcgcagtattatcaaatgatctggagcggtgtgatcgtgttagtaaggctttccaggcgggaatagtgtgggtcaactgctctcagccatgcttctgccaagctccatggggtggaaccaaacgcagtggatttggccgtgaattgggagaatggggacttgagaactacttgagtgtgaagcaggtgactcagtatatctctgatgaaccatggggatggtacaaacctccttccaagctctgagacaaacactagttcctgatatttccttaaaacatgtactcatgagaatataccaataaagcaagagacccttctgtaagagaaatggtattgctactttaaattcttgaaaaaaatgaaaaataagatgagatgatatttctt

SEQ ID NO: 2880 - protein, 360 aa, Arabidopsis thaliana
  peptide (1)..(360): Ceres Seq. ID no. 12340141
  misc_feature (1)..(360): NCBI GI NO: 15228346 NR Description: betaine aldehyde dehydrogenase-like protein
  misc_feature (1)..(357): NCBI GI NO: 11251896 NR Description: betaine-aldehyde dehydrogenase (EC 1.2.1.8)
  misc_feature (1)..(358): NCBI GI NO: 18410730 NR Description: betaine aldehyde dehydrogenase, putative
  misc_feature (1)..(360): NCBI GI NO: 15131692 NR Description: putative aminoaldehyde dehydrogenase
  misc_feature (1)..(357): NCBI GI NO: 20135570 NR Description: betaine aldehyde dehydrogenase BADH2
  misc_feature (1)..(357): NCBI GI NO: 118490 NR Description: Betaine-aldehyde dehydrogenase
  misc_feature (1)..(357): NCBI GI NO: 17936 NR Description: betaine aldehyd dehydrogenase [Beta vulgaris]
  misc_feature (1)..(357): NCBI GI NO: 2811031 NR Description: Betaine-aldehyde dehydrogenase
  misc_feature (1)..(357): NCBI GI NO: 118492 NR Description: Betaine-aldehyde dehydrogenase
  misc_feature (1)..(357): NCBI GI NO: 24429929 NR Description: betaine aldehyde dehydrogenase [Spinacia oleracea]
KGYILKEPIGVVGMITPWNYPLLMAVWKVAPSLAAGCTAILKPSELASLTCLELADICREVGLPPGVLNILTGLGTEAGAPLASHPHVDKIVFTGSTTTGSSIMTSAAKLVKPVSLELGGKSPIIVFDDVDIDKAMEWTMFGCFWTNGQICSATSRLLVHERIADEFLDKLVKWTKNIKISDPFEEGCRLGPVVSKGQYERVLKFVSNARNEGATVLCGGVRPEHLKKGYFVEPAIVSNVTTSMEIWREEVFGPALCVKTFSTEDEAIQLANDSQYGLAGAVLSNDLERCDRVSKAFQAGIVWVNCSQPCFCQAPWGGTKRSGFGRELGEWGLENYLSVKQVTQYISDEPWGWYKPPSKL

SEQ ID NO: 2881 - protein, 347 aa, Arabidopsis thaliana
  peptide (1)..(347): Ceres Seq. ID no. 12340142
  misc_feature (1)..(347): NCBI GI NO: 15228346 NR Description: betaine aldehyde dehydrogenase-like protein
  misc_feature (1)..(344): NCBI GI NO: 11251896 NR Description: betaine-aldehyde dehydrogenase (EC 1.2.1.8)
  misc_feature (1)..(345): NCBI GI NO: 18410730 NR Description: betaine aldehyde dehydrogenase, putative
  misc_feature (1)..(347): NCBI GI NO: 15131692 NR Description: putative aminoaldehyde dehydrogenase
  misc_feature (1)..(344): NCBI GI NO: 20135570 NR Description: betaine aldehyde dehydrogenase BADH2
  misc_feature (1)..(344): NCBI GI NO: 118490 NR Description: Betaine-aldehyde dehydrogenase
  misc_feature (1)..(344): NCBI GI NO: 17936 NR Description: betaine aldehyd dehydrogenase [Beta vulgaris]
  misc_feature (1)..(344): NCBI GI NO: 2811031 NR Description: Betaine-aldehyde dehydrogenase
  misc_feature (1)..(344): NCBI GI NO: 118492 NR Description: Betaine-aldehyde dehydrogenase
  misc_feature (1)..(344): NCBI GI NO: 24429929 NR Description: betaine aldehyde dehydrogenase [Spinacia oleracea]
MITPWNYPLLMAVWKVAPSLAAGCTAILKPSELASLTCLELADICREVGLPPGVLNILTGLGTEAGAPLASHPHVDKIVFTGSTTTGSSIMTSAAKLVKPVSLELGGKSPIIVFDDVDIDKAMEWTMFGCFWTNGQICSATSRLLVHERIADEFLDKLVKWTKNIKISDPFEEGCRLGPVVSKGQYERVLKFVSNARNEGATVLCGGVRPEHLKKGYFVEPAIVSNVTTSMEIWREEVFGPALCVKTFSTEDEAIQLANDSQYGLAGAVLSNDLERCDRVSKAFQAGIVWVNCSQPCFCQAPWGGTKRSGFGRELGEWGLENYLSVKQVTQYISDEPWGWYKPPSKL

SEQ ID NO: 2882 - protein, 337 aa, Arabidopsis thaliana
  peptide (1)..(337): Ceres Seq. ID no. 12340143
  misc_feature (1)..(337): NCBI GI NO: 15228346 NR Description: betaine aldehyde dehydrogenase-like protein
  misc_feature (1)..(334): NCBI GI NO: 11251896 NR Description: betaine-aldehyde dehydrogenase (EC 1.2.1.8)
  misc_feature (1)..(335): NCBI GI NO: 18410730 NR Description: betaine aldehyde dehydrogenase, putative
  misc_feature (1)..(337): NCBI GI NO: 15131692 NR Description: putative aminoaldehyde dehydrogenase
  misc_feature (1)..(334): NCBI GI NO: 20135570 NR Description: betaine aldehyde dehydrogenase BADH2
  misc_feature (1)..(334): NCBI GI NO: 118490 NR Description: Betaine-aldehyde dehydrogenase
  misc_feature (1)..(334): NCBI GI NO: 17936 NR Description: betaine aldehyd dehydrogenase [Beta vulgaris]
  misc_feature (1)..(334): NCBI GI NO: 2811031 NR Description: Betaine-aldehyde dehydrogenase
  misc_feature (1)..(334): NCBI GI NO: 118492 NR Description: Betaine-aldehyde dehydrogenase
  misc_feature (1)..(334): NCBI GI NO: 24429929 NR Description: betaine aldehyde dehydrogenase [Spinacia oleracea]
MAVWKVAPSLAAGCTAILKPSELASLTCLELADICREVGLPPGVLNILTGLGTEAGAPLASHPHVDKIVFTGSTTTGSSIMTSAAKLVKPVSLELGGKSPIIVFDDVDIDKAMEWTMFGCFWTNGQICSATSRLLVHERIADEFLDKLVKWTKNIKISDPFEEGCRLGPVVSKGQYERVLKFVSNARNEGATVLCGGVRPEHLKKGYFVEPAIVSNVTTSMEIWREEVFGPALCVKTFSTEDEAIQLANDSQYGLAGAVLSNDLERCDRVSKAFQAGIVWVNCSQPCFCQAPWGGTKRSGFGRELGEWGLENYLSVKQVTQYISDEPWGWYKPPSKL

SEQ ID NO: 2883 - DNA, 1063 bp, Arabidopsis thaliana
  misc_feature (1)..(1063): Ceres Seq. ID no. 12327180
aaaaattcaatctttctccgtcattcagatttcgaggagacagagacagagaaaaggattcgtgtaaggaaaagcttttaaacttctctttctatttatccctcctttcttctatctctctctctctcgatatcgatacaagagagatggagaaagaagaaggagaaacaacaacaacgatcggcgttgttccggcggcgccggcgaaattaccgactccgatatattctctgagcttttgggaggtcacggcagcttccggcgtcgttttagggtttattttgggtcttgtttgcgtttatctcacaatgcctcaatctgattacagctttctcaagctacctcgtaatctcgaagatcttcagattcttagagataatcttgagatatacacaagtgattacacagttcaagttcttgttgggtattgtctggtgtacgtttttatgcagacgtttatgattcctggaactgtgtttatgtctttgcttgctggtgctctctttggagttgtcaaaggaatggctcttgttgtctccactgcaacagctggtgcttcctcttgttatttcctctctaagctcattggtagacctttactcttatcgctttggcctgacaagctcgtattcttccaagatcaggttgcgagaagaaaagatcggttgctgaattatatgctgttcttgaggctaacaccaacattgcctaacactttcattaatgttgcttctccaattgttgatgttccttaccatatcttcttcctagctacattcatcggtctgattcctgctgcatttgtcactgtccgggctgggcttgctcttggagagctaaaatcattgggagatctctatgacttcagctccatggcgactctttgtctcattggtgtgctctctgtgactccaaccctaattggcaagaaacaagcatagaagatgaagatcaatacgatgatgatgatgatgaaaacagagcatttcaacagcctctttgtgtatatatcatgtagaatgttaagaacttaagatcaatcaatcataaaactctgttctct

SEQ ID NO: 2884 - protein, 312 aa, Arabidopsis thaliana
  peptide (1)..(312): Ceres Seq. ID no. 12327181
  misc_feature (49)..(312): NCBI GI NO: 18414967 NR Description: expressed protein; protein id: At4g17790
  misc_feature (49)..(312): NCBI GI NO: 21593768 NR Description: unknown [Arabidopsis thaliana]
  misc_feature (75)..(311): NCBI GI NO: 18409951 NR Description: expressed protein; protein id: At1g71940
  misc_feature (75)..(311): NCBI GI NO: 30681121 NR Description: expressed protein [Arabidopsis thaliana]
  misc_feature (71)..(312): NCBI GI NO: 28850296 NR Description: similar to Mus musculus (Mouse)
  misc_feature (92)..(310): NCBI GI NO: 436224 NR Description: KIAA0033 [Homo sapiens]
  misc_feature (92)..(310): NCBI GI NO: 20558053 NR Description: similar to KIAA0033 [Homo sapiens]
  misc_feature (92)..(310): NCBI GI NO: 34858940 NR Description: similar to D7Ertd743e protein [Rattus norvegicus]
  misc_feature (92)..(310): NCBI GI NO: 22268065 NR Description: D7Ertd743e protein [Mus musculus]
  misc_feature (75)..(216): NCBI GI NO: 25407510 NR Description: hypothetical protein AT4g09580
KFNLSPSFRFRGDRDREKDSCKEKLLNFSFYLSLLSSISLSLDIDTREMEKEEGETTTTIGVVPAAPAKLPTPIYSLSFWEVTAASGVVLGFILGLVCVYLTMPQSDYSFLKLPRNLEDLQILRDNLEIYTSDYTVQVLVGYCLVYVFMQTFMIPGTVFMSLLAGALFGVVKGMALVVSTATAGASSCYFLSKLIGRPLLLSLWPDKLVFFQDQVARRKDRLLNYMLFLRLTPTLPNTFINVASPIVDVPYHIFFLATFIGLIPAAFVTVRAGLALGELKSLGDLYDFSSMATLCLIGVLSVTPTLIGKKQA

SEQ ID NO: 2885 - protein, 264 aa, Arabidopsis thaliana
  peptide (1)..(264): Ceres Seq. ID no. 12327182
  misc_feature (1)..(264): NCBI GI NO: 18414967 NR Description: expressed protein; protein id: At4g17790
  misc_feature (1)..(264): NCBI GI NO: 21593768 NR Description: unknown [Arabidopsis thaliana]
  misc_feature (27)..(263): NCBI GI NO: 18409951 NR Description: expressed protein; protein id: At1g71940
  misc_feature (27)..(263): NCBI GI NO: 30681121 NR Description: expressed protein [Arabidopsis thaliana]
  misc_feature (23)..(264): NCBI GI NO: 28850296 NR Description: similar to Mus musculus (Mouse)
  misc_feature (44)..(262): NCBI GI NO: 436224 NR Description: KIAA0033 [Homo sapiens]
  misc_feature (44)..(262): NCBI GI NO: 20558053 NR Description: similar to KIAA0033 [Homo sapiens]
  misc_feature (44)..(262): NCBI GI NO: 34858940 NR Description: similar to D7Ertd743e protein [Rattus norvegicus]
  misc_feature (44)..(262): NCBI GI NO: 22268065 NR Description: D7Ertd743e protein [Mus musculus]
  misc_feature (27)..(168): NCBI GI NO: 25407510 NR Description: hypothetical protein AT4g09580
MEKEEGETTTTIGVVPAAPAKLPTPIYSLSFWEVTAASGVVLGFILGLVCVYLTMPQSDYSFLKLPRNLEDLQILRDNLEIYTSDYTVQVLVGYCLVYVFMQTFMIPGTVFMSLLAGALFGVVKGMALVVSTATAGASSCYFLSKLIGRPLLLSLWPDKLVFFQDQVARRKDRLLNYMLFLRLTPTLPNTFINVASPIVDVPYHIFFLATFIGLIPAAFVTVRAGLALGELKSLGDLYDFSSMATLCLIGVLSVTPTLIGKKQA

SEQ ID NO: 2886 - protein, 210 aa, Arabidopsis thaliana
  peptide (1)..(210): Ceres Seq. ID no. 12327183
  misc_feature (1)..(210): NCBI GI NO: 18414967 NR Description: expressed protein; protein id: At4g17790
  misc_feature (1)..(210): NCBI GI NO: 21593768 NR Description: unknown [Arabidopsis thaliana]
  misc_feature (1)..(209): NCBI GI NO: 18409951 NR Description: expressed protein; protein id: At1g71940
  misc_feature (1)..(209): NCBI GI NO: 30681121 NR Description: expressed protein [Arabidopsis thaliana]
  misc_feature (1)..(210): NCBI GI NO: 28850296 NR Description: similar to Mus musculus (Mouse)
  misc_feature (1)..(208): NCBI GI NO: 436224 NR Description: KIAA0033 [Homo sapiens]
  misc_feature (1)..(208): NCBI GI NO: 20558053 NR Description: similar to KIAA0033 [Homo sapiens]
  misc_feature (1)..(208): NCBI GI NO: 34858940 NR Description: similar to D7Ertd743e protein [Rattus norvegicus]
  misc_feature (1)..(208): NCBI GI NO: 22268065 NR Description: D7Ertd743e protein [Mus musculus]
  misc_feature (1)..(114): NCBI GI NO: 25407510 NR Description: hypothetical protein AT4g09580
MPQSDYSFLKLPRNLEDLQILRDNLEIYTSDYTVQVLVGYCLVYVFMQTFMIPGTVFMSLLAGALFGVVKGMALVVSTATAGASSCYFLSKLIGRPLLLSLWPDKLVFFQDQVARRKDRLLNYMLFLRLTPTLPNTFINVASPIVDVPYHIFFLATFIGLIPAAFVTVRAGLALGELKSLGDLYDFSSMATLCLIGVLSVTPTLIGKKQA

SEQ ID NO: 2887 - DNA, 1100 bp, Arabidopsis thaliana
  misc_feature (1)..(1100): Ceres Seq. ID no. 12327326
atttcattgtccatcaccaatcgccaaaaccgcagaaaggtctgacctttggattagcgtgagagtttcacaatgaaagatagagaaaacgatggaaatcttgagagcagaatcttcgtgggagggttatcgtgggatgtcacagagagacagcttgagagtacctttgaccgctacgggaaaatcactgagtgtcagattatggtggggagagatactgggcgtccacgtggttttgggtttattacattcactgatcgcagaggagctgatgatgcaattaagcacatgcatggaagggagttgggcaataaggtcatctccgtgaacaaagctgagcccaaagttggtggagaagatgtagaccaattaaagaaaggtggaggctattcatctcgagggaagggaaccgaggatgagtgctttaaatgcagacgccctggtcattgggctcgagattgcccatcaactggtgacgatcgagaacggttcagagttccccttgcgatgcgctctcgtattggagacatagatggacaccgagatcgctatggagatcgtgatctggagagggagcgggagcgggagcgtgagtttgaccgctacatggatggacgccgtgaccgagatgggggacgatatagctacagggaccgcttcgacagtggagacaagtatgagcctcgtgatcactatccatttgagagatacgcaccaccaggagaccgttttgtgagtgataggtatgggatgcctgaacatcatcttgagaatgaatatcgcgggagagagagaagctatgacagggacagatacgcaagggatacaagtgacagatatggagatatgggaccgatacgcgatgagggaagaccctacagaagcagaccaggtccttatgaccgtcctagccgtcctggaggcagaccttcatcatatgaacgttggtagtttgttttggttaaccagatgtcaatgcttatgctttgggatttaggtctatatcagagatagaactcgaactcgagatctctgttatgcttttttgtcgaatattatgattcttcatcgcagtaaaaaagttatgttcttatgatcct

SEQ ID NO: 2888 - protein, 292 aa, Arabidopsis thaliana
  peptide (1)..(292): Ceres Seq. ID no. 12327327
  misc_feature (14)..(85): Pfam Name: a.k.a. RRM, RBD, or RNP domain Pfam Description: RNA recognition motif.
  misc_feature (1)..(292): NCBI GI NO: 18406831 NR Description: glycine-rich RNA-binding protein
  misc_feature (111)..(292): NCBI GI NO: 21954079 NR Description: putative RNA binding protein
  misc_feature (12)..(287): NCBI GI NO: 15237666 NR Description: glycine-rich RNA-binding protein
  misc_feature (8)..(289): NCBI GI NO: 31712074 NR Description: putative RNA-binding protein
  misc_feature (13)..(287): NCBI GI NO: 33146923 NR Description: glycine-rich RNA-binding protein-like
  misc_feature (11)..(219): NCBI GI NO: 15231557 NR Description: glycine-rich RNA-binding protein
  misc_feature (11)..(195): NCBI GI NO: 40714682 NR Description: putative RNA binding protein
  misc_feature (13)..(178): NCBI GI NO: 12659074 NR Description: RNA-binding protein [Triticum aestivum]
  misc_feature (11)..(132): NCBI GI NO: 15982739 NR Description: AT3g26420/F20C19_14 [Arabidopsis thaliana]
  misc_feature (10)..(112): NCBI GI NO: 544416 NR Description: Glycine-rich RNA-binding protein 10
MKDRENDGNLESRIFVGGLSWDVTERQLESTFDRYGKITECQIMVGRDTGRPRGFGFITFTDRRGADDAIKHMHGRELGNKVISVNKAEPKVGGEDVDQLKKGGGYSSRGKGTEDECFKCRRPGHWARDCPSTGDDRERFRVPLAMRSRIGDIDGHRDRYGDRDLEREREREREFDRYMDGRRDRDGGRYSYRDRFDSGDKYEPRDHYPFERYAPPGDRFVSDRYGMPEHHLENEYRGRERSYDRDRYARDTSDRYGDMGPIRDEGRPYRSRPGPYDRPSRPGGRPSSYERW

SEQ ID NO: 2889 - protein, 249 aa, Arabidopsis thaliana
  peptide (1)..(249): Ceres Seq. ID no. 12327328
  misc_feature (72)..(89): Pfam Name: Pfam Description:  Zinc knuckle
  misc_feature (1)..(249): NCBI GI NO: 18406831 NR Description: glycine-rich RNA-binding protein
  misc_feature (68)..(249): NCBI GI NO: 21954079 NR Description: putative RNA binding protein
  misc_feature (1)..(244): NCBI GI NO: 15237666 NR Description: glycine-rich RNA-binding protein
  misc_feature (1)..(246): NCBI GI NO: 31712074 NR Description: putative RNA-binding protein
  misc_feature (1)..(244): NCBI GI NO: 33146923 NR Description: glycine-rich RNA-binding protein-like
  misc_feature (1)..(176): NCBI GI NO: 15231557 NR Description: glycine-rich RNA-binding protein
  misc_feature (1)..(152): NCBI GI NO: 40714682 NR Description: putative RNA binding protein
  misc_feature (1)..(135): NCBI GI NO: 12659074 NR Description: RNA-binding protein [Triticum aestivum]
  misc_feature (1)..(89): NCBI GI NO: 15982739 NR Description: AT3g26420/F20C19_14 [Arabidopsis thaliana]
  misc_feature (1)..(69): NCBI GI NO: 544416 NR Description: Glycine-rich RNA-binding protein 10
MVGRDTGRPRGFGFITFTDRRGADDAIKHMHGRELGNKVISVNKAEPKVGGEDVDQLKKGGGYSSRGKGTEDECFKCRRPGHWARDCPSTGDDRERFRVPLAMRSRIGDIDGHRDRYGDRDLEREREREREFDRYMDGRRDRDGGRYSYRDRFDSGDKYEPRDHYPFERYAPPGDRFVSDRYGMPEHHLENEYRGRERSYDRDRYARDTSDRYGDMGPIRDEGRPYRSRPGPYDRPSRPGGRPSSYERW

SEQ ID NO: 2890 - protein, 220 aa, Arabidopsis thaliana
  peptide (1)..(220): Ceres Seq. ID no. 12327329
  misc_feature (43)..(60): Pfam Name: Pfam Description:  Zinc knuckle
  misc_feature (1)..(220): NCBI GI NO: 18406831 NR Description: glycine-rich RNA-binding protein
  misc_feature (39)..(220): NCBI GI NO: 21954079 NR Description: putative RNA binding protein
  misc_feature (1)..(215): NCBI GI NO: 15237666 NR Description: glycine-rich RNA-binding protein
  misc_feature (1)..(217): NCBI GI NO: 31712074 NR Description: putative RNA-binding protein
  misc_feature (1)..(215): NCBI GI NO: 33146923 NR Description: glycine-rich RNA-binding protein-like
  misc_feature (1)..(147): NCBI GI NO: 15231557 NR Description: glycine-rich RNA-binding protein
  misc_feature (1)..(123): NCBI GI NO: 40714682 NR Description: putative RNA binding protein
  misc_feature (1)..(106): NCBI GI NO: 12659074 NR Description: RNA-binding protein [Triticum aestivum]
  misc_feature (1)..(60): NCBI GI NO: 15982739 NR Description: AT3g26420/F20C19_14 [Arabidopsis thaliana]
  misc_feature (1)..(40): NCBI GI NO: 544416 NR Description: Glycine-rich RNA-binding protein 10
MHGRELGNKVISVNKAEPKVGGEDVDQLKKGGGYSSRGKGTEDECFKCRRPGHWARDCPSTGDDRERFRVPLAMRSRIGDIDGHRDRYGDRDLEREREREREFDRYMDGRRDRDGGRYSYRDRFDSGDKYEPRDHYPFERYAPPGDRFVSDRYGMPEHHLENEYRGRERSYDRDRYARDTSDRYGDMGPIRDEGRPYRSRPGPYDRPSRPGGRPSSYERW

SEQ ID NO: 2891 - DNA, 1369 bp, Arabidopsis thaliana
  misc_feature (1)..(1369): Ceres Seq. ID no. 12338575
atatacatccatttacattcttcacgttatcagaccaatctctctcttcttcttcttcacgttctctctctttccggataagggtagagatggctagagtttgtgtaatgatgatggctatggctatagctatggctatgaacatagctatgggtgatccaatagcaccatgttacttcatattcggtgactctttggttgatagtggaaacaacaatcggcttacctctctagcaagagctaattacttcccttacggtatcgacttccagtacggtccaaccggtcgcttctccaacggaaaaaccaccgtcgatgtcatcactgagcttcttggtttcgatgactacattacaccgtattccgaagcaaggggagaagatatcctaagaggagtaaactacgcttctgcagctgccggaatccgagaagaaactggtcgacaattgggagctagaataacatttgcagggcaagtagctaatcatgtaaacactgtgtcacaagttgtgaacatactcggagacgagaatgaagctgctaattacctaagtaaatgcatctactcaatcgggttaggcagtaacgactatctcaataactattttatgcctgtttattactccaccgggagccagtactccccggatgcctacgccaacgacctcataaaccgctacaccgagcaactccggataatgtataacaacggagcgaggaagtttgcgctagttggtataggtgcaataggatgcagtccaaatgagctggctcaaaacagcagagacggggtgacttgtgacgaaaggatcaattccgctaacagaatcttcaacagtaagcttgtgtctctggttgatcacttcaaccaaaacacaccaggggccaagttcacttacattaatgcttatggtatcttccaagacatggtagctaatccttctcgctatgggtttagggtgacaaacgcgggatgttgtggagttgggaggaacaatggacagataacttgtcttccgggtcaagctccatgtcttaacagggacgagtatgtgttctgggacgcgtttcatccaggagaagctgcgaatgttgtcatcggtagtcgatcttttcagagagaatctgcttctgatgctcatccttatgatatccagcagcttgctcggctctagttcatgaaatttcctccaagcaaacacagagtgaaaaagagagggagacagatttaatctttttcttatttaagtgtttgatgattgtttctttttgctgcagaagaattgtttgttttgttgagtttatgtatcatggttctatataatgacatgaaatttctgctttcttatagatgactaaattcatttgg

SEQ ID NO: 2892 - protein, 390 aa, Arabidopsis thaliana
  peptide (1)..(390): Ceres Seq. ID no. 12338577
  misc_feature (58)..(370): Pfam Name: Pfam Description:  GDSL-like Lipase/Acylhydrolase
  misc_feature (4)..(390): NCBI GI NO: 7485419 NR Description: hypothetical protein F13C5
  misc_feature (30)..(390): NCBI GI NO: 18415211 NR Description: Expressed protein; protein id: At4g18970
  misc_feature (30)..(390): NCBI GI NO: 21618199 NR Description: GDSL-motif lipase/hydrolase-like protein
  misc_feature (30)..(390): NCBI GI NO: 15242458 NR Description: GDSL-motif lipase/hydrolase-like protein
  misc_feature (30)..(390): NCBI GI NO: 21553940 NR Description: GDSL-motif lipase/hydrolase-like protein
  misc_feature (35)..(390): NCBI GI NO: 15220512 NR Description: lipase/hydrolase, putative; protein id: At1g29660
  misc_feature (30)..(390): NCBI GI NO: 15220514 NR Description: lipase/hydrolase, putative; protein id: At1g29670
  misc_feature (30)..(390): NCBI GI NO: 21592417 NR Description: lipase/hydrolase, putative [Arabidopsis thaliana]
  misc_feature (35)..(390): NCBI GI NO: 21594055 NR Description: lipase/hydrolase, putative [Arabidopsis thaliana]
  misc_feature (28)..(388): NCBI GI NO: 34910808 NR Description: GDSL-motif lipase/hydrolase-like protein
IHPFTFFTLSDQSLSSSSSRSLSFRIRVEMARVCVMMMAMAIAMAMNIAMGDPIAPCYFIFGDSLVDSGNNNRLTSLARANYFPYGIDFQYGPTGRFSNGKTTVDVITELLGFDDYITPYSEARGEDILRGVNYASAAAGIREETGRQLGARITFAGQVANHVNTVSQVVNILGDENEAANYLSKCIYSIGLGSNDYLNNYFMPVYYSTGSQYSPDAYANDLINRYTEQLRIMYNNGARKFALVGIGAIGCSPNELAQNSRDGVTCDERINSANRIFNSKLVSLVDHFNQNTPGAKFTYINAYGIFQDMVANPSRYGFRVTNAGCCGVGRNNGQITCLPGQAPCLNRDEYVFWDAFHPGEAANVVIGSRSFQRESASDAHPYDIQQLARL

SEQ ID NO: 2893 - protein, 361 aa, Arabidopsis thaliana
  peptide (1)..(361): Ceres Seq. ID no. 12338578
  misc_feature (29)..(341): Pfam Name: Pfam Description:  GDSL-like Lipase/Acylhydrolase
  misc_feature (1)..(361): NCBI GI NO: 7485419 NR Description: hypothetical protein F13C5
  misc_feature (1)..(361): NCBI GI NO: 18415211 NR Description: Expressed protein; protein id: At4g18970
  misc_feature (1)..(361): NCBI GI NO: 21618199 NR Description: GDSL-motif lipase/hydrolase-like protein
  misc_feature (1)..(361): NCBI GI NO: 15242458 NR Description: GDSL-motif lipase/hydrolase-like protein
  misc_feature (1)..(361): NCBI GI NO: 21553940 NR Description: GDSL-motif lipase/hydrolase-like protein
  misc_feature (6)..(361): NCBI GI NO: 15220512 NR Description: lipase/hydrolase, putative; protein id: At1g29660
  misc_feature (1)..(361): NCBI GI NO: 15220514 NR Description: lipase/hydrolase, putative; protein id: At1g29670
  misc_feature (1)..(361): NCBI GI NO: 21592417 NR Description: lipase/hydrolase, putative [Arabidopsis thaliana]
  misc_feature (6)..(361): NCBI GI NO: 21594055 NR Description: lipase/hydrolase, putative [Arabidopsis thaliana]
  misc_feature (1)..(359): NCBI GI NO: 34910808 NR Description: GDSL-motif lipase/hydrolase-like protein
MARVCVMMMAMAIAMAMNIAMGDPIAPCYFIFGDSLVDSGNNNRLTSLARANYFPYGIDFQYGPTGRFSNGKTTVDVITELLGFDDYITPYSEARGEDILRGVNYASAAAGIREETGRQLGARITFAGQVANHVNTVSQVVNILGDENEAANYLSKCIYSIGLGSNDYLNNYFMPVYYSTGSQYSPDAYANDLINRYTEQLRIMYNNGARKFALVGIGAIGCSPNELAQNSRDGVTCDERINSANRIFNSKLVSLVDHFNQNTPGAKFTYINAYGIFQDMVANPSRYGFRVTNAGCCGVGRNNGQITCLPGQAPCLNRDEYVFWDAFHPGEAANVVIGSRSFQRESASDAHPYDIQQLARL

SEQ ID NO: 2894 - protein, 355 aa, Arabidopsis thaliana
  peptide (1)..(355): Ceres Seq. ID no. 12338579
  misc_feature (23)..(335): Pfam Name: Pfam Description:  GDSL-like Lipase/Acylhydrolase
  misc_feature (1)..(355): NCBI GI NO: 7485419 NR Description: hypothetical protein F13C5
  misc_feature (1)..(355): NCBI GI NO: 18415211 NR Description: Expressed protein; protein id: At4g18970
  misc_feature (1)..(355): NCBI GI NO: 21618199 NR Description: GDSL-motif lipase/hydrolase-like protein
  misc_feature (1)..(355): NCBI GI NO: 15242458 NR Description: GDSL-motif lipase/hydrolase-like protein
  misc_feature (1)..(355): NCBI GI NO: 21553940 NR Description: GDSL-motif lipase/hydrolase-like protein
  misc_feature (1)..(355): NCBI GI NO: 15220512 NR Description: lipase/hydrolase, putative; protein id: At1g29660
  misc_feature (1)..(355): NCBI GI NO: 15220514 NR Description: lipase/hydrolase, putative; protein id: At1g29670
  misc_feature (1)..(355): NCBI GI NO: 21592417 NR Description: lipase/hydrolase, putative [Arabidopsis thaliana]
  misc_feature (1)..(355): NCBI GI NO: 21594055 NR Description: lipase/hydrolase, putative [Arabidopsis thaliana]
  misc_feature (1)..(353): NCBI GI NO: 34910808 NR Description: GDSL-motif lipase/hydrolase-like protein
MMMAMAIAMAMNIAMGDPIAPCYFIFGDSLVDSGNNNRLTSLARANYFPYGIDFQYGPTGRFSNGKTTVDVITELLGFDDYITPYSEARGEDILRGVNYASAAAGIREETGRQLGARITFAGQVANHVNTVSQVVNILGDENEAANYLSKCIYSIGLGSNDYLNNYFMPVYYSTGSQYSPDAYANDLINRYTEQLRIMYNNGARKFALVGIGAIGCSPNELAQNSRDGVTCDERINSANRIFNSKLVSLVDHFNQNTPGAKFTYINAYGIFQDMVANPSRYGFRVTNAGCCGVGRNNGQITCLPGQAPCLNRDEYVFWDAFHPGEAANVVIGSRSFQRESASDAHPYDIQQLARL

SEQ ID NO: 2895 - DNA, 1804 bp, Arabidopsis thaliana
  misc_feature (1)..(1804): Ceres Seq. ID no. 12328091
aggtaaagacgagaggtctcgcgcttatccttaaaggactgtggtgaatggtgagtgtgacttggagggaccccatcaccgcaacaatacagcttcttagatctcgataaccacaacttacctgtcacagtttcgattagatcttctcaaaaacttcacctttttttgtttttccagtttctcagaggagatcttccttcaaagctcaaatccttttgtctgaattgtgatactgctgtccccatttttctgcaagttgggaaatttctgtcaaagttttgtgggtctgttaaaaagatctgagctttgaacatggggagctcaatggaggagaaagtggtggctgtgatcatggtcggtggtccaaccaaaggcactcgatttcggccattgtcgctgaatattccaaagcctctgtttcctattgcgggacaaccaatggtgcatcatccaatttcagcttgtaaaagtattccaaatttagctcaaatatatcttgttggcttctatgaggaaagggaatttgcactttatgtttcagccatctctaatgaacttaaagttcctgttagatatctgcgagaagacaaaccacatggttcagctggtgggctgtatcactttagaaatcttattatggaagatagtccgtctcatatcttcctgcttaactgtgatgtttgctgcagtttccccttgcccaaaatgctcgaggctcacaggggatatggtggaattggaactcttcttgtgatcaaggtctctcctgaatcagccagccaatttggagaattggttgcagatccagttactaatgagctgcttcattacaccgagaaacccgaaacttttgtcagtgatcgaattaactgtggtgtttatgtatttacacctgaaatttttaatgccataggagatgtttctactcagaggaaagatagagcaactctaaaacgtgtttccagcttcgaagctcttcaaccggcaacaaggatcccgacagattttgtaagactggatcaagacatcctttcacctctagctgggaagaaacagctatatacttatgagactatggatttctgggagcaaatcaaatctcctggaatgtcgttgaggtgttcaggactctatctttcccaattccgcttgacatctccccaactgttggctagtggtgatggaacaaggagtgccattgtgattggtgatgtttacatacatccttctgcaaaagttcacccaactgcaaagattggtcccaacgtctcaatctctgcaaatgctcgtgttggaccgggcgtcaggcttatgagctgcatcatccttgacgatgttgagatcatggaaaatgcagtggtgactaacgcaattgttgggtggaaatcttctatcgggagatggtcccgtgtccaggctgagggagtctacaattcgaaactcggagttacaattctcggagactcggttgcagttgaagacgaggttgtggtgaccagcagtattgttcttccaaacaagacactgaacgtcagtgttcaagacgagatcattttgtaactgaaaaacggaagttgaaaaatggaaccaacccagtggggagcagccacactatctccctctgattcaatatctactggagaaccacataagcaaatatttgggaactgattcacatgtatcatttatttacaccaagaattttccaacattgtatcaattcattttctatactcacaacacagctactgtaaaaggcactgaatttttgcccagaataataaagcacttgtgtagttttggc

SEQ ID NO: 2896 - protein, 415 aa, Arabidopsis thaliana
  peptide (1)..(415): Ceres Seq. ID no. 12328092
  misc_feature (10)..(246): Pfam Name: Pfam Description:  Nucleotidyl transferase
  misc_feature (1)..(415): NCBI GI NO: 15222037 NR Description: putative GDP-mannose pyrophosphorylase
  misc_feature (5)..(415): NCBI GI NO: 5882732 NR Description: Similar to gb|AF135422 GDP-mannose pyrophosphorylase A
  misc_feature (1)..(369): NCBI GI NO: 30699056 NR Description: ADP-glucose pyrophosphorylase family
  misc_feature (6)..(415): NCBI GI NO: 22325477 NR Description: putative GDP-mannose  pyrophosphorylase
  misc_feature (6)..(415): NCBI GI NO: 17064890 NR Description: putative GDP-mannose pyrophosphorylase
  misc_feature (6)..(394): NCBI GI NO: 25411099 NR Description: probable GDP-mannose pyrophosphorylase
  misc_feature (3)..(394): NCBI GI NO: 26006499 NR Description: Putative GDP-mannose pyrophosphorylase
  misc_feature (11)..(415): NCBI GI NO: 28830182 NR Description: similar to Homo sapiens (Human)
  misc_feature (11)..(415): NCBI GI NO: 33416563 NR Description: Unknown (protein for MGC:66135) [Danio rerio]
  misc_feature (11)..(415): NCBI GI NO: 19526884 NR Description: RIKEN cDNA 1810012N01 [Mus musculus]
MGSSMEEKVVAVIMVGGPTKGTRFRPLSLNIPKPLFPIAGQPMVHHPISACKSIPNLAQIYLVGFYEEREFALYVSAISNELKVPVRYLREDKPHGSAGGLYHFRNLIMEDSPSHIFLLNCDVCCSFPLPKMLEAHRGYGGIGTLLVIKVSPESASQFGELVADPVTNELLHYTEKPETFVSDRINCGVYVFTPEIFNAIGDVSTQRKDRATLKRVSSFEALQPATRIPTDFVRLDQDILSPLAGKKQLYTYETMDFWEQIKSPGMSLRCSGLYLSQFRLTSPQLLASGDGTRSAIVIGDVYIHPSAKVHPTAKIGPNVSISANARVGPGVRLMSCIILDDVEIMENAVVTNAIVGWKSSIGRWSRVQAEGVYNSKLGVTILGDSVAVEDEVVVTSSIVLPNKTLNVSVQDEIIL

SEQ ID NO: 2897 - protein, 411 aa, Arabidopsis thaliana
  peptide (1)..(411): Ceres Seq. ID no. 12328093
  misc_feature (6)..(242): Pfam Name: Pfam Description:  Nucleotidyl transferase
  misc_feature (1)..(411): NCBI GI NO: 15222037 NR Description: putative GDP-mannose pyrophosphorylase
  misc_feature (1)..(411): NCBI GI NO: 5882732 NR Description: Similar to gb|AF135422 GDP-mannose pyrophosphorylase A
  misc_feature (1)..(365): NCBI GI NO: 30699056 NR Description: ADP-glucose pyrophosphorylase family
  misc_feature (2)..(411): NCBI GI NO: 22325477 NR Description: putative GDP-mannose  pyrophosphorylase
  misc_feature (2)..(411): NCBI GI NO: 17064890 NR Description: putative GDP-mannose pyrophosphorylase
  misc_feature (2)..(390): NCBI GI NO: 25411099 NR Description: probable GDP-mannose pyrophosphorylase
  misc_feature (1)..(390): NCBI GI NO: 26006499 NR Description: Putative GDP-mannose pyrophosphorylase
  misc_feature (7)..(411): NCBI GI NO: 28830182 NR Description: similar to Homo sapiens (Human)
  misc_feature (7)..(411): NCBI GI NO: 33416563 NR Description: Unknown (protein for MGC:66135) [Danio rerio]
  misc_feature (7)..(411): NCBI GI NO: 19526884 NR Description: RIKEN cDNA 1810012N01 [Mus musculus]
MEEKVVAVIMVGGPTKGTRFRPLSLNIPKPLFPIAGQPMVHHPISACKSIPNLAQIYLVGFYEEREFALYVSAISNELKVPVRYLREDKPHGSAGGLYHFRNLIMEDSPSHIFLLNCDVCCSFPLPKMLEAHRGYGGIGTLLVIKVSPESASQFGELVADPVTNELLHYTEKPETFVSDRINCGVYVFTPEIFNAIGDVSTQRKDRATLKRVSSFEALQPATRIPTDFVRLDQDILSPLAGKKQLYTYETMDFWEQIKSPGMSLRCSGLYLSQFRLTSPQLLASGDGTRSAIVIGDVYIHPSAKVHPTAKIGPNVSISANARVGPGVRLMSCIILDDVEIMENAVVTNAIVGWKSSIGRWSRVQAEGVYNSKLGVTILGDSVAVEDEVVVTSSIVLPNKTLNVSVQDEIIL

SEQ ID NO: 2898 - protein, 402 aa, Arabidopsis thaliana
  peptide (1)..(402): Ceres Seq. ID no. 12328094
  misc_feature (1)..(233): Pfam Name: Pfam Description:  Nucleotidyl transferase
  misc_feature (1)..(402): NCBI GI NO: 15222037 NR Description: putative GDP-mannose pyrophosphorylase
  misc_feature (1)..(402): NCBI GI NO: 5882732 NR Description: Similar to gb|AF135422 GDP-mannose pyrophosphorylase A
  misc_feature (1)..(356): NCBI GI NO: 30699056 NR Description: ADP-glucose pyrophosphorylase family
  misc_feature (1)..(402): NCBI GI NO: 22325477 NR Description: putative GDP-mannose  pyrophosphorylase
  misc_feature (1)..(402): NCBI GI NO: 17064890 NR Description: putative GDP-mannose pyrophosphorylase
  misc_feature (1)..(381): NCBI GI NO: 25411099 NR Description: probable GDP-mannose pyrophosphorylase
  misc_feature (1)..(381): NCBI GI NO: 26006499 NR Description: Putative GDP-mannose pyrophosphorylase
  misc_feature (1)..(402): NCBI GI NO: 28830182 NR Description: similar to Homo sapiens (Human)
  misc_feature (1)..(402): NCBI GI NO: 33416563 NR Description: Unknown (protein for MGC:66135) [Danio rerio]
  misc_feature (1)..(402): NCBI GI NO: 19526884 NR Description: RIKEN cDNA 1810012N01 [Mus musculus]
MVGGPTKGTRFRPLSLNIPKPLFPIAGQPMVHHPISACKSIPNLAQIYLVGFYEEREFALYVSAISNELKVPVRYLREDKPHGSAGGLYHFRNLIMEDSPSHIFLLNCDVCCSFPLPKMLEAHRGYGGIGTLLVIKVSPESASQFGELVADPVTNELLHYTEKPETFVSDRINCGVYVFTPEIFNAIGDVSTQRKDRATLKRVSSFEALQPATRIPTDFVRLDQDILSPLAGKKQLYTYETMDFWEQIKSPGMSLRCSGLYLSQFRLTSPQLLASGDGTRSAIVIGDVYIHPSAKVHPTAKIGPNVSISANARVGPGVRLMSCIILDDVEIMENAVVTNAIVGWKSSIGRWSRVQAEGVYNSKLGVTILGDSVAVEDEVVVTSSIVLPNKTLNVSVQDEIIL

SEQ ID NO: 2899 - DNA, 851 bp, Arabidopsis thaliana
  misc_feature (1)..(851): Ceres Seq. ID no. 12488340
aaaacttttattacacgaacacaacaaacaacacaagtgagagaaccctagattcttcttctattcccttcttccttcaagtcctttttatttctctaccaacctcgaaaacgaatcaagagattagcatcttatcgagatttaaaccatcaattaatcggctgccatggctgggagactacttgcaaatttgattgtgatgggttctgggatcattggtcgtgctgtctttcaagcctatcgtcaagcacttgctaatgcgtctaaatctggtgttgcgcaggaagcaatgcaaaatggagtacgtcaagcagggaaagccatcactgagcaagaggctaggcagattcttggtgtaaccgagaagacctcttgggaagagatattacagaaatatgacaaactgtttgagaataatgcgaaagcagggagcttttaccttcaatctaaagttcatcgagccaaagaatgtctagaagttgtgtacagaagccaaggcaacggtacacctagttaagaccttactctttttgttttccagactcaaaattcttgctcttaatgtaaaatcaagacgagttcatggtttctttgagatgatgtggaacttacaaaacggccatagttttcttcacacattaaattagtaataactaagacaggtttgctctgatcagttgatcagtgtcaaagaacctctgaaaactagaaaggattgttctgtttgtgtatgttttatccttctctcctgagagaagactcttttaaagctatccttcctgtttttgattcagattccaaactgatcatctacactctgtaatgtataatgtataataaaaaaacttcgc

SEQ ID NO: 2900 - protein, 116 aa, Arabidopsis thaliana
  peptide (1)..(116): Ceres Seq. ID no. 12488341
  misc_feature (1)..(114): Pfam Name: UPF0108 Pfam Description: Uncharacterised protein family
  misc_feature (1)..(116): NCBI GI NO: 18411133 NR Description: putative protein; protein id: At3g59280
  misc_feature (2)..(116): NCBI GI NO: 11357639 NR Description: hypothetical protein F25L23
  misc_feature (2)..(108): NCBI GI NO: 34905796 NR Description: P0401G10.24
  misc_feature (1)..(108): NCBI GI NO: 18424521 NR Description: auxin-regulated protein; protein id: At5g61880
  misc_feature (12)..(115): NCBI GI NO: 37535410 NR Description: putative pol polyprotein
  misc_feature (12)..(108): NCBI GI NO: 10176880 NR Description: gene_id:MAC9.20~unknown protein
  misc_feature (1)..(104): NCBI GI NO: 32409779 NR Description: hypothetical protein [Neurospora crassa]
  misc_feature (4)..(104): NCBI GI NO: 19112141 NR Description: conserved hypothetical protein; similar to S
  misc_feature (1)..(104): NCBI GI NO: 6322357 NR Description: Hypothetical ORF; Mia1p [Saccharomyces cerevisiae]
MAGRLLANLIVMGSGIIGRAVFQAYRQALANASKSGVAQEAMQNGVRQAGKAITEQEARQILGVTEKTSWEEILQKYDKLFENNAKAGSFYLQSKVHRAKECLEVVYRSQGNGTPS

SEQ ID NO: 2901 - protein, 105 aa, Arabidopsis thaliana
  peptide (1)..(105): Ceres Seq. ID no. 12488342
  misc_feature (1)..(103): Pfam Name: UPF0108 Pfam Description: Uncharacterised protein family
  misc_feature (1)..(105): NCBI GI NO: 18411133 NR Description: putative protein; protein id: At3g59280
  misc_feature (1)..(105): NCBI GI NO: 11357639 NR Description: hypothetical protein F25L23
  misc_feature (1)..(97): NCBI GI NO: 34905796 NR Description: P0401G10.24
  misc_feature (1)..(97): NCBI GI NO: 18424521 NR Description: auxin-regulated protein; protein id: At5g61880
  misc_feature (1)..(104): NCBI GI NO: 37535410 NR Description: putative pol polyprotein
  misc_feature (1)..(97): NCBI GI NO: 10176880 NR Description: gene_id:MAC9.20~unknown protein
  misc_feature (1)..(93): NCBI GI NO: 32409779 NR Description: hypothetical protein [Neurospora crassa]
  misc_feature (1)..(93): NCBI GI NO: 19112141 NR Description: conserved hypothetical protein; similar to S
  misc_feature (1)..(93): NCBI GI NO: 6322357 NR Description: Hypothetical ORF; Mia1p [Saccharomyces cerevisiae]
MGSGIIGRAVFQAYRQALANASKSGVAQEAMQNGVRQAGKAITEQEARQILGVTEKTSWEEILQKYDKLFENNAKAGSFYLQSKVHRAKECLEVVYRSQGNGTPS

SEQ ID NO: 2902 - protein, 75 aa, Arabidopsis thaliana
  peptide (1)..(75): Ceres Seq. ID no. 12488343
  misc_feature (1)..(73): Pfam Name: UPF0108 Pfam Description: Uncharacterised protein family
  misc_feature (1)..(75): NCBI GI NO: 18411133 NR Description: putative protein; protein id: At3g59280
  misc_feature (1)..(75): NCBI GI NO: 11357639 NR Description: hypothetical protein F25L23
  misc_feature (1)..(67): NCBI GI NO: 34905796 NR Description: P0401G10.24
  misc_feature (1)..(67): NCBI GI NO: 18424521 NR Description: auxin-regulated protein; protein id: At5g61880
  misc_feature (1)..(74): NCBI GI NO: 37535410 NR Description: putative pol polyprotein
  misc_feature (1)..(67): NCBI GI NO: 10176880 NR Description: gene_id:MAC9.20~unknown protein
  misc_feature (1)..(63): NCBI GI NO: 32409779 NR Description: hypothetical protein [Neurospora crassa]
  misc_feature (1)..(63): NCBI GI NO: 19112141 NR Description: conserved hypothetical protein; similar to S
  misc_feature (1)..(63): NCBI GI NO: 6322357 NR Description: Hypothetical ORF; Mia1p [Saccharomyces cerevisiae]
MQNGVRQAGKAITEQEARQILGVTEKTSWEEILQKYDKLFENNAKAGSFYLQSKVHRAKECLEVVYRSQGNGTPS

SEQ ID NO: 2903 - DNA, 540 bp, Arabidopsis thaliana
  misc_feature (1)..(540): Ceres Seq. ID no. 12322554
gtatgtactacagatctcaagctgcaatctgaactaatgggattgatgatgggagctgatccggggatatctgcgtttccagaggaagacaacatattttgctggaaaggaacaattacaggaagcaaagatactgtgttcgaaggaactgagtacagactctcactcactttctctaacgattatccttttaagtctcccaaagttaagtttgagacatgctgcttccaccccaatgtggatctctatggcaatatttgcttggacattcttcaggataaatggtcatctgcttatgatgtgaggacgatattactctcaattcaaagccttctcggagaaccgaacatcagctcaccattgaacaatcaagcggctcagctttggagcaatcaagaagagtacaggaagatggttgagaagctctacaagcctttaaacgcatgattctcaaaaatcactgtaactgattttaaaatctcaactgtattggatcatatctcttttacttttataatctcaatttgagccaatattagc

SEQ ID NO: 2904 - protein, 148 aa, Arabidopsis thaliana
  peptide (1)..(148): Ceres Seq. ID no. 12322555
  misc_feature (7)..(148): NCBI GI NO: 18402475 NR Description: E2, ubiquitin-conjugating enzyme, putative
  misc_feature (7)..(148): NCBI GI NO: 9454557 NR Description: Putative ubiquitin carrier protein
  misc_feature (7)..(148): NCBI GI NO: 25293673 NR Description: hypothetical protein F17J6.3
  misc_feature (7)..(148): NCBI GI NO: 18403097 NR Description: E2, ubiquitin-conjugating enzyme, putative
  misc_feature (7)..(148): NCBI GI NO: 21618179 NR Description: E2, ubiquitin-conjugating enzyme, putative
  misc_feature (7)..(145): NCBI GI NO: 34903234 NR Description: unnamed protein product
  misc_feature (7)..(144): NCBI GI NO: 3915196 NR Description: Ubiquitin-conjugating enzyme E2-C
  misc_feature (7)..(144): NCBI GI NO: 4388942 NR Description: E2-C
  misc_feature (7)..(144): NCBI GI NO: 24663332 NR Description: vihar CG10682-PA
  misc_feature (7)..(139): NCBI GI NO: 40743465 NR Description: hypothetical protein AN5495.2
VCTTDLKLQSELMGLMMGADPGISAFPEEDNIFCWKGTITGSKDTVFEGTEYRLSLTFSNDYPFKSPKVKFETCCFHPNVDLYGNICLDILQDKWSSAYDVRTILLSIQSLLGEPNISSPLNNQAAQLWSNQEEYRKMVEKLYKPLNA

SEQ ID NO: 2905 - protein, 136 aa, Arabidopsis thaliana
  peptide (1)..(136): Ceres Seq. ID no. 12322556
  misc_feature (1)..(136): NCBI GI NO: 18402475 NR Description: E2, ubiquitin-conjugating enzyme, putative
  misc_feature (1)..(136): NCBI GI NO: 9454557 NR Description: Putative ubiquitin carrier protein
  misc_feature (1)..(136): NCBI GI NO: 18403097 NR Description: E2, ubiquitin-conjugating enzyme, putative
  misc_feature (1)..(136): NCBI GI NO: 25293673 NR Description: hypothetical protein F17J6.3
  misc_feature (1)..(136): NCBI GI NO: 21618179 NR Description: E2, ubiquitin-conjugating enzyme, putative
  misc_feature (1)..(133): NCBI GI NO: 34903234 NR Description: unnamed protein product
  misc_feature (1)..(132): NCBI GI NO: 3915196 NR Description: Ubiquitin-conjugating enzyme E2-C
  misc_feature (1)..(132): NCBI GI NO: 4388942 NR Description: E2-C
  misc_feature (1)..(132): NCBI GI NO: 24663332 NR Description: vihar CG10682-PA
  misc_feature (1)..(127): NCBI GI NO: 40743465 NR Description: hypothetical protein AN5495.2
MGLMMGADPGISAFPEEDNIFCWKGTITGSKDTVFEGTEYRLSLTFSNDYPFKSPKVKFETCCFHPNVDLYGNICLDILQDKWSSAYDVRTILLSIQSLLGEPNISSPLNNQAAQLWSNQEEYRKMVEKLYKPLNA

SEQ ID NO: 2906 - protein, 133 aa, Arabidopsis thaliana
  peptide (1)..(133): Ceres Seq. ID no. 12322557
  misc_feature (1)..(133): NCBI GI NO: 18402475 NR Description: E2, ubiquitin-conjugating enzyme, putative
  misc_feature (1)..(133): NCBI GI NO: 9454557 NR Description: Putative ubiquitin carrier protein
  misc_feature (1)..(133): NCBI GI NO: 18403097 NR Description: E2, ubiquitin-conjugating enzyme, putative
  misc_feature (1)..(133): NCBI GI NO: 25293673 NR Description: hypothetical protein F17J6.3
  misc_feature (1)..(133): NCBI GI NO: 21618179 NR Description: E2, ubiquitin-conjugating enzyme, putative
  misc_feature (1)..(130): NCBI GI NO: 34903234 NR Description: unnamed protein product
  misc_feature (1)..(129): NCBI GI NO: 3915196 NR Description: Ubiquitin-conjugating enzyme E2-C
  misc_feature (1)..(129): NCBI GI NO: 4388942 NR Description: E2-C
  misc_feature (1)..(129): NCBI GI NO: 24663332 NR Description: vihar CG10682-PA
  misc_feature (1)..(124): NCBI GI NO: 40743465 NR Description: hypothetical protein AN5495.2
MMGADPGISAFPEEDNIFCWKGTITGSKDTVFEGTEYRLSLTFSNDYPFKSPKVKFETCCFHPNVDLYGNICLDILQDKWSSAYDVRTILLSIQSLLGEPNISSPLNNQAAQLWSNQEEYRKMVEKLYKPLNA

SEQ ID NO: 2907 - DNA, 1024 bp, Arabidopsis thaliana
  misc_feature (1)..(1024): Ceres Seq. ID no. 13487023
agatcattcatagacgtacgcatcatcaaatcaattcatcgtcgtcttccacaattgtcatcaccgatcgattttccgactccgacgtacctcctcttccccgttaccttctcagagtttttagtagtcttcctttggaacaatgagtgacgtgtttgatggatatgagcgacaatactgtgagctctcggcgagtctttcaaagaagtgttcctctgctatttcgcttgatggagaacaaaagaagcagaagttgtctgaaataaaatccgggctggaaaatgcagaagtattgattaggaaaatggatctcgaggcaaggacccttccacctaatcttaagtccagcctccttgtcaaattaagagaattcaagtctgatctgaacaatttcaaaactgaagtgaagagaatcacatctggacagttgaacgctgctgctcgtgatgagttgctagaagctggtatggctgacacaaagacggcttcagctgatcagagagcaagattgatgatgtcaactgagcgtctgggccgaaccactgacagagtcaaggacagtcgtagaacaatgatggagactgaagaaatcggtgtttcaatcctccaagacttgcacggtcagagacagtctctcttacgtgcccacgaaacgcttcatggagtagacgataacattggaaagagcaagaagatcttgacagacatgacgaggaggatgaacaagaacaaatggaccattggagccatcatcatcgcattgattgccgccattttcatcatcttgtacttcaaactcaccaagtaagcctctgtaactaaatccgaccaaatcaaagaacaacggttgttttcgttttgtgagtctttgatttatcctgtttcttctttttgtgtgaaaagttgttttgccacctttgtattctaaatttgaccatacatactttaagcaagtaaagcttcggcctaagtgtcacgtatattgtttatattgttcatatcaaatccagaactatacatggtt

SEQ ID NO: 2908 - protein, 221 aa, Arabidopsis thaliana
  peptide (1)..(221): Ceres Seq. ID no. 13487024
  misc_feature (41)..(196): Pfam Name: Pfam Description:  Vesicle transport v-SNARE protein
  misc_feature (1)..(221): NCBI GI NO: 15241780 NR Description: v-SNARE AtVTI1a (ZIG) [Arabidopsis thaliana]
  misc_feature (1)..(221): NCBI GI NO: 6690274 NR Description: v-SNARE AtVTI1a [Arabidopsis thaliana]
  misc_feature (1)..(221): NCBI GI NO: 15228600 NR Description: SNARE protein AtVTI13 [Arabidopsis thaliana]
  misc_feature (1)..(219): NCBI GI NO: 34910406 NR Description: putative vesicle transport v-SNARE protein
  misc_feature (55)..(221): NCBI GI NO: 26451552 NR Description: putative vesicle transport protein
  misc_feature (1)..(218): NCBI GI NO: 34914100 NR Description: similar to vesicle transport protein
  misc_feature (1)..(220): NCBI GI NO: 18396008 NR Description: v-SNARE protein AtVTI1b, putative
  misc_feature (1)..(220): NCBI GI NO: 6690276 NR Description: v-SNARE AtVTI1b [Arabidopsis thaliana]
  misc_feature (1)..(220): NCBI GI NO: 27805772 NR Description: Vesicle transport v-SNARE 12
  misc_feature (1)..(221): NCBI GI NO: 9758339 NR Description: v-SNARE AtVTI1a-like protein
MSDVFDGYERQYCELSASLSKKCSSAISLDGEQKKQKLSEIKSGLENAEVLIRKMDLEARTLPPNLKSSLLVKLREFKSDLNNFKTEVKRITSGQLNAAARDELLEAGMADTKTASADQRARLMMSTERLGRTTDRVKDSRRTMMETEEIGVSILQDLHGQRQSLLRAHETLHGVDDNIGKSKKILTDMTRRMNKNKWTIGAIIIALIAAIFIILYFKLTK

SEQ ID NO: 2909 - protein, 167 aa, Arabidopsis thaliana
  peptide (1)..(167): Ceres Seq. ID no. 13487025
  misc_feature (1)..(142): Pfam Name: Pfam Description:  Vesicle transport v-SNARE protein
  misc_feature (1)..(167): NCBI GI NO: 15241780 NR Description: v-SNARE AtVTI1a (ZIG) [Arabidopsis thaliana]
  misc_feature (1)..(167): NCBI GI NO: 6690274 NR Description: v-SNARE AtVTI1a [Arabidopsis thaliana]
  misc_feature (1)..(167): NCBI GI NO: 15228600 NR Description: SNARE protein AtVTI13 [Arabidopsis thaliana]
  misc_feature (1)..(165): NCBI GI NO: 34910406 NR Description: putative vesicle transport v-SNARE protein
  misc_feature (1)..(167): NCBI GI NO: 26451552 NR Description: putative vesicle transport protein
  misc_feature (1)..(164): NCBI GI NO: 34914100 NR Description: similar to vesicle transport protein
  misc_feature (1)..(166): NCBI GI NO: 18396008 NR Description: v-SNARE protein AtVTI1b, putative
  misc_feature (1)..(166): NCBI GI NO: 6690276 NR Description: v-SNARE AtVTI1b [Arabidopsis thaliana]
  misc_feature (1)..(166): NCBI GI NO: 27805772 NR Description: Vesicle transport v-SNARE 12
  misc_feature (1)..(167): NCBI GI NO: 9758339 NR Description: v-SNARE AtVTI1a-like protein
MDLEARTLPPNLKSSLLVKLREFKSDLNNFKTEVKRITSGQLNAAARDELLEAGMADTKTASADQRARLMMSTERLGRTTDRVKDSRRTMMETEEIGVSILQDLHGQRQSLLRAHETLHGVDDNIGKSKKILTDMTRRMNKNKWTIGAIIIALIAAIFIILYFKLTK

SEQ ID NO: 2910 - protein, 113 aa, Arabidopsis thaliana
  peptide (1)..(113): Ceres Seq. ID no. 13487026
  misc_feature (1)..(88): Pfam Name: Pfam Description:  Vesicle transport v-SNARE protein
  misc_feature (1)..(113): NCBI GI NO: 15241780 NR Description: v-SNARE AtVTI1a (ZIG) [Arabidopsis thaliana]
  misc_feature (1)..(113): NCBI GI NO: 6690274 NR Description: v-SNARE AtVTI1a [Arabidopsis thaliana]
  misc_feature (1)..(113): NCBI GI NO: 15228600 NR Description: SNARE protein AtVTI13 [Arabidopsis thaliana]
  misc_feature (1)..(111): NCBI GI NO: 34910406 NR Description: putative vesicle transport v-SNARE protein
  misc_feature (1)..(113): NCBI GI NO: 26451552 NR Description: putative vesicle transport protein
  misc_feature (1)..(110): NCBI GI NO: 34914100 NR Description: similar to vesicle transport protein
  misc_feature (1)..(112): NCBI GI NO: 18396008 NR Description: v-SNARE protein AtVTI1b, putative
  misc_feature (1)..(112): NCBI GI NO: 6690276 NR Description: v-SNARE AtVTI1b [Arabidopsis thaliana]
  misc_feature (1)..(112): NCBI GI NO: 27805772 NR Description: Vesicle transport v-SNARE 12
  misc_feature (1)..(113): NCBI GI NO: 9758339 NR Description: v-SNARE AtVTI1a-like protein
MADTKTASADQRARLMMSTERLGRTTDRVKDSRRTMMETEEIGVSILQDLHGQRQSLLRAHETLHGVDDNIGKSKKILTDMTRRMNKNKWTIGAIIIALIAAIFIILYFKLTK

SEQ ID NO: 2911 - DNA, 1894 bp, Arabidopsis thaliana
  misc_feature (1)..(1894): Ceres Seq. ID no. 12327192
atggactccaatttctctgatcattccctctaatttcggatttttgcatcttctccgatcatcttcaccactatgggtgcttcatcttctacagacgacaaagaatcatcggagaaacgagaaatcgaaagccttgctgcttcaaccggagctcttcctctgcttaaacgatccttctccaaactcgtcgattctcaaaccaatactgttccttttcaatccttgaagcaaagttttggtttgagctacgatacaattactactgaaggagagcaaaaagtttcagacttgtttcccaaattgttggagcatttaggatcatctttagtagatttgttcttcgtgcctgataaagaaggattgagttgggttgagtttgctagtggttatgtcaaatgttgtggaagaatgtcgaattcgatgtctttcaacactttgttgagagtttactatgtgacagctaaaaatgcaggcttttctccaaagcttgagtttgaatctgatgaagctgattgtaagattaacgggtcgatttcggttagtgaattgcttgtgtttctttggatgtgttggacaatgtcttgggatggtcgaagctctaaagctgctgaaatgaaagggtgtttgtttcttccggatattagtcatttgattctatcagcagtggtgtcttgcactgattctgaatctggaaatagtttggatgtttgggagactgatgtttctggtttagaacttgaacttcctatcgggaaattcttaacgtgggctttgatgacagttccttgcctcactgagtgcctttctcacttttgtaactcgaggcttcaaaatgtgacaagtgcagaggatggatctggaccttcaaagtccactgctgtagatgattctgcgtccaagacaagcgaaaacacccttctaacatgtggaagggcatgggcgatttctttgacgagcaaaagtacaataagcgaggagattttgagctcatgttttcccggcaatagcggtgaaccaaatgaacatcttctataccgctcatattatcacgggaaaggcatgaatcgactgtggtccaacgttgaagggtatcatgctcctatactagtgataatttctgcaagttgtaaagtcgaacatgaggctacttcaagcgagaggaagtgggtcattggtgcaatcttgcagcaaggttttgagaacagagatgcattttatggaagctctgggaacttgttctccataagtccagtctttcacgcattctcatcttctggtaaggagaaaaactttgcgtatagccatctgcaccctgctggcggagtgtacgacgcacatcccaagcctgttggaattggattcgggggaacacttggaaatgagagaattttcattgatgaagactttgctaaaatcacagtccgtcatcatgcagttgataaaacttaccagtcaggctctcttttcccaaaccagggttatttaccagtagaggctttggttctagatattgaagcatgggggttaggtggaaacaaggctagggaaattcaacaaaaataccagaaaagagaagagcttttcactaaccaacgtcgaaagatcgacttgaaaacgtttacgaactgggaagattcacctgagaaaatgatgatggatatgatgggtaatcctaatgctcctagaaaggaagagaggtaatgaatgaaagacgagaactggtttgatatatacacacatatacgttgttgtctcttaaaatatatatgcaagaaactcttttgctgttcatgagctcttggattcaatgtgtaagttatgtatactagtgttgccaaaacttgaaccagccagttgatttgatatttgcctataaaaattggtttttattccc

SEQ ID NO: 2912 - protein, 542 aa, Arabidopsis thaliana
  peptide (1)..(542): Ceres Seq. ID no. 12327193
  misc_feature (1)..(542): NCBI GI NO: 15241814 NR Description: putative protein; protein id: At5g39590
  misc_feature (1)..(542): NCBI GI NO: 15010732 NR Description: AT5g39590/MIJ24_60 [Arabidopsis thaliana]
  misc_feature (1)..(542): NCBI GI NO: 27450531 NR Description: hypothetical protein [Prunus persica]
  misc_feature (1)..(542): NCBI GI NO: 38346079 NR Description: OSJNBa0084K01.19
MGASSSTDDKESSEKREIESLAASTGALPLLKRSFSKLVDSQTNTVPFQSLKQSFGLSYDTITTEGEQKVSDLFPKLLEHLGSSLVDLFFVPDKEGLSWVEFASGYVKCCGRMSNSMSFNTLLRVYYVTAKNAGFSPKLEFESDEADCKINGSISVSELLVFLWMCWTMSWDGRSSKAAEMKGCLFLPDISHLILSAVVSCTDSESGNSLDVWETDVSGLELELPIGKFLTWALMTVPCLTECLSHFCNSRLQNVTSAEDGSGPSKSTAVDDSASKTSENTLLTCGRAWAISLTSKSTISEEILSSCFPGNSGEPNEHLLYRSYYHGKGMNRLWSNVEGYHAPILVIISASCKVEHEATSSERKWVIGAILQQGFENRDAFYGSSGNLFSISPVFHAFSSSGKEKNFAYSHLHPAGGVYDAHPKPVGIGFGGTLGNERIFIDEDFAKITVRHHAVDKTYQSGSLFPNQGYLPVEALVLDIEAWGLGGNKAREIQQKYQKREELFTNQRRKIDLKTFTNWEDSPEKMMMDMMGNPNAPRKEER

SEQ ID NO: 2913 - protein, 430 aa, Arabidopsis thaliana
  peptide (1)..(430): Ceres Seq. ID no. 12327194
  misc_feature (1)..(430): NCBI GI NO: 15241814 NR Description: putative protein; protein id: At5g39590
  misc_feature (1)..(430): NCBI GI NO: 15010732 NR Description: AT5g39590/MIJ24_60 [Arabidopsis thaliana]
  misc_feature (1)..(430): NCBI GI NO: 27450531 NR Description: hypothetical protein [Prunus persica]
  misc_feature (1)..(430): NCBI GI NO: 38346079 NR Description: OSJNBa0084K01.19
MSNSMSFNTLLRVYYVTAKNAGFSPKLEFESDEADCKINGSISVSELLVFLWMCWTMSWDGRSSKAAEMKGCLFLPDISHLILSAVVSCTDSESGNSLDVWETDVSGLELELPIGKFLTWALMTVPCLTECLSHFCNSRLQNVTSAEDGSGPSKSTAVDDSASKTSENTLLTCGRAWAISLTSKSTISEEILSSCFPGNSGEPNEHLLYRSYYHGKGMNRLWSNVEGYHAPILVIISASCKVEHEATSSERKWVIGAILQQGFENRDAFYGSSGNLFSISPVFHAFSSSGKEKNFAYSHLHPAGGVYDAHPKPVGIGFGGTLGNERIFIDEDFAKITVRHHAVDKTYQSGSLFPNQGYLPVEALVLDIEAWGLGGNKAREIQQKYQKREELFTNQRRKIDLKTFTNWEDSPEKMMMDMMGNPNAPRKEER

SEQ ID NO: 2914 - protein, 426 aa, Arabidopsis thaliana
  peptide (1)..(426): Ceres Seq. ID no. 12327195
  misc_feature (1)..(426): NCBI GI NO: 15241814 NR Description: putative protein; protein id: At5g39590
  misc_feature (1)..(426): NCBI GI NO: 15010732 NR Description: AT5g39590/MIJ24_60 [Arabidopsis thaliana]
  misc_feature (1)..(426): NCBI GI NO: 27450531 NR Description: hypothetical protein [Prunus persica]
  misc_feature (1)..(426): NCBI GI NO: 38346079 NR Description: OSJNBa0084K01.19
MSFNTLLRVYYVTAKNAGFSPKLEFESDEADCKINGSISVSELLVFLWMCWTMSWDGRSSKAAEMKGCLFLPDISHLILSAVVSCTDSESGNSLDVWETDVSGLELELPIGKFLTWALMTVPCLTECLSHFCNSRLQNVTSAEDGSGPSKSTAVDDSASKTSENTLLTCGRAWAISLTSKSTISEEILSSCFPGNSGEPNEHLLYRSYYHGKGMNRLWSNVEGYHAPILVIISASCKVEHEATSSERKWVIGAILQQGFENRDAFYGSSGNLFSISPVFHAFSSSGKEKNFAYSHLHPAGGVYDAHPKPVGIGFGGTLGNERIFIDEDFAKITVRHHAVDKTYQSGSLFPNQGYLPVEALVLDIEAWGLGGNKAREIQQKYQKREELFTNQRRKIDLKTFTNWEDSPEKMMMDMMGNPNAPRKEER

SEQ ID NO: 2915 - DNA, 1244 bp, Arabidopsis thaliana
  misc_feature (1)..(1244): Ceres Seq. ID no. 12322558
actcctaaaaactataatcattgagaaacccattttaagattacatcaatcatcatcgctcttagagagaaactggagcaacttctcaaattttagccttttttttgtttttgcattttgcctaatcggtgcttctccagatttcgcttatcttgttcctatagcataacaatggcggatttcaaaccaaggatcgagatttcgttccttgaaaccttcatttgcagcgctttcgctgcttgttttgctgagttatgtactataccgttggacacagccaaagttagacttcagcttcaaagaaagattcccactggagatggtgagaatttgcccaagtatagaggatcaattggtactctagctaccatagctagagaagaaggtatttcaggtctttggaaaggtgttattgcaggacttcatcgccaatgtatctatggtggcttaaggattgggttatatgagcctgtgaagacacttttggttggaagtgactttattggcgatattcctttatatcaaaagattcttgcagctttgttaactggagctatagctattattgtagctaatccaactgatcttgttaaagttcggcttcaatcagaaggaaagttaccggctggggttcctaggcgttatgcaggagctgtagacgcttatttcaccattgtgaagctggaaggagttagtgcgctatggactggacttggtcccaatattgcccggaatgctattgtaaatgctgcagagttagctagttatgatcaaataaaggagacaattatgaaaattccgttcttcagagacagtgttttaactcatctactagctggtttagctgcaggcttcttcgctgtctgcatcggttctccaattgatgtggtgaaatctagaatgatgggagactctacttaccgaaacacagtcgattgcttcatcaaaacgatgaagaccgaggggattatggcattctacaaaggatttctcccgaattttacacggctaggaacctggaatgccattatgttcctcacattagaacaagtgaaaaaagtgtttctaagagaagtcttgtacgattgattctcagatccctagtcgaaaaccataccttattacataatcccttctataaaactttgaattgttagaattaaaacatatatactttctatgttatgtgagctttgttatttagattagtatagaaacattttatccaaaaaaaaattctttgc

SEQ ID NO: 2916 - protein, 305 aa, Arabidopsis thaliana
  peptide (1)..(305): Ceres Seq. ID no. 12322559
  misc_feature (1)..(305): NCBI GI NO: 18424178 NR Description: uncoupling protein (AtUCP2); protein id: At5g58970
  misc_feature (1)..(302): NCBI GI NO: 7106157 NR Description: SfUCPa [Symplocarpus foetidus]
  misc_feature (7)..(301): NCBI GI NO: 22002462 NR Description: mitochondrial uncoupling protein
  misc_feature (3)..(302): NCBI GI NO: 18921040 NR Description: putative uncoupling protein
  misc_feature (3)..(302): NCBI GI NO: 7489287 NR Description: uncoupling protein
  misc_feature (9)..(302): NCBI GI NO: 15232420 NR Description: uncoupling protein
  misc_feature (9)..(302): NCBI GI NO: 25295878 NR Description: uncoupling protein
  misc_feature (9)..(301): NCBI GI NO: 19401698 NR Description: uncoupling protein [Zea mays]
  misc_feature (5)..(301): NCBI GI NO: 13537347 NR Description: uncoupling protein
  misc_feature (1)..(215): NCBI GI NO: 7106159 NR Description: SfUCPb [Symplocarpus foetidus]
MADFKPRIEISFLETFICSAFAACFAELCTIPLDTAKVRLQLQRKIPTGDGENLPKYRGSIGTLATIAREEGISGLWKGVIAGLHRQCIYGGLRIGLYEPVKTLLVGSDFIGDIPLYQKILAALLTGAIAIIVANPTDLVKVRLQSEGKLPAGVPRRYAGAVDAYFTIVKLEGVSALWTGLGPNIARNAIVNAAELASYDQIKETIMKIPFFRDSVLTHLLAGLAAGFFAVCIGSPIDVVKSRMMGDSTYRNTVDCFIKTMKTEGIMAFYKGFLPNFTRLGTWNAIMFLTLEQVKKVFLREVLYD

SEQ ID NO: 2917 - DNA, 895 bp, Arabidopsis thaliana
  misc_feature (1)..(895): Ceres Seq. ID no. 13491520
gatcgagaaatggagaataatccaagaagctcatcgtctctccctctagccgggcgtgtagctatagtgaccggagccaccagaggcatgggccgtgaaatcgcgattcacctccactctcttggtgcaagagtcaccatcaattatgtctcgagctcatcaaaagctgaactcttggtttcagaactaaacgactcatctcaattaaagtcagcgatcgcagttaaagcagatgtgtcagacccggaccagatcaacaacttgtttgatcaaacagaacaagagttcggatctaaagttcacatcgtcgtgaattgtgcaggtgttttggatccaaagtatccatctttatccgagacgacactagaagatttcgataacacattcacaataaacacaagagggtctttcttgtgttgcaaggaagcagctaaaagggttatgagaggaggtggtggaagaatcattatgatgtctacatcaatggttggtggtctcgccccgggttatggagtttacgcagcatcaaaggccgccgttgagacaatggtgaaagtgttggcgaaggagcttaagggaagccggataaccgcgaattgcgtggcgccagggccggttgcgacggagatgttttatgctggaaagagtgatgaaacggtgaaaatgcttgcaggggcttgtcctatggggaggatcggtgagtcaaaggatataaccgagattgtagggtttttggccggtgatggtggtgaatggattaacggtcaagttattagagccaatggaggctttgttgtctaataaatgaagaactaacattggaatttgatgttgtcttcttcttttcgtgtgttgatctacttttatgtcaatgatgatgagttgtttattgggc

SEQ ID NO: 2918 - protein, 266 aa, Arabidopsis thaliana
  peptide (1)..(266): Ceres Seq. ID no. 13491521
  misc_feature (4)..(266): NCBI GI NO: 15235621 NR Description: short-chain dehydrogenase/reductase family protein
  misc_feature (10)..(265): NCBI GI NO: 15229203 NR Description: short-chain dehydrogenase/reductase family protein
  misc_feature (10)..(265): NCBI GI NO: 9758903 NR Description: Brn1-like protein [Arabidopsis thaliana]
  misc_feature (10)..(250): NCBI GI NO: 30686710 NR Description: short-chain dehydrogenase/reductase family protein
  misc_feature (11)..(263): NCBI GI NO: 34395018 NR Description: putative short-chain dehydrogenase/reductase
  misc_feature (10)..(263): NCBI GI NO: 30679011 NR Description: short-chain type dehydrogenase/reductase -related
  misc_feature (6)..(265): NCBI GI NO: 34393370 NR Description: putative short-chain dehydrogenase/reductase
  misc_feature (3)..(265): NCBI GI NO: 1711355 NR Description: SHORT-CHAIN TYPE DEHYDROGENASE/REDUCTASE
  misc_feature (10)..(264): NCBI GI NO: 37534988 NR Description: putative short-chain alcohol dehydrogenase
  misc_feature (12)..(265): NCBI GI NO: 34395019 NR Description: putative short-chain dehydrogenase/reductase
DREMENNPRSSSSLPLAGRVAIVTGATRGMGREIAIHLHSLGARVTINYVSSSSKAELLVSELNDSSQLKSAIAVKADVSDPDQINNLFDQTEQEFGSKVHIVVNCAGVLDPKYPSLSETTLEDFDNTFTINTRGSFLCCKEAAKRVMRGGGGRIIMMSTSMVGGLAPGYGVYAASKAAVETMVKVLAKELKGSRITANCVAPGPVATEMFYAGKSDETVKMLAGACPMGRIGESKDITEIVGFLAGDGGEWINGQVIRANGGFVV

SEQ ID NO: 2919 - protein, 263 aa, Arabidopsis thaliana
  peptide (1)..(263): Ceres Seq. ID no. 13491522
  misc_feature (1)..(263): NCBI GI NO: 15235621 NR Description: short-chain dehydrogenase/reductase family protein
  misc_feature (7)..(262): NCBI GI NO: 15229203 NR Description: short-chain dehydrogenase/reductase family protein
  misc_feature (7)..(262): NCBI GI NO: 9758903 NR Description: Brn1-like protein [Arabidopsis thaliana]
  misc_feature (7)..(247): NCBI GI NO: 30686710 NR Description: short-chain dehydrogenase/reductase family protein
  misc_feature (8)..(260): NCBI GI NO: 34395018 NR Description: putative short-chain dehydrogenase/reductase
  misc_feature (7)..(260): NCBI GI NO: 30679011 NR Description: short-chain type dehydrogenase/reductase -related
  misc_feature (3)..(262): NCBI GI NO: 34393370 NR Description: putative short-chain dehydrogenase/reductase
  misc_feature (1)..(262): NCBI GI NO: 1711355 NR Description: SHORT-CHAIN TYPE DEHYDROGENASE/REDUCTASE
  misc_feature (7)..(261): NCBI GI NO: 37534988 NR Description: putative short-chain alcohol dehydrogenase
  misc_feature (9)..(262): NCBI GI NO: 34395019 NR Description: putative short-chain dehydrogenase/reductase
MENNPRSSSSLPLAGRVAIVTGATRGMGREIAIHLHSLGARVTINYVSSSSKAELLVSELNDSSQLKSAIAVKADVSDPDQINNLFDQTEQEFGSKVHIVVNCAGVLDPKYPSLSETTLEDFDNTFTINTRGSFLCCKEAAKRVMRGGGGRIIMMSTSMVGGLAPGYGVYAASKAAVETMVKVLAKELKGSRITANCVAPGPVATEMFYAGKSDETVKMLAGACPMGRIGESKDITEIVGFLAGDGGEWINGQVIRANGGFVV

SEQ ID NO: 2920 - protein, 237 aa, Arabidopsis thaliana
  peptide (1)..(237): Ceres Seq. ID no. 13491523
  misc_feature (1)..(237): NCBI GI NO: 15235621 NR Description: short-chain dehydrogenase/reductase family protein
  misc_feature (1)..(236): NCBI GI NO: 15229203 NR Description: short-chain dehydrogenase/reductase family protein
  misc_feature (1)..(236): NCBI GI NO: 9758903 NR Description: Brn1-like protein [Arabidopsis thaliana]
  misc_feature (1)..(221): NCBI GI NO: 30686710 NR Description: short-chain dehydrogenase/reductase family protein
  misc_feature (1)..(234): NCBI GI NO: 34395018 NR Description: putative short-chain dehydrogenase/reductase
  misc_feature (1)..(234): NCBI GI NO: 30679011 NR Description: short-chain type dehydrogenase/reductase -related
  misc_feature (1)..(236): NCBI GI NO: 34393370 NR Description: putative short-chain dehydrogenase/reductase
  misc_feature (1)..(236): NCBI GI NO: 1711355 NR Description: SHORT-CHAIN TYPE DEHYDROGENASE/REDUCTASE
  misc_feature (1)..(235): NCBI GI NO: 37534988 NR Description: putative short-chain alcohol dehydrogenase
  misc_feature (1)..(236): NCBI GI NO: 34395019 NR Description: putative short-chain dehydrogenase/reductase
MGREIAIHLHSLGARVTINYVSSSSKAELLVSELNDSSQLKSAIAVKADVSDPDQINNLFDQTEQEFGSKVHIVVNCAGVLDPKYPSLSETTLEDFDNTFTINTRGSFLCCKEAAKRVMRGGGGRIIMMSTSMVGGLAPGYGVYAASKAAVETMVKVLAKELKGSRITANCVAPGPVATEMFYAGKSDETVKMLAGACPMGRIGESKDITEIVGFLAGDGGEWINGQVIRANGGFVV

SEQ ID NO: 2921 - DNA, 1521 bp, Arabidopsis thaliana
  misc_feature (1)..(1521): Ceres Seq. ID no. 12394809
agctcctttctactaaaacccttttactataaattctacgtacacgtaccacttcttctcctcaaattcatcaaacccatttctattccaactcccaaaaatggcgattcgtcttcctctgatctgtcttcttggttcattcatggtagtggcgattgcggctgatttaacaccggagcgttattggagcactgctttaccaaacactcccattcccaactctctccataatcttttgactttcgattttaccgacgagaaaagtaccaacgtccaagtaggtaaaggcggagtaaacgttaacacccataaaggtaaaaccggtagcggaaccgccgtgaacgttggaaagggaggtgtacgcgtggacacaggcaagggcaagcccggaggagggacacacgtgagcgttggcagcggaaaaggtcacggaggtggcgtcgcagtccacacgggtaaacccggtaaaagaaccgacgtaggagtcggtaaaggcggtgtgacggtgcacacgcgccacaagggaagaccgatttacgttggtgtgaaaccaggagcaaaccctttcgtgtataactatgcagcgaaggagactcagctccacgacgatcctaacgcggctctcttcttcttggagaaggacttggttcgcgggaaagaaatgaatgtccggtttaacgctgaggatggttacggaggcaaaactgcgttcttgccacgtggagaggctgaaacggtgccttttggatcggagaagttttcggagacgttgaaacgtttctcggtggaagctggttcggaagaagcggagatgatgaagaagaccattgaggagtgtgaagccagaaaagttagtggagaggagaagtattgtgcgacgtctttggagtcgatggtcgactttagtgtttcgaaacttggtaaatatcacgtcagggctgtttccactgaggtggctaagaagaacgcaccgatgcagaagtacaaaatcgcggcggctggggtaaagaagttgtctgacgataaatctgtggtgtgtcacaaacagaagtacccattcgcggtgttctactgccacaaggcgatgatgacgaccgtctacgcggttccgctcgagggagagaacgggatgcgagctaaagcagttgcggtatgccacaagaacacctcagcttggaacccaaaccacttggccttcaaagtcttaaaggtgaagccagggaccgttccggtctgccacttcctcccggagactcatgttgtgtggttcagctactagatagatctgttttctatcttattgtgggttatgtataattacgtttcagataatctatcttttgggatgttttggttatgaatatacatacatatacatatagtaatgcgtggtttccatataagagtgaaggcatctatatgtttttttttttattaacctacgtagctgtcttttgtggtctgtatcttgtggttttgcaaaaacctataataaaattagagctgaaatgttaccatttc

SEQ ID NO: 2922 - protein, 392 aa, Arabidopsis thaliana
  peptide (1)..(392): Ceres Seq. ID no. 12394810
  misc_feature (1)..(392): NCBI GI NO: 15239478 NR Description: dehydration-induced protein RD22
  misc_feature (77)..(389): NCBI GI NO: 16588826 NR Description: dehydration-responsive protein RD22
  misc_feature (77)..(389): NCBI GI NO: 14422444 NR Description: BURP domain-containing protein
  misc_feature (123)..(389): NCBI GI NO: 14422448 NR Description: BURP domain-containing protein
  misc_feature (16)..(83): NCBI GI NO: 14422448 NR Description: BURP domain-containing protein
  misc_feature (56)..(389): NCBI GI NO: 34910186 NR Description: putative dehydration-responsive protein RD22 precursor
  misc_feature (100)..(389): NCBI GI NO: 18447761 NR Description: dehydration-induced protein RD22-like protein
  misc_feature (77)..(99): NCBI GI NO: 14422448 NR Description: BURP domain-containing protein
  misc_feature (100)..(389): NCBI GI NO: 33578034 NR Description: BURP domain-containing protein
  misc_feature (141)..(389): NCBI GI NO: 14422442 NR Description: BURP domain-containing protein
MAIRLPLICLLGSFMVVAIAADLTPERYWSTALPNTPIPNSLHNLLTFDFTDEKSTNVQVGKGGVNVNTHKGKTGSGTAVNVGKGGVRVDTGKGKPGGGTHVSVGSGKGHGGGVAVHTGKPGKRTDVGVGKGGVTVHTRHKGRPIYVGVKPGANPFVYNYAAKETQLHDDPNAALFFLEKDLVRGKEMNVRFNAEDGYGGKTAFLPRGEAETVPFGSEKFSETLKRFSVEAGSEEAEMMKKTIEECEARKVSGEEKYCATSLESMVDFSVSKLGKYHVRAVSTEVAKKNAPMQKYKIAAAGVKKLSDDKSVVCHKQKYPFAVFYCHKAMMTTVYAVPLEGENGMRAKAVAVCHKNTSAWNPNHLAFKVLKVKPGTVPVCHFLPETHVVWFSY

SEQ ID NO: 2923 - protein, 378 aa, Arabidopsis thaliana
  peptide (1)..(378): Ceres Seq. ID no. 12394811
  misc_feature (1)..(378): NCBI GI NO: 15239478 NR Description: dehydration-induced protein RD22
  misc_feature (63)..(375): NCBI GI NO: 16588826 NR Description: dehydration-responsive protein RD22
  misc_feature (63)..(375): NCBI GI NO: 14422444 NR Description: BURP domain-containing protein
  misc_feature (109)..(375): NCBI GI NO: 14422448 NR Description: BURP domain-containing protein
  misc_feature (2)..(69): NCBI GI NO: 14422448 NR Description: BURP domain-containing protein
  misc_feature (42)..(375): NCBI GI NO: 34910186 NR Description: putative dehydration-responsive protein RD22 precursor
  misc_feature (86)..(375): NCBI GI NO: 18447761 NR Description: dehydration-induced protein RD22-like protein
  misc_feature (63)..(85): NCBI GI NO: 14422448 NR Description: BURP domain-containing protein
  misc_feature (86)..(375): NCBI GI NO: 33578034 NR Description: BURP domain-containing protein
  misc_feature (127)..(375): NCBI GI NO: 14422442 NR Description: BURP domain-containing protein
MVVAIAADLTPERYWSTALPNTPIPNSLHNLLTFDFTDEKSTNVQVGKGGVNVNTHKGKTGSGTAVNVGKGGVRVDTGKGKPGGGTHVSVGSGKGHGGGVAVHTGKPGKRTDVGVGKGGVTVHTRHKGRPIYVGVKPGANPFVYNYAAKETQLHDDPNAALFFLEKDLVRGKEMNVRFNAEDGYGGKTAFLPRGEAETVPFGSEKFSETLKRFSVEAGSEEAEMMKKTIEECEARKVSGEEKYCATSLESMVDFSVSKLGKYHVRAVSTEVAKKNAPMQKYKIAAAGVKKLSDDKSVVCHKQKYPFAVFYCHKAMMTTVYAVPLEGENGMRAKAVAVCHKNTSAWNPNHLAFKVLKVKPGTVPVCHFLPETHVVWFSY

SEQ ID NO: 2924 - protein, 205 aa, Arabidopsis thaliana
  peptide (1)..(205): Ceres Seq. ID no. 12394812
  misc_feature (1)..(205): NCBI GI NO: 15239478 NR Description: dehydration-induced protein RD22
  misc_feature (1)..(202): NCBI GI NO: 16588826 NR Description: dehydration-responsive protein RD22
  misc_feature (1)..(202): NCBI GI NO: 14422444 NR Description: BURP domain-containing protein
  misc_feature (1)..(202): NCBI GI NO: 14422448 NR Description: BURP domain-containing protein
  misc_feature (1)..(202): NCBI GI NO: 34910186 NR Description: putative dehydration-responsive protein RD22 precursor
  misc_feature (1)..(202): NCBI GI NO: 18447761 NR Description: dehydration-induced protein RD22-like protein
  misc_feature (1)..(202): NCBI GI NO: 33578034 NR Description: BURP domain-containing protein
  misc_feature (1)..(202): NCBI GI NO: 14422442 NR Description: BURP domain-containing protein
  misc_feature (1)..(202): NCBI GI NO: 14422446 NR Description: BURP domain-containing protein
  misc_feature (1)..(204): NCBI GI NO: 24416614 NR Description: resistant specific protein-1(4) [Vigna radiata]
MNVRFNAEDGYGGKTAFLPRGEAETVPFGSEKFSETLKRFSVEAGSEEAEMMKKTIEECEARKVSGEEKYCATSLESMVDFSVSKLGKYHVRAVSTEVAKKNAPMQKYKIAAAGVKKLSDDKSVVCHKQKYPFAVFYCHKAMMTTVYAVPLEGENGMRAKAVAVCHKNTSAWNPNHLAFKVLKVKPGTVPVCHFLPETHVVWFSY

SEQ ID NO: 2925 - DNA, 1617 bp, Arabidopsis thaliana
  misc_feature (1)..(1617): Ceres Seq. ID no. 12327188
cccgacagtagcaagcaaaaattcttcatcgactcaaattcaaaaactcatctctctctatctctatttctctggttccatagctcaccgtcgcatcgcagatctactccttccgcaataaattttaccggcggaggtatcagatctcgccgatctgttgtagcagctactgtattttgggcttctcatttgatattggggaaacgaggagtagaggacgatggaaaatctgatctctctggttaacaagatacagagagcttgcacggctttaggagaccatggagactccagcgctttacctactctttgggattccttgcctgcgatcgccgtcgttggtggtcagagctcagggaagtcttcagtcctggagagcatcgtgggaaaggactttttaccccgtggatctggcattgttactcgaaggccccttgtcttacagttgcaaaagatcgatgatggaacccgggagtatgcagagtttcttcacctcccgaggaaaaagtttactgattttgctgctgtgaggaaggagattcaagatgagactgacagagagactggacgcagcaaggctatttctagtgttcccattcaccttagcatatactctcccaatgttgtcaacttgacactgatagatcttccagggcttacaaaagttgctgttgatggacaatctgatagtatagtgaaggacattgaaaacatggttcggtcctacattgaaaagcccaactgcatcattttggcaatctcacctgcaaaccaagatcttgctacctcagatgcaattaaaatttcccgtgaggttgatccatcgggggacagaacatttggtgtcttgacaaagattgatcttatggacaaggggacggatgcagtggaaattctggaagggagatcttttaaacttaaatatccgtgggttggtgtcgtcaaccgttcccaagcagatattaacaagaatgtcgacatgattgcggctcggaaaagagagagggagtacttttccaatactactgagtataggcaccttgctaataaaatgggttccgagcatttggcaaagatgctctccaagcatctagaacgtgtgatcaagtcgagaattcctggcattcagtcacttattaacaaaacagtattagagctggaaactgaactaagtcgccttggaaagcctattgcagctgatgcaggggggaagttgtactcaataatggagatatgtcggctttttgatcaaatattcaaagagcatcttgatggagtgcgtgctggtggtgaaaaagtgtacaacgtgtttgataaccaccttcctgcggctctgaagagactccaatttgacaagcagctagcgatggacaacatccggaagctggtcactgaggctgatggttaccagcctcacttgattgctcctgagcaaggttaccgtcgtctcattgagtcttctattgtctccatcagaggccctgctgaagcatctgttgacaccgtatgaactctttactttcatctctaaaaagatgtatcaaaaacctaacacaaaacaataagcttctctctccgttttttttttttttctatggttaaatattaggttcatgc

SEQ ID NO: 2926 - protein, 429 aa, Arabidopsis thaliana
  peptide (1)..(429): Ceres Seq. ID no. 12327189
  misc_feature (222)..(429): Pfam Name: Pfam Description:  Dynamin central region
  misc_feature (1)..(429): NCBI GI NO: 21593776 NR Description: dynamin-like protein [Arabidopsis thaliana]
  misc_feature (1)..(429): NCBI GI NO: 20453081 NR Description: AT5g42080/MJC20_19 [Arabidopsis thaliana]
  misc_feature (1)..(429): NCBI GI NO: 2267213 NR Description: dynamin-like GTP binding protein
  misc_feature (1)..(429): NCBI GI NO: 2129825 NR Description: phragmoplastin 12 - soybean
  misc_feature (1)..(429): NCBI GI NO: 2129826 NR Description: phragmoplastin 5 - soybean
  misc_feature (1)..(429): NCBI GI NO: 5931765 NR Description: phragmoplastin [Nicotiana tabacum]
  misc_feature (134)..(416): NCBI GI NO: 34911188 NR Description: putative dynamin-like protein
  misc_feature (1)..(152): NCBI GI NO: 34911188 NR Description: putative dynamin-like protein
  misc_feature (1)..(429): NCBI GI NO: 18411520 NR Description: dynamin-like protein 4
  misc_feature (1)..(429): NCBI GI NO: 11357275 NR Description: dynamin-like protein 4
MENLISLVNKIQRACTALGDHGDSSALPTLWDSLPAIAVVGGQSSGKSSVLESIVGKDFLPRGSGIVTRRPLVLQLQKIDDGTREYAEFLHLPRKKFTDFAAVRKEIQDETDRETGRSKAISSVPIHLSIYSPNVVNLTLIDLPGLTKVAVDGQSDSIVKDIENMVRSYIEKPNCIILAISPANQDLATSDAIKISREVDPSGDRTFGVLTKIDLMDKGTDAVEILEGRSFKLKYPWVGVVNRSQADINKNVDMIAARKREREYFSNTTEYRHLANKMGSEHLAKMLSKHLERVIKSRIPGIQSLINKTVLELETELSRLGKPIAADAGGKLYSIMEICRLFDQIFKEHLDGVRAGGEKVYNVFDNHLPAALKRLQFDKQLAMDNIRKLVTEADGYQPHLIAPEQGYRRLIESSIVSIRGPAEASVDTV

SEQ ID NO: 2927 - protein, 265 aa, Arabidopsis thaliana
  peptide (1)..(265): Ceres Seq. ID no. 12327190
  misc_feature (58)..(265): Pfam Name: Pfam Description:  Dynamin central region
  misc_feature (1)..(265): NCBI GI NO: 21593776 NR Description: dynamin-like protein [Arabidopsis thaliana]
  misc_feature (1)..(265): NCBI GI NO: 20453081 NR Description: AT5g42080/MJC20_19 [Arabidopsis thaliana]
  misc_feature (1)..(265): NCBI GI NO: 2267213 NR Description: dynamin-like GTP binding protein
  misc_feature (1)..(265): NCBI GI NO: 2129825 NR Description: phragmoplastin 12 - soybean
  misc_feature (1)..(265): NCBI GI NO: 2129826 NR Description: phragmoplastin 5 - soybean
  misc_feature (1)..(265): NCBI GI NO: 5931765 NR Description: phragmoplastin [Nicotiana tabacum]
  misc_feature (1)..(252): NCBI GI NO: 34911188 NR Description: putative dynamin-like protein
  misc_feature (1)..(265): NCBI GI NO: 18411520 NR Description: dynamin-like protein 4
  misc_feature (1)..(265): NCBI GI NO: 11357275 NR Description: dynamin-like protein 4
  misc_feature (1)..(265): NCBI GI NO: 37536976 NR Description: putative phragmoplastin
MVRSYIEKPNCIILAISPANQDLATSDAIKISREVDPSGDRTFGVLTKIDLMDKGTDAVEILEGRSFKLKYPWVGVVNRSQADINKNVDMIAARKREREYFSNTTEYRHLANKMGSEHLAKMLSKHLERVIKSRIPGIQSLINKTVLELETELSRLGKPIAADAGGKLYSIMEICRLFDQIFKEHLDGVRAGGEKVYNVFDNHLPAALKRLQFDKQLAMDNIRKLVTEADGYQPHLIAPEQGYRRLIESSIVSIRGPAEASVDTV

SEQ ID NO: 2928 - protein, 214 aa, Arabidopsis thaliana
  peptide (1)..(214): Ceres Seq. ID no. 12327191
  misc_feature (7)..(214): Pfam Name: Pfam Description:  Dynamin central region
  misc_feature (1)..(214): NCBI GI NO: 21593776 NR Description: dynamin-like protein [Arabidopsis thaliana]
  misc_feature (1)..(214): NCBI GI NO: 20453081 NR Description: AT5g42080/MJC20_19 [Arabidopsis thaliana]
  misc_feature (1)..(214): NCBI GI NO: 2267213 NR Description: dynamin-like GTP binding protein
  misc_feature (1)..(214): NCBI GI NO: 2129825 NR Description: phragmoplastin 12 - soybean
  misc_feature (1)..(214): NCBI GI NO: 2129826 NR Description: phragmoplastin 5 - soybean
  misc_feature (1)..(214): NCBI GI NO: 5931765 NR Description: phragmoplastin [Nicotiana tabacum]
  misc_feature (1)..(201): NCBI GI NO: 34911188 NR Description: putative dynamin-like protein
  misc_feature (1)..(214): NCBI GI NO: 18411520 NR Description: dynamin-like protein 4
  misc_feature (1)..(214): NCBI GI NO: 11357275 NR Description: dynamin-like protein 4
  misc_feature (1)..(214): NCBI GI NO: 37536976 NR Description: putative phragmoplastin
MDKGTDAVEILEGRSFKLKYPWVGVVNRSQADINKNVDMIAARKREREYFSNTTEYRHLANKMGSEHLAKMLSKHLERVIKSRIPGIQSLINKTVLELETELSRLGKPIAADAGGKLYSIMEICRLFDQIFKEHLDGVRAGGEKVYNVFDNHLPAALKRLQFDKQLAMDNIRKLVTEADGYQPHLIAPEQGYRRLIESSIVSIRGPAEASVDTV

SEQ ID NO: 2929 - DNA, 1642 bp, Arabidopsis thaliana
  misc_feature (1)..(1642): Ceres Seq. ID no. 12580332
attattatcccttcttcttcttcttcttcgtcttcgtctttgattctcctgattcatgtcgcttaaatttttagcgatcttcgaatcccattttccttcgggaatctgacattttttctcgggaaattttttacccaaatcggagtaaagtatcgaatctagagaatccgctatggatgagacctattttgatctattgaatttctttaagaatccctcttttacagagacatttgtcgacatcttactatgcgcagttccgatttggctcgccgttatgatcgggttattaatcggatggtcttggcgtccaagatggaccggtttgatctatttagggtttcgttctaagcttcggtttttatggaccgcaccgcctgggtttggtgctcgtcggctttggcttgctttcaccgctctctctgctttctccgtttgccgaaccatctggtcaaggaatgacaccagagctaataaatcggcgaccggttcagcttcgtcgcagacgcctgttgaggataatgatgaatcaggattggcctcaagaggtagcgataacgggacggtgacagaggatattgtgacagagaatgatttagagcatctgcttcagctgcttgaagttggaaatgcagctttggaatggcaatctatgatggataagactactccaaatatgagctaccaggcttggcgtcatgagcctgagacaggtcctgttatttatcgcagccggactgtgtttgaggatgcaactccagatattgttagggatttcttctgggatgatgagtttcgacctaaatgggatttcatgcttgccaacttcaaaacgttggaggaggacactcagacaggaacaatgattgttcagtggagaaaaaagtttccttttttctgtagtgaccgagagtatatcattggccggagaatatgggagtctgggaagaagtattattgtgtcacaaagggagttccttatccagctctaccaaagcgtgataagccaaggcgtgttgagctttatttctcaagttgggttatcatagcggttgaatcccgaaaaggagatggacagcaaacggcttgtgaagtttcccttgtccactacgaagacatgggcatcccaaaagacgtagcaaagttaggtgtccgtcatggcatgtggggagctgtcaagaagctaaactccggtttacgagcgtaccaatccgccagaaaatcagactcatctctatctcggatcgcccaaatggcaagaatctctacaaaactgaacatggattctgcagaatcttcttcaagagatgaagacagaagcagagcaatggaatatgcgagacaacgggaccatttgagaatggactggaaatgggttgttgtaggaggtgtcgcattggcttgtggccttcactctgggatcattggcaaggctttactggctggagctggccagagactggctcgtaggtgagaaaccttgtcgtattcttattatatcttcccttgacagaaaagagaaacatatgcatataactaagggaaatgtattatttttgcaactcctctgagaagggcatgtggttttggtggtgaaccatgtagagtagtagctttaaactatggagtcataagttatttg

SEQ ID NO: 2930 - protein, 433 aa, Arabidopsis thaliana
  peptide (1)..(433): Ceres Seq. ID no. 12580333
  misc_feature (185)..(264): Pfam Name: Pfam Description:  START domain
  misc_feature (1)..(433): NCBI GI NO: 18414239 NR Description: expressed protein; protein id: At4g14500
  misc_feature (1)..(433): NCBI GI NO: 7485064 NR Description: hypothetical protein - Arabidopsis thaliana
  misc_feature (9)..(433): NCBI GI NO: 18403635 NR Description: expressed protein; protein id: At3g23080
  misc_feature (9)..(433): NCBI GI NO: 15810257 NR Description: unknown protein [Arabidopsis thaliana]
  misc_feature (118)..(429): NCBI GI NO: 34393225 NR Description: putative membrane related protein CP5
  misc_feature (5)..(42): NCBI GI NO: 34393225 NR Description: putative membrane related protein CP5
  misc_feature (76)..(432): NCBI GI NO: 22135902 NR Description: membrane related protein CP5, putative
  misc_feature (21)..(52): NCBI GI NO: 22135902 NR Description: membrane related protein CP5, putative
  misc_feature (76)..(432): NCBI GI NO: 15217736 NR Description: membrane related protein CP5, putative
  misc_feature (21)..(52): NCBI GI NO: 15217736 NR Description: membrane related protein CP5, putative
MDETYFDLLNFFKNPSFTETFVDILLCAVPIWLAVMIGLLIGWSWRPRWTGLIYLGFRSKLRFLWTAPPGFGARRLWLAFTALSAFSVCRTIWSRNDTRANKSATGSASSQTPVEDNDESGLASRGSDNGTVTEDIVTENDLEHLLQLLEVGNAALEWQSMMDKTTPNMSYQAWRHEPETGPVIYRSRTVFEDATPDIVRDFFWDDEFRPKWDFMLANFKTLEEDTQTGTMIVQWRKKFPFFCSDREYIIGRRIWESGKKYYCVTKGVPYPALPKRDKPRRVELYFSSWVIIAVESRKGDGQQTACEVSLVHYEDMGIPKDVAKLGVRHGMWGAVKKLNSGLRAYQSARKSDSSLSRIAQMARISTKLNMDSAESSSRDEDRSRAMEYARQRDHLRMDWKWVVVGGVALACGLHSGIIGKALLAGAGQRLARR

SEQ ID NO: 2931 - protein, 398 aa, Arabidopsis thaliana
  peptide (1)..(398): Ceres Seq. ID no. 12580334
  misc_feature (150)..(229): Pfam Name: Pfam Description:  START domain
  misc_feature (1)..(398): NCBI GI NO: 18414239 NR Description: expressed protein; protein id: At4g14500
  misc_feature (1)..(398): NCBI GI NO: 7485064 NR Description: hypothetical protein - Arabidopsis thaliana
  misc_feature (1)..(398): NCBI GI NO: 18403635 NR Description: expressed protein; protein id: At3g23080
  misc_feature (1)..(398): NCBI GI NO: 15810257 NR Description: unknown protein [Arabidopsis thaliana]
  misc_feature (83)..(394): NCBI GI NO: 34393225 NR Description: putative membrane related protein CP5
  misc_feature (41)..(397): NCBI GI NO: 22135902 NR Description: membrane related protein CP5, putative
  misc_feature (1)..(17): NCBI GI NO: 22135902 NR Description: membrane related protein CP5, putative
  misc_feature (41)..(397): NCBI GI NO: 15217736 NR Description: membrane related protein CP5, putative
  misc_feature (1)..(17): NCBI GI NO: 15217736 NR Description: membrane related protein CP5, putative
  misc_feature (102)..(396): NCBI GI NO: 38344869 NR Description: OSJNBa0020P07.12
MIGLLIGWSWRPRWTGLIYLGFRSKLRFLWTAPPGFGARRLWLAFTALSAFSVCRTIWSRNDTRANKSATGSASSQTPVEDNDESGLASRGSDNGTVTEDIVTENDLEHLLQLLEVGNAALEWQSMMDKTTPNMSYQAWRHEPETGPVIYRSRTVFEDATPDIVRDFFWDDEFRPKWDFMLANFKTLEEDTQTGTMIVQWRKKFPFFCSDREYIIGRRIWESGKKYYCVTKGVPYPALPKRDKPRRVELYFSSWVIIAVESRKGDGQQTACEVSLVHYEDMGIPKDVAKLGVRHGMWGAVKKLNSGLRAYQSARKSDSSLSRIAQMARISTKLNMDSAESSSRDEDRSRAMEYARQRDHLRMDWKWVVVGGVALACGLHSGIIGKALLAGAGQRLARR

SEQ ID NO: 2932 - protein, 273 aa, Arabidopsis thaliana
  peptide (1)..(273): Ceres Seq. ID no. 12580335
  misc_feature (25)..(104): Pfam Name: Pfam Description:  START domain
  misc_feature (1)..(273): NCBI GI NO: 18414239 NR Description: expressed protein; protein id: At4g14500
  misc_feature (1)..(273): NCBI GI NO: 7485064 NR Description: hypothetical protein - Arabidopsis thaliana
  misc_feature (1)..(273): NCBI GI NO: 18403635 NR Description: expressed protein; protein id: At3g23080
  misc_feature (1)..(273): NCBI GI NO: 15810257 NR Description: unknown protein [Arabidopsis thaliana]
  misc_feature (1)..(269): NCBI GI NO: 34393225 NR Description: putative membrane related protein CP5
  misc_feature (1)..(272): NCBI GI NO: 22135902 NR Description: membrane related protein CP5, putative
  misc_feature (1)..(272): NCBI GI NO: 15217736 NR Description: membrane related protein CP5, putative
  misc_feature (1)..(271): NCBI GI NO: 38344869 NR Description: OSJNBa0020P07.12
  misc_feature (1)..(269): NCBI GI NO: 18033654 NR Description: putative nodule membrane protein [Medicago sativa]
  misc_feature (1)..(269): NCBI GI NO: 10178166 NR Description: membrane related protein-like
MMDKTTPNMSYQAWRHEPETGPVIYRSRTVFEDATPDIVRDFFWDDEFRPKWDFMLANFKTLEEDTQTGTMIVQWRKKFPFFCSDREYIIGRRIWESGKKYYCVTKGVPYPALPKRDKPRRVELYFSSWVIIAVESRKGDGQQTACEVSLVHYEDMGIPKDVAKLGVRHGMWGAVKKLNSGLRAYQSARKSDSSLSRIAQMARISTKLNMDSAESSSRDEDRSRAMEYARQRDHLRMDWKWVVVGGVALACGLHSGIIGKALLAGAGQRLARR

SEQ ID NO: 2933 - DNA, 1390 bp, Arabidopsis thaliana
  misc_feature (1)..(1390): Ceres Seq. ID no. 12338463
aaaaaaatcccaaaaagcttcgttcttttttagtcatcatcatcttcttcttttcttcttcttcggttgctaaatcggagatggcgactgctctggtttctcctcttacttcacaactcaaccatgaagctgtctgttccaagtttgtgttacccaaatcgccgttcatatcgggatctaagctcttttcatcgaacatgccttgctctactgttcctagacgcacaagaagatcacactgctttgcttctgctaaagatatgagctttgaccatatccctaaacaatttcgtggagacaatctcaaagacggagtgatgcagaacttcaagaacgtaccgcaatatttttacgggcttaattcagctcaaatggatatgttcatgacagaagatagccctgtccgtaggcaagcggaaaaagttacagaggaaagcatctcgtctagaaataactatttgaacaatggaggaatatggagtatatccggtatgaatgcagcagatgctagaagatatagcatgagtgtccagatgtacagaggtggaggtggcggcggaggatctgaaagaccaagaactgctcctccagatttgccttctttgctattggatgctcgcatatgctaccttggcatgccaatcgtacctgcagttactgagttactcgttgctcaatttatgtggttagactatgataacccaacaaagcccatctacctatatataaattcacccgggacccagaatgagaagatggaaactgttggatcagaaacagaggcttatgccatagccgatactatttcttattgcaaatcagatgtatacactatcaattgtggcatggcttttggtcaagcagcaatgcttctttctctcgggaaaaaaggttatcgtgccgtacaaccacattcatcaacaaaattatatctgccaaaagtaaacagatcgagtggagctgccatagacatgtggataaaggccaaggaacttgatgcaaataccgagtactacatcgagctgttagctaagggaacagggaaatccaaagagcagatcaacgaggacatcaagcgacctaaatatctccaagctcaagcagccattgactatggaattgcagacaagatagctgactcgcaggacagttctttcgagaaacgggattacgatgggacccttgcccagagagctatgagacctggaggaggcagtccagcagctccagccggactaagatgatcaattcccaccagaaagaaagaggttgaatcctaatttcctagtcactctggaatatgtagctcttacaatctataagcaaacacatgtggtagtaacatacaaaaaagtgttggcaaaaagggaaataacatcaaaagttatcc

SEQ ID NO: 2934 - protein, 413 aa, Arabidopsis thaliana
  peptide (1)..(413): Ceres Seq. ID no. 12338464
  misc_feature (186)..(381): Pfam Name: Pfam Description:  Clp protease
  misc_feature (27)..(413): NCBI GI NO: 18402863 NR Description: ATP-dependent Clp protease proteolytic subunit
  misc_feature (195)..(390): NCBI GI NO: 13812146 NR Description: ATP-dependent Clp protease proteolytic subunit
  misc_feature (192)..(381): NCBI GI NO: 22299302 NR Description: ATP-dependent Clp protease proteolytic subunit 3
  misc_feature (190)..(377): NCBI GI NO: 18390982 NR Description: ATP-dependent Clp protease proteolytic subunit
  misc_feature (186)..(381): NCBI GI NO: 33240836 NR Description: Protease subunit of ATP-dependent Clp protease
  misc_feature (187)..(382): NCBI GI NO: 17231850 NR Description: ATP-dependent Clp protease proteolytic subunit
  misc_feature (186)..(381): NCBI GI NO: 33861869 NR Description: Clp protease proteolytic subunit
  misc_feature (187)..(382): NCBI GI NO: 23126723 NR Description: hypothetical protein [Nostoc punctiforme]
  misc_feature (186)..(381): NCBI GI NO: 33862588 NR Description: Clp protease proteolytic subunit
  misc_feature (186)..(381): NCBI GI NO: 33866182 NR Description: ATP-dependent Clp protease proteolytic subunit 4
KNPKKLRSFLVIIIFFFSSSSVAKSEMATALVSPLTSQLNHEAVCSKFVLPKSPFISGSKLFSSNMPCSTVPRRTRRSHCFASAKDMSFDHIPKQFRGDNLKDGVMQNFKNVPQYFYGLNSAQMDMFMTEDSPVRRQAEKVTEESISSRNNYLNNGGIWSISGMNAADARRYSMSVQMYRGGGGGGGSERPRTAPPDLPSLLLDARICYLGMPIVPAVTELLVAQFMWLDYDNPTKPIYLYINSPGTQNEKMETVGSETEAYAIADTISYCKSDVYTINCGMAFGQAAMLLSLGKKGYRAVQPHSSTKLYLPKVNRSSGAAIDMWIKAKELDANTEYYIELLAKGTGKSKEQINEDIKRPKYLQAQAAIDYGIADKIADSQDSSFEKRDYDGTLAQRAMRPGGGSPAAPAGLR

SEQ ID NO: 2935 - protein, 387 aa, Arabidopsis thaliana
  peptide (1)..(387): Ceres Seq. ID no. 12338466
  misc_feature (160)..(355): Pfam Name: Pfam Description:  Clp protease
  misc_feature (1)..(387): NCBI GI NO: 18402863 NR Description: ATP-dependent Clp protease proteolytic subunit
  misc_feature (169)..(364): NCBI GI NO: 13812146 NR Description: ATP-dependent Clp protease proteolytic subunit
  misc_feature (166)..(355): NCBI GI NO: 22299302 NR Description: ATP-dependent Clp protease proteolytic subunit 3
  misc_feature (164)..(351): NCBI GI NO: 18390982 NR Description: ATP-dependent Clp protease proteolytic subunit
  misc_feature (160)..(355): NCBI GI NO: 33240836 NR Description: Protease subunit of ATP-dependent Clp protease
  misc_feature (161)..(356): NCBI GI NO: 17231850 NR Description: ATP-dependent Clp protease proteolytic subunit
  misc_feature (160)..(355): NCBI GI NO: 33861869 NR Description: Clp protease proteolytic subunit
  misc_feature (161)..(356): NCBI GI NO: 23126723 NR Description: hypothetical protein [Nostoc punctiforme]
  misc_feature (160)..(355): NCBI GI NO: 33862588 NR Description: Clp protease proteolytic subunit
  misc_feature (160)..(355): NCBI GI NO: 33866182 NR Description: ATP-dependent Clp protease proteolytic subunit 4
MATALVSPLTSQLNHEAVCSKFVLPKSPFISGSKLFSSNMPCSTVPRRTRRSHCFASAKDMSFDHIPKQFRGDNLKDGVMQNFKNVPQYFYGLNSAQMDMFMTEDSPVRRQAEKVTEESISSRNNYLNNGGIWSISGMNAADARRYSMSVQMYRGGGGGGGSERPRTAPPDLPSLLLDARICYLGMPIVPAVTELLVAQFMWLDYDNPTKPIYLYINSPGTQNEKMETVGSETEAYAIADTISYCKSDVYTINCGMAFGQAAMLLSLGKKGYRAVQPHSSTKLYLPKVNRSSGAAIDMWIKAKELDANTEYYIELLAKGTGKSKEQINEDIKRPKYLQAQAAIDYGIADKIADSQDSSFEKRDYDGTLAQRAMRPGGGSPAAPAGLR

SEQ ID NO: 2936 - protein, 348 aa, Arabidopsis thaliana
  peptide (1)..(348): Ceres Seq. ID no. 12338467
  misc_feature (121)..(316): Pfam Name: Pfam Description:  Clp protease
  misc_feature (1)..(348): NCBI GI NO: 18402863 NR Description: ATP-dependent Clp protease proteolytic subunit
  misc_feature (130)..(325): NCBI GI NO: 13812146 NR Description: ATP-dependent Clp protease proteolytic subunit
  misc_feature (127)..(316): NCBI GI NO: 22299302 NR Description: ATP-dependent Clp protease proteolytic subunit 3
  misc_feature (125)..(312): NCBI GI NO: 18390982 NR Description: ATP-dependent Clp protease proteolytic subunit
  misc_feature (121)..(316): NCBI GI NO: 33240836 NR Description: Protease subunit of ATP-dependent Clp protease
  misc_feature (122)..(317): NCBI GI NO: 17231850 NR Description: ATP-dependent Clp protease proteolytic subunit
  misc_feature (121)..(316): NCBI GI NO: 33861869 NR Description: Clp protease proteolytic subunit
  misc_feature (122)..(317): NCBI GI NO: 23126723 NR Description: hypothetical protein [Nostoc punctiforme]
  misc_feature (121)..(316): NCBI GI NO: 33862588 NR Description: Clp protease proteolytic subunit
  misc_feature (121)..(316): NCBI GI NO: 33866182 NR Description: ATP-dependent Clp protease proteolytic subunit 4
MPCSTVPRRTRRSHCFASAKDMSFDHIPKQFRGDNLKDGVMQNFKNVPQYFYGLNSAQMDMFMTEDSPVRRQAEKVTEESISSRNNYLNNGGIWSISGMNAADARRYSMSVQMYRGGGGGGGSERPRTAPPDLPSLLLDARICYLGMPIVPAVTELLVAQFMWLDYDNPTKPIYLYINSPGTQNEKMETVGSETEAYAIADTISYCKSDVYTINCGMAFGQAAMLLSLGKKGYRAVQPHSSTKLYLPKVNRSSGAAIDMWIKAKELDANTEYYIELLAKGTGKSKEQINEDIKRPKYLQAQAAIDYGIADKIADSQDSSFEKRDYDGTLAQRAMRPGGGSPAAPAGLR

SEQ ID NO: 2937 - DNA, 975 bp, Arabidopsis thaliana
  misc_feature (1)..(975): Ceres Seq. ID no. 13504902
gagatcccatttcttttgttggcttacttctctcgaatttacgcaggaagatcattagcagagaattctcatctgattcagtccatggctgccacggctcttttccgatcgattcgccgacgcgacgtcgtctccgcgcctctttccgtttacaaatcccttgctggtaatgctcaaccttcctggggtagttcatacattggtcagaactatgcaagtttctccagagctttcgggtcaaaacctgttgtgaatgacattcttggtactggtttgggcactaacaatgccattagagaggagagagagaagtcaaaatctactgaagctgcaattgttggtgctcaattgactcgatctttccgtgctcttgatgtgggaacatcgaaacgattgttttctacaatctcaggggatataaagacaacacaggaggaaccaaaaatcaaaagctttcgccctttatctcctcacctttctgtttaccagcctcagatgaactccatgctatcgattttcaacagaatctcaggggtttacttgaccggtgtcactttcgctggctaccttctctacctgaagatgggtatgatctgcctcacctacccgagtttctaccaagtcctttaccatacacaacagcaacttccagtcatcacctcggttactgcattagccgctatttatcatactatcaagagtactcactcactcttgacccattaaaaacctttaccaaagctctttcgatgaagccgccaaagtctccagtaagagtttctttgagatgattaataaggagacaagaaaacatttgttaaactctgtcttgaaaaggtaaagatttagcacctgtttctttggattcgaggcttttttgggggtatgtttgttgcttttctttgttctcagaccttttttgaatgatgtaataaatgtttaccaaagttctgttgctacgttactctttttgtt

SEQ ID NO: 2938 - protein, 241 aa, Arabidopsis thaliana
  peptide (1)..(241): Ceres Seq. ID no. 13504903
  misc_feature (1)..(241): NCBI GI NO: 15236709 NR Description: expressed protein [Arabidopsis thaliana]
  misc_feature (2)..(241): NCBI GI NO: 11022654 NR Description: gene_id:MTH16
  misc_feature (29)..(241): NCBI GI NO: 15242460 NR Description: expressed protein [Arabidopsis thaliana]
  misc_feature (29)..(241): NCBI GI NO: 21593777 NR Description: unknown [Arabidopsis thaliana]
  misc_feature (118)..(239): NCBI GI NO: 14861484 NR Description: succinate dehydrogenase subunit 3
  misc_feature (113)..(238): NCBI GI NO: 14861486 NR Description: succinate dehydrogenase subunit 3 [Glycine max]
  misc_feature (153)..(240): NCBI GI NO: 15004510 NR Description: succinate dehydrogenase subunit 3
  misc_feature (161)..(240): NCBI GI NO: 15004512 NR Description: succinate dehydrogenase subunit 3
  misc_feature (29)..(125): NCBI GI NO: 15242459 NR Description: heat shock protein mtHsc70-2 (Hsc70-5)
  misc_feature (161)..(240): NCBI GI NO: 15004516 NR Description: succinate dehydrogenase subunit 3
EIPFLLLAYFSRIYAGRSLAENSHLIQSMAATALFRSIRRRDVVSAPLSVYKSLAGNAQPSWGSSYIGQNYASFSRAFGSKPVVNDILGTGLGTNNAIREEREKSKSTEAAIVGAQLTRSFRALDVGTSKRLFSTISGDIKTTQEEPKIKSFRPLSPHLSVYQPQMNSMLSIFNRISGVYLTGVTFAGYLLYLKMGMICLTYPSFYQVLYHTQQQLPVITSVTALAAIYHTIKSTHSLLTH

SEQ ID NO: 2939 - protein, 213 aa, Arabidopsis thaliana
  peptide (1)..(213): Ceres Seq. ID no. 13504904
  misc_feature (1)..(213): NCBI GI NO: 15236709 NR Description: expressed protein [Arabidopsis thaliana]
  misc_feature (1)..(213): NCBI GI NO: 11022654 NR Description: gene_id:MTH16
  misc_feature (1)..(213): NCBI GI NO: 15242460 NR Description: expressed protein [Arabidopsis thaliana]
  misc_feature (1)..(213): NCBI GI NO: 21593777 NR Description: unknown [Arabidopsis thaliana]
  misc_feature (90)..(211): NCBI GI NO: 14861484 NR Description: succinate dehydrogenase subunit 3
  misc_feature (85)..(210): NCBI GI NO: 14861486 NR Description: succinate dehydrogenase subunit 3 [Glycine max]
  misc_feature (125)..(212): NCBI GI NO: 15004510 NR Description: succinate dehydrogenase subunit 3
  misc_feature (133)..(212): NCBI GI NO: 15004512 NR Description: succinate dehydrogenase subunit 3
  misc_feature (1)..(97): NCBI GI NO: 15242459 NR Description: heat shock protein mtHsc70-2 (Hsc70-5)
  misc_feature (133)..(212): NCBI GI NO: 15004516 NR Description: succinate dehydrogenase subunit 3
MAATALFRSIRRRDVVSAPLSVYKSLAGNAQPSWGSSYIGQNYASFSRAFGSKPVVNDILGTGLGTNNAIREEREKSKSTEAAIVGAQLTRSFRALDVGTSKRLFSTISGDIKTTQEEPKIKSFRPLSPHLSVYQPQMNSMLSIFNRISGVYLTGVTFAGYLLYLKMGMICLTYPSFYQVLYHTQQQLPVITSVTALAAIYHTIKSTHSLLTH

SEQ ID NO: 2940 - DNA, 1195 bp, Arabidopsis thaliana
  misc_feature (1)..(1195): Ceres Seq. ID no. 13487011
aaaaactttcgtcttctcaacgaaatctgcagttccttgctcctttctcagtccaaattctctgatttttgattttttcgattcaatgggtttcaccaaagatcagttgcttgatcgacttcaggaacttgagattgattattccaagtatgaacatccgcctgtactaaccgtcgaagaacaggccaagtatgttagcagtagtaagggtgcactgagtaagaatctcttcttgaaggacaagaaacatcggtattatattgtttcagcgatggtggatacgaaagttgacatgaaagttttatctcagagacttggtcttggaaaaggagggattagaatggctccagaagaagcacttggtgagcttttgcaggtatccctcggatgtgttaccccgtttgcagttgtaaatgaatcagcaagagacgtgtctctcttgttagaccaaaaattcaagaaccaaacgcgttgcatcttccacccattgtctaacgatgtctcagtctctctgaacacattgggtctggacaagtttctgaagtcgattgggagagatcccgtatacgttgaccttgaggctaacccggtagttggtaaagaccaggctccagatctagctgtttgtgttccgtctaattcagttattgttcccgagattcctaatcaaacatcttctacacaaattcctcttccaaaaagtgtgtcagcagaggtcaagcctgtggcttcagccaaaacgagcaagccagcttgtaaggtgaagagcgtcgctgaaaattcagctccatcagcttacaagaacccggagaaatttgtgcaggagattttggacaaaacttcggctctattattgtccgaggctaagggagagtgcgtggaggctttggcagaaacactaagaaaacgacttacctcagagttgacccacctctctattatgtacaagaactcagcgtacgcagaaggtttttatgctggtacacgccaccagccgaagcgattgtaagaggtttggtttacatgttgaaccggagatatttgggagagaaacattaccggttcagcaatatattttccttcgttggacagcaaattttagataagactgaaaatgattacatttacatgaaagctcgaaccatttattcacttattgttgctttgtttgttcaatcaaagataaaccttttct

SEQ ID NO: 2941 - protein, 335 aa, Arabidopsis thaliana
  peptide (1)..(335): Ceres Seq. ID no. 13487012
  misc_feature (42)..(192): Pfam Name: Pfam Description:  YbaK / prolyl-tRNA synthetases associated domain
  misc_feature (29)..(335): NCBI GI NO: 30693857 NR Description: expressed protein [Arabidopsis thaliana]
  misc_feature (166)..(335): NCBI GI NO: 25405166 NR Description: hypothetical protein T12C22.11
  misc_feature (114)..(334): NCBI GI NO: 7271117 NR Description: 25.7 kDa protein [Cicer arietinum]
  misc_feature (29)..(181): NCBI GI NO: 25405166 NR Description: hypothetical protein T12C22.11
  misc_feature (45)..(199): NCBI GI NO: 16124366 NR Description: DNA-binding protein, putative
  misc_feature (36)..(193): NCBI GI NO: 27676960 NR Description: similar to RIKEN cDNA 2010316F05
  misc_feature (35)..(193): NCBI GI NO: 21312706 NR Description: RIKEN cDNA 2010316F05 [Mus musculus]
  misc_feature (32)..(199): NCBI GI NO: 22968624 NR Description: hypothetical protein [Rhodospirillum rubrum]
  misc_feature (33)..(193): NCBI GI NO: 34783837 NR Description: Unknown (protein for MGC:64201) [Danio rerio]
  misc_feature (32)..(194): NCBI GI NO: 13473736 NR Description: hypothetical protein, putative DNA-binding protein
KTFVFSTKSAVPCSFLSPNSLIFDFFDSMGFTKDQLLDRLQELEIDYSKYEHPPVLTVEEQAKYVSSSKGALSKNLFLKDKKHRYYIVSAMVDTKVDMKVLSQRLGLGKGGIRMAPEEALGELLQVSLGCVTPFAVVNESARDVSLLLDQKFKNQTRCIFHPLSNDVSVSLNTLGLDKFLKSIGRDPVYVDLEANPVVGKDQAPDLAVCVPSNSVIVPEIPNQTSSTQIPLPKSVSAEVKPVASAKTSKPACKVKSVAENSAPSAYKNPEKFVQEILDKTSALLLSEAKGECVEALAETLRKRLTSELTHLSIMYKNSAYAEGFYAGTRHQPKRL

SEQ ID NO: 2942 - protein, 307 aa, Arabidopsis thaliana
  peptide (1)..(307): Ceres Seq. ID no. 13487013
  misc_feature (14)..(164): Pfam Name: Pfam Description:  YbaK / prolyl-tRNA synthetases associated domain
  misc_feature (1)..(307): NCBI GI NO: 30693857 NR Description: expressed protein [Arabidopsis thaliana]
  misc_feature (138)..(307): NCBI GI NO: 25405166 NR Description: hypothetical protein T12C22.11
  misc_feature (86)..(306): NCBI GI NO: 7271117 NR Description: 25.7 kDa protein [Cicer arietinum]
  misc_feature (1)..(153): NCBI GI NO: 25405166 NR Description: hypothetical protein T12C22.11
  misc_feature (17)..(171): NCBI GI NO: 16124366 NR Description: DNA-binding protein, putative
  misc_feature (8)..(165): NCBI GI NO: 27676960 NR Description: similar to RIKEN cDNA 2010316F05
  misc_feature (7)..(165): NCBI GI NO: 21312706 NR Description: RIKEN cDNA 2010316F05 [Mus musculus]
  misc_feature (4)..(171): NCBI GI NO: 22968624 NR Description: hypothetical protein [Rhodospirillum rubrum]
  misc_feature (5)..(165): NCBI GI NO: 34783837 NR Description: Unknown (protein for MGC:64201) [Danio rerio]
  misc_feature (4)..(166): NCBI GI NO: 13473736 NR Description: hypothetical protein, putative DNA-binding protein
MGFTKDQLLDRLQELEIDYSKYEHPPVLTVEEQAKYVSSSKGALSKNLFLKDKKHRYYIVSAMVDTKVDMKVLSQRLGLGKGGIRMAPEEALGELLQVSLGCVTPFAVVNESARDVSLLLDQKFKNQTRCIFHPLSNDVSVSLNTLGLDKFLKSIGRDPVYVDLEANPVVGKDQAPDLAVCVPSNSVIVPEIPNQTSSTQIPLPKSVSAEVKPVASAKTSKPACKVKSVAENSAPSAYKNPEKFVQEILDKTSALLLSEAKGECVEALAETLRKRLTSELTHLSIMYKNSAYAEGFYAGTRHQPKRL

SEQ ID NO: 2943 - protein, 245 aa, Arabidopsis thaliana
  peptide (1)..(245): Ceres Seq. ID no. 13487014
  misc_feature (1)..(102): Pfam Name: Pfam Description:  YbaK / prolyl-tRNA synthetases associated domain
  misc_feature (1)..(245): NCBI GI NO: 30693857 NR Description: expressed protein [Arabidopsis thaliana]
  misc_feature (76)..(245): NCBI GI NO: 25405166 NR Description: hypothetical protein T12C22.11
  misc_feature (24)..(244): NCBI GI NO: 7271117 NR Description: 25.7 kDa protein [Cicer arietinum]
  misc_feature (1)..(91): NCBI GI NO: 25405166 NR Description: hypothetical protein T12C22.11
  misc_feature (1)..(109): NCBI GI NO: 16124366 NR Description: DNA-binding protein, putative
  misc_feature (1)..(103): NCBI GI NO: 27676960 NR Description: similar to RIKEN cDNA 2010316F05
  misc_feature (1)..(103): NCBI GI NO: 21312706 NR Description: RIKEN cDNA 2010316F05 [Mus musculus]
  misc_feature (1)..(109): NCBI GI NO: 22968624 NR Description: hypothetical protein [Rhodospirillum rubrum]
  misc_feature (1)..(103): NCBI GI NO: 34783837 NR Description: Unknown (protein for MGC:64201) [Danio rerio]
  misc_feature (1)..(104): NCBI GI NO: 13473736 NR Description: hypothetical protein, putative DNA-binding protein
MVDTKVDMKVLSQRLGLGKGGIRMAPEEALGELLQVSLGCVTPFAVVNESARDVSLLLDQKFKNQTRCIFHPLSNDVSVSLNTLGLDKFLKSIGRDPVYVDLEANPVVGKDQAPDLAVCVPSNSVIVPEIPNQTSSTQIPLPKSVSAEVKPVASAKTSKPACKVKSVAENSAPSAYKNPEKFVQEILDKTSALLLSEAKGECVEALAETLRKRLTSELTHLSIMYKNSAYAEGFYAGTRHQPKRL

SEQ ID NO: 2944 - DNA, 1257 bp, Arabidopsis thaliana
  misc_feature (1)..(1257): Ceres Seq. ID no. 12439537
acttgcaaccaattacaaaaaagagtctttaaacagaagactaaagaagatggttgcggttgaaagagttgagagtctagcaaaaagcggaatcatatcgattccaaaagaatatattcgtccaaaagaagagctcgagagcatcaacgatgttttcctagaagagaagaaagaagacggtcctcaagttcccacaatcgatctaaagaacatcgagtcagacgatgaaaagatccgtgagaattgtattgaggagctgaaaaaggcatctttggattggggagtgatgcatttgatcaaccatggaataccagctgatctaatggagcgtgtcaagaaagccggagaagagtttttcagtttgtctgtggaagagaaggagaagtatgcaaacgatcaagccactggaaagattcaaggctatggaagtaaattggctaacaacgcgagtggacaattggaatgggaagattacttctttcatcttgcgtatcctgaagagaagagagatctatcaatttggcctaagacaccaagtgattacatagaagcaacgagtgagtacgcgaagtgtcttcgtttgctagcgactaaagtcttcaaggctctctctgtcggtctaggtttagagcctgaccgtctagagaaagaagttggtggtttagaagagcttcttctacaaatgaagataaattactatccaaaatgtcctcagcctgagctagcactcggtgtggaagctcacaccgatgtaagcgctttaactttcattctacacaacatggttccgggtttgcagcttttctacgagggcaaatgggtcactgcaaaatgtgttcctgattcgattgtgatgcacattggggatactttggagattcttagtaatgggaagtataagagtatacttcatcgtgggttggtgaataaggagaaggttaggatttcttgggctgtgttttgtgaacccccaaaggataagattgttcttaagccgttgccggagatggtgagtgttgagtctccggctaagtttcctccacggacttttgctcaacatattgagcataagttgtttgggaaggaacaagaggaattggtatccgagaaaaatgattaagtttctgtgtttactcttatttttgaaactctatgtgcgagtttcttttataatgtgtttgtgtctttctcatgaatttgatgtgtttgtgccttttatagtgaatattgcggagcttaacaagcaaactttaattt

SEQ ID NO: 2945 - protein, 372 aa, Arabidopsis thaliana
  peptide (1)..(372): Ceres Seq. ID no. 12439538
  misc_feature (224)..(323): Pfam Name: II Pfam Description: 2OG-Fe
  misc_feature (17)..(372): NCBI GI NO: 15235853 NR Description: putative leucoanthocyanidin dioxygenase
  misc_feature (18)..(372): NCBI GI NO: 20149854 NR Description: Chain A
  misc_feature (17)..(372): NCBI GI NO: 29423729 NR Description: anthocyanidin synthase [Brassica oleracea]
  misc_feature (17)..(370): NCBI GI NO: 7433190 NR Description: leucoanthocyanidin dioxygenase (EC 1
  misc_feature (22)..(367): NCBI GI NO: 1730107 NR Description: LEUCOANTHOCYANIDIN DIOXYGENASE
  misc_feature (22)..(367): NCBI GI NO: 21038958 NR Description: anthocyanidin synthase [Malus x domestica]
  misc_feature (22)..(369): NCBI GI NO: 22266677 NR Description: leucoanthocyanidin dioxgenase
  misc_feature (18)..(357): NCBI GI NO: 7433227 NR Description: anthocyanidin synthase (EC 1
  misc_feature (22)..(369): NCBI GI NO: 1730108 NR Description: LEUCOANTHOCYANIDIN DIOXYGENASE
  misc_feature (22)..(365): NCBI GI NO: 16754897 NR Description: anthocyanidin synthase [Ipomoea nil]
LATNYKKESLNRRLKKMVAVERVESLAKSGIISIPKEYIRPKEELESINDVFLEEKKEDGPQVPTIDLKNIESDDEKIRENCIEELKKASLDWGVMHLINHGIPADLMERVKKAGEEFFSLSVEEKEKYANDQATGKIQGYGSKLANNASGQLEWEDYFFHLAYPEEKRDLSIWPKTPSDYIEATSEYAKCLRLLATKVFKALSVGLGLEPDRLEKEVGGLEELLLQMKINYYPKCPQPELALGVEAHTDVSALTFILHNMVPGLQLFYEGKWVTAKCVPDSIVMHIGDTLEILSNGKYKSILHRGLVNKEKVRISWAVFCEPPKDKIVLKPLPEMVSVESPAKFPPRTFAQHIEHKLFGKEQEELVSEKND

SEQ ID NO: 2946 - protein, 356 aa, Arabidopsis thaliana
  peptide (1)..(356): Ceres Seq. ID no. 12439539
  misc_feature (208)..(307): Pfam Name: II Pfam Description: 2OG-Fe
  misc_feature (1)..(356): NCBI GI NO: 15235853 NR Description: putative leucoanthocyanidin dioxygenase
  misc_feature (2)..(356): NCBI GI NO: 20149854 NR Description: Chain A
  misc_feature (1)..(356): NCBI GI NO: 29423729 NR Description: anthocyanidin synthase [Brassica oleracea]
  misc_feature (1)..(354): NCBI GI NO: 7433190 NR Description: leucoanthocyanidin dioxygenase (EC 1
  misc_feature (6)..(351): NCBI GI NO: 1730107 NR Description: LEUCOANTHOCYANIDIN DIOXYGENASE
  misc_feature (6)..(351): NCBI GI NO: 21038958 NR Description: anthocyanidin synthase [Malus x domestica]
  misc_feature (6)..(353): NCBI GI NO: 22266677 NR Description: leucoanthocyanidin dioxgenase
  misc_feature (2)..(341): NCBI GI NO: 7433227 NR Description: anthocyanidin synthase (EC 1
  misc_feature (6)..(353): NCBI GI NO: 1730108 NR Description: LEUCOANTHOCYANIDIN DIOXYGENASE
  misc_feature (6)..(349): NCBI GI NO: 16754897 NR Description: anthocyanidin synthase [Ipomoea nil]
MVAVERVESLAKSGIISIPKEYIRPKEELESINDVFLEEKKEDGPQVPTIDLKNIESDDEKIRENCIEELKKASLDWGVMHLINHGIPADLMERVKKAGEEFFSLSVEEKEKYANDQATGKIQGYGSKLANNASGQLEWEDYFFHLAYPEEKRDLSIWPKTPSDYIEATSEYAKCLRLLATKVFKALSVGLGLEPDRLEKEVGGLEELLLQMKINYYPKCPQPELALGVEAHTDVSALTFILHNMVPGLQLFYEGKWVTAKCVPDSIVMHIGDTLEILSNGKYKSILHRGLVNKEKVRISWAVFCEPPKDKIVLKPLPEMVSVESPAKFPPRTFAQHIEHKLFGKEQEELVSEKND

SEQ ID NO: 2947 - protein, 277 aa, Arabidopsis thaliana
  peptide (1)..(277): Ceres Seq. ID no. 12439540
  misc_feature (129)..(228): Pfam Name: II Pfam Description: 2OG-Fe
  misc_feature (1)..(277): NCBI GI NO: 15235853 NR Description: putative leucoanthocyanidin dioxygenase
  misc_feature (1)..(277): NCBI GI NO: 20149854 NR Description: Chain A
  misc_feature (1)..(277): NCBI GI NO: 29423729 NR Description: anthocyanidin synthase [Brassica oleracea]
  misc_feature (1)..(275): NCBI GI NO: 7433190 NR Description: leucoanthocyanidin dioxygenase (EC 1
  misc_feature (1)..(272): NCBI GI NO: 1730107 NR Description: LEUCOANTHOCYANIDIN DIOXYGENASE
  misc_feature (1)..(272): NCBI GI NO: 21038958 NR Description: anthocyanidin synthase [Malus x domestica]
  misc_feature (1)..(274): NCBI GI NO: 22266677 NR Description: leucoanthocyanidin dioxgenase
  misc_feature (1)..(262): NCBI GI NO: 7433227 NR Description: anthocyanidin synthase (EC 1
  misc_feature (1)..(274): NCBI GI NO: 1730108 NR Description: LEUCOANTHOCYANIDIN DIOXYGENASE
  misc_feature (1)..(270): NCBI GI NO: 16754897 NR Description: anthocyanidin synthase [Ipomoea nil]
MHLINHGIPADLMERVKKAGEEFFSLSVEEKEKYANDQATGKIQGYGSKLANNASGQLEWEDYFFHLAYPEEKRDLSIWPKTPSDYIEATSEYAKCLRLLATKVFKALSVGLGLEPDRLEKEVGGLEELLLQMKINYYPKCPQPELALGVEAHTDVSALTFILHNMVPGLQLFYEGKWVTAKCVPDSIVMHIGDTLEILSNGKYKSILHRGLVNKEKVRISWAVFCEPPKDKIVLKPLPEMVSVESPAKFPPRTFAQHIEHKLFGKEQEELVSEKND

SEQ ID NO: 2948 - DNA, 1567 bp, Arabidopsis thaliana
  misc_feature (1)..(1567): Ceres Seq. ID no. 13492944
taaaacaacaaagcaaagcgttgaagagagaagaagaagcaaagatataacccccaaaagtatcaattagtttccattttcgccgctaagattctgttttcgaacatttacaccctcaagaatcgccgccatgtgtggaggagctataatatccgatttcattccaccgccgaggtctcgccgtgttactagcgagtttatttggccggatctgaagaagaatttgaaaggatcgaagaaaagctcgaagaatcgttcgaatttcttcgattttgacgctgagttcgaagctgatttccaaggtttcaaagatgattcgtctatcgattgcgatgatgatttcgacgtcggtgatgttttcgccgatgtgaaaccattcgttttcacttcgactccaaaacccgccgtctccgccgctgcggaaggttcagtttttggtaagaaagttactggcttggatggggacgctgagaaatctgcaaataggaagaggaagaatcagtaccgagggattaggcaacgtccttggggaaaatgggctgctgagatacgtgatccaagggaaggtgctagaatctggcttggaacgttcaagacagctgaggaagctgctagagcttacgatgctgcagcgcggagaatccgtggatctaaagctaaggtgaatttccctgaagaaaacatgaaggctaattctcagaaacgctctgtgaaggctaatcttcagaaaccagtggctaaacctaaccctaacccaagtccagctttggttcagaactcgaacatctcctttgaaaatatgtgtttcatggaggagaaacaccaagtgagcaacaacaacaacaaccagtttgggatgacaaactccgttgatgctggatgtaatgggtatcagtatttcagctctgaccagggtagtaattctttcgattgttcggagtttggttggagcgatcaagctccgataactcccgacatctcttctgcggttatcaacaacaacaactcagctctgttctttgaggaagccaatccagctaagaagctcaagtctatggatttcgagacaccttacaacaacactgaatgggacgcttcactggatttcctcaacgaagatgctgtaacgactcaggacaatggtgcaaaccctatggacctatggagtattgatgaaattcattccatgattggaggagtcttctgaagagatccagtttcatgtaaataaggctgcatgtttgtgagtttcccgcatcgttcgtttatcaacctccaaaactttctaatgtctgttacttgcatcttcttctgctgtctctgtctgtctctctcaggagttcctgtttgcattgcgagaagccatgagcctctatcttgagggtagttgtgatgaagttaagtagaggcttatttttaggggttgtggtagtttttgttttagtgaatcttttgaattcgtttgtgttttgtttttgttactttatgccccaaaactcctttaacatttgtcataatgtgtttgaacctctcatctgtttaatcaaataaatcttctttgtatgtt

SEQ ID NO: 2949 - protein, 358 aa, Arabidopsis thaliana
  peptide (1)..(358): Ceres Seq. ID no. 13492945
  misc_feature (122)..(186): Pfam Name: Pfam Description:  AP2 domain
  misc_feature (1)..(358): NCBI GI NO: 15220971 NR Description: AP2 domain protein RAP2.12 [Arabidopsis thaliana]
  misc_feature (1)..(358): NCBI GI NO: 21593779 NR Description: AP2 domain containing protein, putative
  misc_feature (42)..(358): NCBI GI NO: 2281649 NR Description: AP2 domain containing protein RAP2.12
  misc_feature (1)..(339): NCBI GI NO: 30683064 NR Description: AP2 domain protein RAP2.2 [Arabidopsis thaliana]
  misc_feature (1)..(339): NCBI GI NO: 30683059 NR Description: AP2 domain protein RAP2.2 [Arabidopsis thaliana]
  misc_feature (1)..(339): NCBI GI NO: 18400321 NR Description: AP2 domain protein RAP2.2 [Arabidopsis thaliana]
  misc_feature (1)..(325): NCBI GI NO: 21553709 NR Description: DNA-binding protein [Arabidopsis thaliana]
  misc_feature (1)..(308): NCBI GI NO: 30961941 NR Description: C-repeat/DRE-binding factor [Nicotiana tabacum]
  misc_feature (277)..(358): NCBI GI NO: 30961941 NR Description: C-repeat/DRE-binding factor [Nicotiana tabacum]
  misc_feature (1)..(318): NCBI GI NO: 38343926 NR Description: ethylene transcription factor [Fagus sylvatica]
MCGGAIISDFIPPPRSRRVTSEFIWPDLKKNLKGSKKSSKNRSNFFDFDAEFEADFQGFKDDSSIDCDDDFDVGDVFADVKPFVFTSTPKPAVSAAAEGSVFGKKVTGLDGDAEKSANRKRKNQYRGIRQRPWGKWAAEIRDPREGARIWLGTFKTAEEAARAYDAAARRIRGSKAKVNFPEENMKANSQKRSVKANLQKPVAKPNPNPSPALVQNSNISFENMCFMEEKHQVSNNNNNQFGMTNSVDAGCNGYQYFSSDQGSNSFDCSEFGWSDQAPITPDISSAVINNNNSALFFEEANPAKKLKSMDFETPYNNTEWDASLDFLNEDAVTTQDNGANPMDLWSIDEIHSMIGGVF

SEQ ID NO: 2950 - DNA, 1256 bp, Arabidopsis thaliana
  misc_feature (1)..(1256): Ceres Seq. ID no. 12348366
aaacaaaacacaggtttggtcggagaaggctttattaatccacttgtcctcctctcagactctacaaagtcaaagttgttcactttacctataaaaacgctttcttttcaatggcttcttcttcttgtttccttcgctcgattctcttctcttctcctactaaccttcgttcaaatcaccatctccccactttcttccccaagaatcatctcatttgctctcattccacttcttctcgcttcgaatcgctctcggtttcatcgatcggaactggatctaccaagaaatcatccgatactcggagaaaggtaaagagcatggctacgacaaatataggaaaggaggagaagaaaagagtcgagatttatgatctcgaagagaatttagcgattgatttggctaaattcacagcagatctctccgataagttttgtaaagagagaggcgctttcaccgtcgttgtctccggtggctctctcatcaaatcactccggaaattagtagaatctccttacgttgattctatagattgggcaaggtggcattttttctgggttgacgagagagttgttcccaagaatcacgatgatagcaactataaactcgcttatgatagttttctatccaaggtaccaattccgcctggaaatgtatatgcaatcaacgaagccctctccgctgaggctgcagcggatgattacgagacctgcctcaaacatttggtcaacaccaacattctccgtgtatctgaatcaactggctttcccaaatttgatctcatgcttctaggtatgggacctgatggtcatgtggcatcattattccctgggcatggtctctgcaacgagagcaagaaatgggtagtttcaatctctgactctccaaaaccaccgtctgagagaatcaccttcacgttcccggtcatcaactcatctgcacatgtagctctagttgtttgcggttctgggaaagctgaagctgtggaggcagctttaaagaagactgggaatgtaccacctgctggttctgtttctgctgaagacgagttggtttggttcctggacaaaccagcatcttccaagctctaaaaacaggtggtatgcttcccattccagtgaacttaccaatgtgactagtccggtttagtttttggattttgactctttggttctctccatttatgttgtgggaagagactgttgtgataaaagcgtgtactttacatggaaataatgaactaatcaatggtttctctg

SEQ ID NO: 2951 - protein, 325 aa, Arabidopsis thaliana
  peptide (1)..(325): Ceres Seq. ID no. 12348367
  misc_feature (96)..(324): Pfam Name: Pfam Description:  Glucosamine-6-phosphate isomerases/ 6-phosphogluconolactonase
  misc_feature (1)..(325): NCBI GI NO: 18420789 NR Description: 6-phosphogluconolactonase-like protein
  misc_feature (1)..(325): NCBI GI NO: 21554291 NR Description: 6-phosphogluconolactonase-like protein
  misc_feature (70)..(325): NCBI GI NO: 10177901 NR Description: 6-phosphogluconolactonase-like protein
  misc_feature (80)..(325): NCBI GI NO: 28140256 NR Description: putative 6-phosphogluconolactonase
  misc_feature (80)..(325): NCBI GI NO: 15229127 NR Description: 6-phosphogluconolactonase - like protein
  misc_feature (80)..(325): NCBI GI NO: 21536675 NR Description: 6-phosphogluconolactonase-like protein
  misc_feature (70)..(325): NCBI GI NO: 15238523 NR Description: 6-phosphogluconolactonase-like protein
  misc_feature (80)..(325): NCBI GI NO: 21537412 NR Description: 6-phosphogluconolactonase-like protein
  misc_feature (80)..(325): NCBI GI NO: 15238526 NR Description: 6-phosphogluconolactonase-like protein
  misc_feature (81)..(325): NCBI GI NO: 14009294 NR Description: putative 6-phosphogluconolactonase
MASSSCFLRSILFSSPTNLRSNHHLPTFFPKNHLICSHSTSSRFESLSVSSIGTGSTKKSSDTRRKVKSMATTNIGKEEKKRVEIYDLEENLAIDLAKFTADLSDKFCKERGAFTVVVSGGSLIKSLRKLVESPYVDSIDWARWHFFWVDERVVPKNHDDSNYKLAYDSFLSKVPIPPGNVYAINEALSAEAAADDYETCLKHLVNTNILRVSESTGFPKFDLMLLGMGPDGHVASLFPGHGLCNESKKWVVSISDSPKPPSERITFTFPVINSSAHVALVVCGSGKAEAVEAALKKTGNVPPAGSVSAEDELVWFLDKPASSKL

SEQ ID NO: 2952 - protein, 256 aa, Arabidopsis thaliana
  peptide (1)..(256): Ceres Seq. ID no. 12348368
  misc_feature (27)..(255): Pfam Name: Pfam Description:  Glucosamine-6-phosphate isomerases/ 6-phosphogluconolactonase
  misc_feature (1)..(256): NCBI GI NO: 18420789 NR Description: 6-phosphogluconolactonase-like protein
  misc_feature (1)..(256): NCBI GI NO: 21554291 NR Description: 6-phosphogluconolactonase-like protein
  misc_feature (1)..(256): NCBI GI NO: 10177901 NR Description: 6-phosphogluconolactonase-like protein
  misc_feature (11)..(256): NCBI GI NO: 28140256 NR Description: putative 6-phosphogluconolactonase
  misc_feature (11)..(256): NCBI GI NO: 15229127 NR Description: 6-phosphogluconolactonase - like protein
  misc_feature (11)..(256): NCBI GI NO: 21536675 NR Description: 6-phosphogluconolactonase-like protein
  misc_feature (1)..(256): NCBI GI NO: 15238523 NR Description: 6-phosphogluconolactonase-like protein
  misc_feature (11)..(256): NCBI GI NO: 21537412 NR Description: 6-phosphogluconolactonase-like protein
  misc_feature (11)..(256): NCBI GI NO: 15238526 NR Description: 6-phosphogluconolactonase-like protein
  misc_feature (12)..(256): NCBI GI NO: 14009294 NR Description: putative 6-phosphogluconolactonase
MATTNIGKEEKKRVEIYDLEENLAIDLAKFTADLSDKFCKERGAFTVVVSGGSLIKSLRKLVESPYVDSIDWARWHFFWVDERVVPKNHDDSNYKLAYDSFLSKVPIPPGNVYAINEALSAEAAADDYETCLKHLVNTNILRVSESTGFPKFDLMLLGMGPDGHVASLFPGHGLCNESKKWVVSISDSPKPPSERITFTFPVINSSAHVALVVCGSGKAEAVEAALKKTGNVPPAGSVSAEDELVWFLDKPASSKL

SEQ ID NO: 2953 - DNA, 1138 bp, Arabidopsis thaliana
  misc_feature (1)..(1138): Ceres Seq. ID no. 12337896
aaaaaacacattcatctatccaacaaaaaaaaaaaaaaaaaaggagaaatggaaggaatctatcatagaatggtgagtgtcaatggcataactatgcacattgccgagaaaggtcccaaagaaggacctgtggtgcttctcctccatggattccctgatctctggtacacgtggcgtcaccagattagtgggttatcatctctaggttaccgcgctgtagctccagacctccgaggctacggagactctgattcgccagagtctttctccgagtacacgtgtcttaacgtcgttggggacctcgtagctcttctggacagtgttgctggaaatcaagagaaggtgtttctggtcggtcatgattggggagccattatcggatggtttctctgtttgtttcgacctgaaaagattaacggctttgtgtgtttgagtgtgccgtatagatcaagaaaccctaaagtcaagcccgttcaagggttcaaggctgtatttggagatgattactacatttgtagatttcaggaaccggggaagattgaaggagagattgcaagtgcagatccaagaatatttctgaggaacctcttcacagggaggacactcggtccgccgattttacctaaggataatccctttggggaaaaacctaaccctaatagcgaaaacattgaattgcctgaatggttttctaagaaagatctcgatttctatgtctccaaattcgagaaggcaggatttaccggtggattgaactactacagagccatggatctgaattgggagctcactgcaccatggaccggagctaagattcaagttccagtgaagttcatgacaggtgacttcgacatggtttacaccacaccagggatgaaagagtacattcacggtggtggatttgctgcagatgttccaactcttcaagagatagtggtgattgaagatgctggtcacttcgttaaccaagagaaacctcaagaggtcactgctcacatcaatgacttcttcaccaagcttcgggacaacaacaaaagcttttagagttctcgtttggttctattatgttggctctcaaaacaagttggttcttgcatgtgttgtttcgacaagattttgaataagacttggcattatg

SEQ ID NO: 2954 - protein, 347 aa, Arabidopsis thaliana
  peptide (1)..(347): Ceres Seq. ID no. 12337897
  misc_feature (70)..(335): Pfam Name: Pfam Description:  alpha/beta hydrolase fold
  misc_feature (17)..(347): NCBI GI NO: 15230018 NR Description: putative epoxide hydrolase; protein id: At3g05600
  misc_feature (16)..(339): NCBI GI NO: 7488671 NR Description: epoxide hydrolase homolog - soybean
  misc_feature (16)..(339): NCBI GI NO: 2764806 NR Description: epoxide hydrolase [Glycine max]
  misc_feature (17)..(341): NCBI GI NO: 18411917 NR Description: coded for by A
  misc_feature (22)..(339): NCBI GI NO: 15225781 NR Description: epoxide hydrolase (ATsEH); protein id: At2g26740
  misc_feature (17)..(339): NCBI GI NO: 7489254 NR Description: probable epoxide hydrolase (EC 3
  misc_feature (22)..(339): NCBI GI NO: 22208300 NR Description: soluble epoxide hydrolase [Brassica napus]
  misc_feature (17)..(339): NCBI GI NO: 407942 NR Description: epoxide hydrolase
  misc_feature (17)..(339): NCBI GI NO: 7489255 NR Description: probable epoxide hydrolase (EC 3
  misc_feature (17)..(339): NCBI GI NO: 27960680 NR Description: soluble epoxide hydrolase [Euphorbia lagascae]
KKHIHLSNKKKKKKGEMEGIYHRMVSVNGITMHIAEKGPKEGPVVLLLHGFPDLWYTWRHQISGLSSLGYRAVAPDLRGYGDSDSPESFSEYTCLNVVGDLVALLDSVAGNQEKVFLVGHDWGAIIGWFLCLFRPEKINGFVCLSVPYRSRNPKVKPVQGFKAVFGDDYYICRFQEPGKIEGEIASADPRIFLRNLFTGRTLGPPILPKDNPFGEKPNPNSENIELPEWFSKKDLDFYVSKFEKAGFTGGLNYYRAMDLNWELTAPWTGAKIQVPVKFMTGDFDMVYTTPGMKEYIHGGGFAADVPTLQEIVVIEDAGHFVNQEKPQEVTAHINDFFTKLRDNNKSF

SEQ ID NO: 2955 - protein, 331 aa, Arabidopsis thaliana
  peptide (1)..(331): Ceres Seq. ID no. 12337898
  misc_feature (54)..(319): Pfam Name: Pfam Description:  alpha/beta hydrolase fold
  misc_feature (1)..(331): NCBI GI NO: 15230018 NR Description: putative epoxide hydrolase; protein id: At3g05600
  misc_feature (1)..(323): NCBI GI NO: 7488671 NR Description: epoxide hydrolase homolog - soybean
  misc_feature (1)..(323): NCBI GI NO: 2764806 NR Description: epoxide hydrolase [Glycine max]
  misc_feature (1)..(325): NCBI GI NO: 18411917 NR Description: coded for by A
  misc_feature (6)..(323): NCBI GI NO: 15225781 NR Description: epoxide hydrolase (ATsEH); protein id: At2g26740
  misc_feature (1)..(323): NCBI GI NO: 7489254 NR Description: probable epoxide hydrolase (EC 3
  misc_feature (6)..(323): NCBI GI NO: 22208300 NR Description: soluble epoxide hydrolase [Brassica napus]
  misc_feature (1)..(323): NCBI GI NO: 407942 NR Description: epoxide hydrolase
  misc_feature (1)..(323): NCBI GI NO: 7489255 NR Description: probable epoxide hydrolase (EC 3
  misc_feature (1)..(323): NCBI GI NO: 27960680 NR Description: soluble epoxide hydrolase [Euphorbia lagascae]
MEGIYHRMVSVNGITMHIAEKGPKEGPVVLLLHGFPDLWYTWRHQISGLSSLGYRAVAPDLRGYGDSDSPESFSEYTCLNVVGDLVALLDSVAGNQEKVFLVGHDWGAIIGWFLCLFRPEKINGFVCLSVPYRSRNPKVKPVQGFKAVFGDDYYICRFQEPGKIEGEIASADPRIFLRNLFTGRTLGPPILPKDNPFGEKPNPNSENIELPEWFSKKDLDFYVSKFEKAGFTGGLNYYRAMDLNWELTAPWTGAKIQVPVKFMTGDFDMVYTTPGMKEYIHGGGFAADVPTLQEIVVIEDAGHFVNQEKPQEVTAHINDFFTKLRDNNKSF

SEQ ID NO: 2956 - protein, 324 aa, Arabidopsis thaliana; identical to SEQ ID NO: 762
  peptide (1)..(324): Ceres Seq. ID no. 12337899
  misc_feature (47)..(312): Pfam Name: Pfam Description:  alpha/beta hydrolase fold
  misc_feature (1)..(324): NCBI GI NO: 15230018 NR Description: putative epoxide hydrolase; protein id: At3g05600
  misc_feature (1)..(316): NCBI GI NO: 7488671 NR Description: epoxide hydrolase homolog - soybean
  misc_feature (1)..(316): NCBI GI NO: 2764806 NR Description: epoxide hydrolase [Glycine max]
  misc_feature (1)..(318): NCBI GI NO: 18411917 NR Description: coded for by A
  misc_feature (1)..(316): NCBI GI NO: 15225781 NR Description: epoxide hydrolase (ATsEH); protein id: At2g26740
  misc_feature (1)..(316): NCBI GI NO: 7489254 NR Description: probable epoxide hydrolase (EC 3
  misc_feature (1)..(316): NCBI GI NO: 22208300 NR Description: soluble epoxide hydrolase [Brassica napus]
  misc_feature (1)..(316): NCBI GI NO: 407942 NR Description: epoxide hydrolase
  misc_feature (1)..(316): NCBI GI NO: 7489255 NR Description: probable epoxide hydrolase (EC 3
  misc_feature (1)..(316): NCBI GI NO: 27960680 NR Description: soluble epoxide hydrolase [Euphorbia lagascae]

SEQ ID NO: 2957 - DNA, 1146 bp, Arabidopsis thaliana
  misc_feature (1)..(1146): Ceres Seq. ID no. 12336445
atttcaaaccacacattcaaactaactctgcaaaagaaaaaaaaactcagagcagaggagatcgagagagacaaagagagacaaagagagagagagagagagagagagagagagagagagagagatcttcaacaagcaatgtctatatccatggcgttattctctccgccgatctcttcctcacttcaaaaccctaatctcatccccaagatctcaacctctcttctctccaccaaacgtttctctctaatctccgtccctagagcttcctccgacaatggtacgacttcccccgtcgtgaaaattccgaaggcctgcgtctgtagctgtagaggaagttccggttaaatctccggcggaaagctcctccgcttctgaaaacggcgccgttggaggtgaagcgactgattcgagtactgagacggtaatcaaatatcaaaatgcgaagtgggttaatggaacttgggatctgaaacagttcgagaaagatggcaaaactgattgggattctgttatcgtttctgaggcaaagaggagaaaatggcttgaagataacccggaaacaacgagtaacgacgagcttgttgtcttcgatacttcgattattccatggtgggcatggatgaagagataccatctacctgaagctgaacttctcaatggtcgtgctgcgatgatagggttcttcatggcttactttgttgatagtcttaccggagtaggacttgttgatcaaatggggaatttcttctgcaaaacactcttgtttgtggctgtagctggagttctcttcatccgtaagaatgaagatttagacaaacttaaggatctgttcgatgagactacgttatatgacaaacaatggcaagctgcatggaaagagccagattcatcaacagtttcttcaaagaagtgaacaagttcttacaatctttcattttcctttttttgttatgcaataatctgtgaatcagtgaaagtttatctctactgaactactgatcttcagattttgtaatctttctgctttaaaaatctctatgaagtagtctcaaagataatgtatcgaaggtctttgacttgtaaagcagacctatttcgttttgacgcttgataatttaatcaataagagattttttttttaat

SEQ ID NO: 2958 - protein, 115 aa, Arabidopsis thaliana
  peptide (1)..(115): Ceres Seq. ID no. 12336446
  misc_feature (47)..(104): NCBI GI NO: 30695110 NR Description: Lil3 protein [Arabidopsis thaliana]
  misc_feature (51)..(104): NCBI GI NO: 8978078 NR Description: Lil3 protein [Arabidopsis thaliana]
  misc_feature (51)..(102): NCBI GI NO: 18414927 NR Description: Lil3 protein; protein id: At4g17600
  misc_feature (51)..(102): NCBI GI NO: 21555799 NR Description: Lil3 protein [Arabidopsis thaliana]
  misc_feature (51)..(102): NCBI GI NO: 7485188 NR Description: hypothetical protein - Arabidopsis thaliana
ISNHTFKLTLQKKKKLRAEEIERDKERQRERERERERERERDLQQAMSISMALFSPPISSSLQNPNLIPKISTSLLSTKRFSLISVPRASSDNGTTSPVVKIPKACVCSCRGSSG

SEQ ID NO: 2959 - protein, 97 aa, Arabidopsis thaliana
  peptide (1)..(97): Ceres Seq. ID no. 12336447
  misc_feature (1)..(97): NCBI GI NO: 8978078 NR Description: Lil3 protein [Arabidopsis thaliana]
  misc_feature (1)..(97): NCBI GI NO: 30695110 NR Description: Lil3 protein [Arabidopsis thaliana]
  misc_feature (1)..(97): NCBI GI NO: 21555799 NR Description: Lil3 protein [Arabidopsis thaliana]
  misc_feature (1)..(97): NCBI GI NO: 7485188 NR Description: hypothetical protein - Arabidopsis thaliana
  misc_feature (1)..(97): NCBI GI NO: 18414927 NR Description: Lil3 protein; protein id: At4g17600
MKRYHLPEAELLNGRAAMIGFFMAYFVDSLTGVGLVDQMGNFFCKTLLFVAVAGVLFIRKNEDLDKLKDLFDETTLYDKQWQAAWKEPDSSTVSSKK

SEQ ID NO: 2960 - protein, 80 aa, Arabidopsis thaliana
  peptide (1)..(80): Ceres Seq. ID no. 12336448
  misc_feature (1)..(80): NCBI GI NO: 8978078 NR Description: Lil3 protein [Arabidopsis thaliana]
  misc_feature (1)..(80): NCBI GI NO: 30695110 NR Description: Lil3 protein [Arabidopsis thaliana]
  misc_feature (1)..(80): NCBI GI NO: 21555799 NR Description: Lil3 protein [Arabidopsis thaliana]
  misc_feature (1)..(80): NCBI GI NO: 7485188 NR Description: hypothetical protein - Arabidopsis thaliana
  misc_feature (1)..(80): NCBI GI NO: 18414927 NR Description: Lil3 protein; protein id: At4g17600
MIGFFMAYFVDSLTGVGLVDQMGNFFCKTLLFVAVAGVLFIRKNEDLDKLKDLFDETTLYDKQWQAAWKEPDSSTVSSKK

SEQ ID NO: 2961 - protein, 69 aa, Arabidopsis thaliana
  peptide (1)..(69): Ceres Seq. ID no. 12336449
  misc_feature (1)..(58): NCBI GI NO: 30695110 NR Description: Lil3 protein [Arabidopsis thaliana]
  misc_feature (5)..(58): NCBI GI NO: 8978078 NR Description: Lil3 protein [Arabidopsis thaliana]
  misc_feature (5)..(56): NCBI GI NO: 18414927 NR Description: Lil3 protein; protein id: At4g17600
  misc_feature (5)..(56): NCBI GI NO: 21555799 NR Description: Lil3 protein [Arabidopsis thaliana]
  misc_feature (5)..(56): NCBI GI NO: 7485188 NR Description: hypothetical protein - Arabidopsis thaliana
MSISMALFSPPISSSLQNPNLIPKISTSLLSTKRFSLISVPRASSDNGTTSPVVKIPKACVCSCRGSSG

SEQ ID NO: 2962 - DNA, 1476 bp, Arabidopsis thaliana
  misc_feature (1)..(1476): Ceres Seq. ID no. 13487711
aaaaagttgcgaagctctctcattgagtaaactaacggctatattctctctgatattcaaaatttgctcgaagaaacgacgatggcagccgaaacgaaggttcaggtttcagatccagaggcagagtttcttaattcgaagcaggagactggatacgagtgggagcttttcaaggagaacgtccggccattgaagagaggtcgcaatgttggtattctcaaccacgctctcaaatctcactctgaccaccaattgagaaagaatctcatcgagaaacgcaggaatttgattgaagccattgatgagtatgaaggagatgaccctttatctccatggatagagtgtataaaatgggtacaagaggcttttccaccaggaggagaatgttcaggactgttagtgatatatgagcaatgtgttcgtaaattttggcactctgaacgttacaaggatgatcttcgttatcttaaagtctggttggaatatgcggagcattgcgctgatgcggaagtgatttacaagtttttggaggtcaatgagattggaaagacacatgctgtctactatatagcttatgctttgcacattgagtttaagaataaggtcaaaactgctaatgagatcttcaatcttggaatctctagggatgcaaagccagtggaaaagttgaatgacgcgtacaagaagtttatggtgagaacgatgagaaggtccaacacagctgatgaagaaccaaaggagaataatgacttaccgtcaagaagctttggcactttattgtccaggggagataataatgcaagaaggcaggcgttaggaagttctaacccacaagccaaaaagctaaagccaaatcaatcatccaagacaccttttgctatctacgcagatgcagtttcagacaccacatcagggaatcaaccagagtcagacaagtcaagaccagagtttggtagttggctcatgcttggaggcagagcagagaggaacaaagaaaacaattctttacctagaaaatgggcatcattcaaggttcctcagaaacccattgtgagaactgttgcagcagcatctgctttcacctttgaggtttttgtcgatgaagaagaatgtacagaagaggaagaagaaaagaagaagaatgatgaaactatctcatcatcatcaaacgttctgccccttaatggcggccgtgagataaaaaaagaaacagagctgctacgacagaaccctttaagacatttcccacccaacagcttcctacgatgatgatattggactttcttctctacacgatcttatggtttgagatttgagcttttgtctataaagctccttgtgtgtttttgcctatttggatttgtttttgtgatgtactgggatatactatcctactatgtaccatgatgtgcctttcatgttttgaaattaatgtgacttgtcttgtttcaatccttatatgatttgtttctcctg

SEQ ID NO: 2963 - protein, 395 aa, Arabidopsis thaliana
  peptide (1)..(395): Ceres Seq. ID no. 13487712
  misc_feature (1)..(395): NCBI GI NO: 21593781 NR Description: unknown [Arabidopsis thaliana]
  misc_feature (1)..(395): NCBI GI NO: 18403316 NR Description: expressed protein [Arabidopsis thaliana]
  misc_feature (1)..(110): NCBI GI NO: 25370767 NR Description: hypothetical protein At2g33560
  misc_feature (260)..(346): NCBI GI NO: 25370767 NR Description: hypothetical protein At2g33560
  misc_feature (136)..(261): NCBI GI NO: 25370767 NR Description: hypothetical protein At2g33560
  misc_feature (26)..(188): NCBI GI NO: 5441887 NR Description: Similar to Arabidopsis thaliana BAC genomic sequence
  misc_feature (26)..(387): NCBI GI NO: 29725501 NR Description: spindle checkpoint protein BubR1 [Gallus gallus]
  misc_feature (22)..(341): NCBI GI NO: 22128593 NR Description: spindle checkpoint protein BubR1 [Xenopus laevis]
  misc_feature (21)..(372): NCBI GI NO: 28317135 NR Description: LD23835p [Drosophila melanogaster]
  misc_feature (24)..(322): NCBI GI NO: 21619502 NR Description: MGC36092 protein [Mus musculus]
MAAETKVQVSDPEAEFLNSKQETGYEWELFKENVRPLKRGRNVGILNHALKSHSDHQLRKNLIEKRRNLIEAIDEYEGDDPLSPWIECIKWVQEAFPPGGECSGLLVIYEQCVRKFWHSERYKDDLRYLKVWLEYAEHCADAEVIYKFLEVNEIGKTHAVYYIAYALHIEFKNKVKTANEIFNLGISRDAKPVEKLNDAYKKFMVRTMRRSNTADEEPKENNDLPSRSFGTLLSRGDNNARRQALGSSNPQAKKLKPNQSSKTPFAIYADAVSDTTSGNQPESDKSRPEFGSWLMLGGRAERNKENNSLPRKWASFKVPQKPIVRTVAAASAFTFEVFVDEEECTEEEEEKKKNDETISSSSNVLPLNGGREIKKETELLRQNPLRHFPPNSFLR

SEQ ID NO: 2964 - DNA, 889 bp, Arabidopsis thaliana
  misc_feature (1)..(889): Ceres Seq. ID no. 12357485
aatcaaatctctgagctttcagatatactctgatagaggagaagaagaagaagagatcagctgagcaacaatggccaccgcgatacctctcttcgcctctttcaagtacgccgatagtctcaccgtcgtcggaatctctttctgcacggcgttggtctgcgaagcaatctcgtggatcttaatctatcgcacaagctcgtacaaatcgttgaaatcttccattgacaaagcctctaagaagctcgagacgatgaagacagataatcctacctcgaagctaacaaacaagaaatcaaagacgaagaagatagatcgcgttgaatccagcttaaaggaatcgagcagagatctatcactcttcaagtttaaatctggtgccgttgtggctttggttctctttgtcgtgtttggattgttgaattcgcttttcgaagggaaagttgtagcgaagcttccgtttcatccgattacgattgtgaggaagatgagtcatagaggattgaaaggcgatgattccactgattgttccatggcttttctttatctgctttgttctattagtataaggactaatctgcagaagttcttgggtttctctccacctagaggagctgctggtgctggtggtttgttcccaatgcctgatccaaagaccaattgatcaggtttgatctgatgatgaattggattctggattctgagctcgttgttactctgaaattttcatagataacttcaatgctctgatgtagtggtgttgttttcagttcgtttgatgagaaacactttcaaagtttcgagttttgagttttcttctagtatgaggtttggatttggatcccttaacatgatctactccttttcaaattcagtcttgattattgtgtgc

SEQ ID NO: 2965 - protein, 196 aa, Arabidopsis thaliana
  peptide (1)..(196): Ceres Seq. ID no. 12357486
  misc_feature (1)..(196): NCBI GI NO: 15240119 NR Description: putative protein; protein id: At5g06660
  misc_feature (1)..(196): NCBI GI NO: 21554161 NR Description: unknown [Arabidopsis thaliana]
  misc_feature (1)..(196): NCBI GI NO: 18399454 NR Description: expressed protein; protein id: At3g12030
  misc_feature (1)..(196): NCBI GI NO: 21553820 NR Description: unknown [Arabidopsis thaliana]
  misc_feature (10)..(193): NCBI GI NO: 3283893 NR Description: unknown [Homo sapiens]
  misc_feature (10)..(193): NCBI GI NO: 23956188 NR Description: RIKEN cDNA 1190006A08 [Mus musculus]
  misc_feature (14)..(182): NCBI GI NO: 39587169 NR Description: Hypothetical protein CBG00622
  misc_feature (5)..(191): NCBI GI NO: 31238723 NR Description: ENSANGP00000016559 [Anopheles gambiae]
  misc_feature (19)..(193): NCBI GI NO: 33328806 NR Description: meg-2-like protein [Rattus norvegicus]
  misc_feature (13)..(191): NCBI GI NO: 24585112 NR Description: CG10470-PA [Drosophila melanogaster]
MATAIPLFASFKYADSLTVVGISFCTALVCEAISWILIYRTSSYKSLKSSIDKASKKLETMKTDNPTSKLTNKKSKTKKIDRVESSLKESSRDLSLFKFKSGAVVALVLFVVFGLLNSLFEGKVVAKLPFHPITIVRKMSHRGLKGDDSTDCSMAFLYLLCSISIRTNLQKFLGFSPPRGAAGAGGLFPMPDPKTN

SEQ ID NO: 2966 - protein, 136 aa, Arabidopsis thaliana
  peptide (1)..(136): Ceres Seq. ID no. 12357487
  misc_feature (1)..(136): NCBI GI NO: 15240119 NR Description: putative protein; protein id: At5g06660
  misc_feature (1)..(136): NCBI GI NO: 21554161 NR Description: unknown [Arabidopsis thaliana]
  misc_feature (1)..(136): NCBI GI NO: 18399454 NR Description: expressed protein; protein id: At3g12030
  misc_feature (1)..(136): NCBI GI NO: 21553820 NR Description: unknown [Arabidopsis thaliana]
  misc_feature (1)..(133): NCBI GI NO: 3283893 NR Description: unknown [Homo sapiens]
  misc_feature (1)..(133): NCBI GI NO: 23956188 NR Description: RIKEN cDNA 1190006A08 [Mus musculus]
  misc_feature (1)..(122): NCBI GI NO: 39587169 NR Description: Hypothetical protein CBG00622
  misc_feature (1)..(131): NCBI GI NO: 31238723 NR Description: ENSANGP00000016559 [Anopheles gambiae]
  misc_feature (1)..(133): NCBI GI NO: 33328806 NR Description: meg-2-like protein [Rattus norvegicus]
  misc_feature (1)..(131): NCBI GI NO: 24585112 NR Description: CG10470-PA [Drosophila melanogaster]
MKTDNPTSKLTNKKSKTKKIDRVESSLKESSRDLSLFKFKSGAVVALVLFVVFGLLNSLFEGKVVAKLPFHPITIVRKMSHRGLKGDDSTDCSMAFLYLLCSISIRTNLQKFLGFSPPRGAAGAGGLFPMPDPKTN

SEQ ID NO: 2967 - DNA, 1428 bp, Arabidopsis thaliana
  misc_feature (1)..(1428): Ceres Seq. ID no. 12327207
taaaaagtttgaactttccgtcgaatcaaatgggaagcggaagatatctagacgaccctttaacatttactagaaacccaccttcctcgtcgtctccaatcaccgaatctagctttctcgcagaatcgatctctcgctctggtagcttcgagagtgggagcttacgaggaggcgatggtgattgctttagcgacgtcgatttcgcacttgataaactcgctgggactgtacagttctacgagaggcatgtcttcttgtgctacaaaaaaccatccgtttggcctgcgaggatcgaagcgtctgagtttgatcggttaccgaggcttctctcttccgttatattggcgaggaagagtagtatgaagaaagagactttactcacaatatgtgagggacatgatggttcagagacatcaaatggggatgttctgatatttccagatatgatcagatacagaaggttgactcattttgatgtggacacatttgttgaggaggtgcttgtgaagggtgttgagtggttgcctggaaatcctgaatctcttagtggttcatatgtctttgtatgttgtcatggatctcgagaccggcgatgtggggtttgtggaccttctctagttagtcgattcagagaagaaattgactcgtgtgctcttcgaggtgaagtttcagtcagcccttgttctcacattggtggtcacaaatacactggagatgttatcatctatggattaaatatcaaccagagagtcacaggacactggtatggatgtgtgactctagaggatgttcctcttttgttggagcaacacattaacaaaggcgaaattgtagaccggctttggaggggtgaaatgggtctgccagaagaagatcagaagaaaagtcaagaacaaaggttacaattaaacagcgaaaagatcagcaacagagaggtgactcaagaatcagttaataatagtatctgttgccagtctcgagctgtcccagctgaacggtagtggttgccaacaaaatgggaactcctcttactgtctggaggagattcacacagagaaaaatacctcggagagagtaacctctgtaaaaaatgcatctcttcggatcggtagcagcgagaatggatcttctggtggattcaaggtttgtgcggtgatgtcaatgtggttggagacttgggagagagaagatacatatgctgctttagctgttgcttgtgctgctgcatctgtggctattgcttataactgctataaacaattgaaatgaagctatgtgttttatatttagcttctatgcaatggtaattatctcagtctttagattagttgtttcctcttcgtctgtacagagttagaagagggttttaactcttaagtaagaactgcttgttgataacatatgattattatatatccatttgtaagt

SEQ ID NO: 2968 - protein, 332 aa, Arabidopsis thaliana
  peptide (1)..(332): Ceres Seq. ID no. 12327208
  misc_feature (10)..(329): NCBI GI NO: 15241075 NR Description: sucrose cleavage protein-like
  misc_feature (10)..(327): NCBI GI NO: 18416788 NR Description: sucrase-like protein; protein id: At4g26620
  misc_feature (10)..(327): NCBI GI NO: 16604384 NR Description: AT4g26620/T15N24_70 [Arabidopsis thaliana]
  misc_feature (10)..(227): NCBI GI NO: 7488353 NR Description: sucrose cleavage protein homolog T15N24
  misc_feature (282)..(324): NCBI GI NO: 7488353 NR Description: sucrose cleavage protein homolog T15N24
  misc_feature (71)..(327): NCBI GI NO: 1086252 NR Description: sucrose cleavage protein - potato
  misc_feature (72)..(324): NCBI GI NO: 11994184 NR Description: sucrose cleavage protein-like
  misc_feature (72)..(324): NCBI GI NO: 16604338 NR Description: AT3g27570/MMJ24_12 [Arabidopsis thaliana]
  misc_feature (72)..(324): NCBI GI NO: 30688845 NR Description: sucrose cleavage protein -related
  misc_feature (72)..(324): NCBI GI NO: 21553503 NR Description: sucrose cleavage protein-like
KSLNFPSNQMGSGRYLDDPLTFTRNPPSSSSPITESSFLAESISRSGSFESGSLRGGDGDCFSDVDFALDKLAGTVQFYERHVFLCYKKPSVWPARIEASEFDRLPRLLSSVILARKSSMKKETLLTICEGHDGSETSNGDVLIFPDMIRYRRLTHFDVDTFVEEVLVKGVEWLPGNPESLSGSYVFVCCHGSRDRRCGVCGPSLVSRFREEIDSCALRGEVSVSPCSHIGGHKYTGDVIIYGLNINQRVTGHWYGCVTLEDVPLLLEQHINKGEIVDRLWRGEMGLPEEDQKKSQEQRLQLNSEKISNREVTQESVNNSICCQSRAVPAER

SEQ ID NO: 2969 - protein, 323 aa, Arabidopsis thaliana
  peptide (1)..(323): Ceres Seq. ID no. 12327209
  misc_feature (1)..(320): NCBI GI NO: 15241075 NR Description: sucrose cleavage protein-like
  misc_feature (1)..(318): NCBI GI NO: 18416788 NR Description: sucrase-like protein; protein id: At4g26620
  misc_feature (1)..(318): NCBI GI NO: 16604384 NR Description: AT4g26620/T15N24_70 [Arabidopsis thaliana]
  misc_feature (1)..(218): NCBI GI NO: 7488353 NR Description: sucrose cleavage protein homolog T15N24
  misc_feature (273)..(315): NCBI GI NO: 7488353 NR Description: sucrose cleavage protein homolog T15N24
  misc_feature (62)..(318): NCBI GI NO: 1086252 NR Description: sucrose cleavage protein - potato
  misc_feature (63)..(315): NCBI GI NO: 11994184 NR Description: sucrose cleavage protein-like
  misc_feature (63)..(315): NCBI GI NO: 16604338 NR Description: AT3g27570/MMJ24_12 [Arabidopsis thaliana]
  misc_feature (63)..(315): NCBI GI NO: 30688845 NR Description: sucrose cleavage protein -related
  misc_feature (63)..(315): NCBI GI NO: 21553503 NR Description: sucrose cleavage protein-like
MGSGRYLDDPLTFTRNPPSSSSPITESSFLAESISRSGSFESGSLRGGDGDCFSDVDFALDKLAGTVQFYERHVFLCYKKPSVWPARIEASEFDRLPRLLSSVILARKSSMKKETLLTICEGHDGSETSNGDVLIFPDMIRYRRLTHFDVDTFVEEVLVKGVEWLPGNPESLSGSYVFVCCHGSRDRRCGVCGPSLVSRFREEIDSCALRGEVSVSPCSHIGGHKYTGDVIIYGLNINQRVTGHWYGCVTLEDVPLLLEQHINKGEIVDRLWRGEMGLPEEDQKKSQEQRLQLNSEKISNREVTQESVNNSICCQSRAVPAER

SEQ ID NO: 2970 - protein, 213 aa, Arabidopsis thaliana
  peptide (1)..(213): Ceres Seq. ID no. 12327210
  misc_feature (1)..(210): NCBI GI NO: 15241075 NR Description: sucrose cleavage protein-like
  misc_feature (1)..(208): NCBI GI NO: 18416788 NR Description: sucrase-like protein; protein id: At4g26620
  misc_feature (1)..(208): NCBI GI NO: 16604384 NR Description: AT4g26620/T15N24_70 [Arabidopsis thaliana]
  misc_feature (1)..(108): NCBI GI NO: 7488353 NR Description: sucrose cleavage protein homolog T15N24
  misc_feature (163)..(205): NCBI GI NO: 7488353 NR Description: sucrose cleavage protein homolog T15N24
  misc_feature (1)..(208): NCBI GI NO: 1086252 NR Description: sucrose cleavage protein - potato
  misc_feature (1)..(205): NCBI GI NO: 11994184 NR Description: sucrose cleavage protein-like
  misc_feature (1)..(205): NCBI GI NO: 16604338 NR Description: AT3g27570/MMJ24_12 [Arabidopsis thaliana]
  misc_feature (1)..(205): NCBI GI NO: 30688845 NR Description: sucrose cleavage protein -related
  misc_feature (1)..(205): NCBI GI NO: 21553503 NR Description: sucrose cleavage protein-like
MKKETLLTICEGHDGSETSNGDVLIFPDMIRYRRLTHFDVDTFVEEVLVKGVEWLPGNPESLSGSYVFVCCHGSRDRRCGVCGPSLVSRFREEIDSCALRGEVSVSPCSHIGGHKYTGDVIIYGLNINQRVTGHWYGCVTLEDVPLLLEQHINKGEIVDRLWRGEMGLPEEDQKKSQEQRLQLNSEKISNREVTQESVNNSICCQSRAVPAER

SEQ ID NO: 2971 - DNA, 1221 bp, Arabidopsis thaliana
  misc_feature (1)..(1221): Ceres Seq. ID no. 12580520
acacactcacaactcaaatcatctttttgtctccctcctgaaaaaatggggttttcgtcttcattatcttgcagtgctatgggagccctaatagtgggttgccttctgcttcaagcatcaaactctaatgctcagttgagacctgacttctacttcaggacttgcccacctattttcaacatcattggggataccatcgtcaatgagctgcggactgatcctcgtattgccgcgagcctccttcggcttcacttccatgactgctttgttcgtggttgtgatgcatcgatcttgcttgacaattccacatcattccggaccgagaaagatgctgctccaaacaaaaattcggttcgagggttcgatgtcatagatagaatgaaagcagccattgagagagcttgcccaagaacagtttcttgcgcagatattatcaccatcgcctctcagatatcagttcttttgtctggcggtccatggtggccagttccgttggggagaagagacagcgtagaagctttcttcgctctggctaatacagctcttccctctccattttccactcttactcaacttaaaacagcttttgctgacgttggcctaaaccgcccttcggatttagtcgccctctccggtggtcacacatttggaaaagcacaatgccaattcgtgacacctcgtctttacaacttcaacggtaccaacagaccagacccaagtttgaacccaacttacctcgttgaactccgtcgattgtgtcctcaaaacggaaacggcaccgttctggttaacttcgattccgtgactccaactactttcgatagacaatattacaccaatcttcttaatgggaaaggtttgattcagagtgaccaagtgcttttctcaactccaggagctgatacgattccactagtaaaccaatacagcagcaacacgttcgtgttctttggagcattcgttgatgcaatgattaggatgggaaatcttaaacctttgactggaactcaaggagagataagacagaattgtagggttgtgaatccaagaattagggttgtggagaacgacgatggtgttgtgagttctatctgattatgcatgttggggatatatggatatgtaagaacgtataaaatgtgtgggattgtgggaacatttcgactaaataaagttctcacaagttgtgtgatttatgaaatttggtcttaattaacactt

SEQ ID NO: 2972 - protein, 364 aa, Arabidopsis thaliana
  peptide (1)..(364): Ceres Seq. ID no. 12580521
  misc_feature (62)..(312): Pfam Name: Pfam Description:  Peroxidase
  misc_feature (16)..(364): NCBI GI NO: 15224497 NR Description: peroxidase, putative; protein id: At2g38390
  misc_feature (16)..(364): NCBI GI NO: 129812 NR Description: Peroxidase C3 precursor
  misc_feature (16)..(364): NCBI GI NO: 15224496 NR Description: peroxidase; protein id: At2g38380
  misc_feature (16)..(364): NCBI GI NO: 81653 NR Description: peroxidase (EC 1.11.1.7) E - Arabidopsis thaliana
  misc_feature (45)..(350): NCBI GI NO: 26398007 NR Description: Peroxidase E5
  misc_feature (16)..(348): NCBI GI NO: 21592888 NR Description: peroxidase [Arabidopsis thaliana]
  misc_feature (16)..(348): NCBI GI NO: 30690396 NR Description: peroxidase, putative [Arabidopsis thaliana]
  misc_feature (16)..(348): NCBI GI NO: 25453209 NR Description: Peroxidase 32 precursor
  misc_feature (16)..(348): NCBI GI NO: 15229095 NR Description: peroxidase, putative; protein id: At3g49120
  misc_feature (16)..(348): NCBI GI NO: 480907 NR Description: peroxidase (EC 1.11.1.7) Cb - Arabidopsis thaliana
THSQLKSSFCLPPEKMGFSSSLSCSAMGALIVGCLLLQASNSNAQLRPDFYFRTCPPIFNIIGDTIVNELRTDPRIAASLLRLHFHDCFVRGCDASILLDNSTSFRTEKDAAPNKNSVRGFDVIDRMKAAIERACPRTVSCADIITIASQISVLLSGGPWWPVPLGRRDSVEAFFALANTALPSPFSTLTQLKTAFADVGLNRPSDLVALSGGHTFGKAQCQFVTPRLYNFNGTNRPDPSLNPTYLVELRRLCPQNGNGTVLVNFDSVTPTTFDRQYYTNLLNGKGLIQSDQVLFSTPGADTIPLVNQYSSNTFVFFGAFVDAMIRMGNLKPLTGTQGEIRQNCRVVNPRIRVVENDDGVVSSI

SEQ ID NO: 2973 - protein, 349 aa, Arabidopsis thaliana
  peptide (1)..(349): Ceres Seq. ID no. 12580522
  misc_feature (47)..(297): Pfam Name: Pfam Description:  Peroxidase
  misc_feature (1)..(349): NCBI GI NO: 15224497 NR Description: peroxidase, putative; protein id: At2g38390
  misc_feature (1)..(349): NCBI GI NO: 129812 NR Description: Peroxidase C3 precursor
  misc_feature (1)..(349): NCBI GI NO: 15224496 NR Description: peroxidase; protein id: At2g38380
  misc_feature (1)..(349): NCBI GI NO: 81653 NR Description: peroxidase (EC 1.11.1.7) E - Arabidopsis thaliana
  misc_feature (30)..(335): NCBI GI NO: 26398007 NR Description: Peroxidase E5
  misc_feature (1)..(333): NCBI GI NO: 21592888 NR Description: peroxidase [Arabidopsis thaliana]
  misc_feature (1)..(333): NCBI GI NO: 30690396 NR Description: peroxidase, putative [Arabidopsis thaliana]
  misc_feature (1)..(333): NCBI GI NO: 25453209 NR Description: Peroxidase 32 precursor
  misc_feature (1)..(333): NCBI GI NO: 15229095 NR Description: peroxidase, putative; protein id: At3g49120
  misc_feature (1)..(333): NCBI GI NO: 480907 NR Description: peroxidase (EC 1.11.1.7) Cb - Arabidopsis thaliana
MGFSSSLSCSAMGALIVGCLLLQASNSNAQLRPDFYFRTCPPIFNIIGDTIVNELRTDPRIAASLLRLHFHDCFVRGCDASILLDNSTSFRTEKDAAPNKNSVRGFDVIDRMKAAIERACPRTVSCADIITIASQISVLLSGGPWWPVPLGRRDSVEAFFALANTALPSPFSTLTQLKTAFADVGLNRPSDLVALSGGHTFGKAQCQFVTPRLYNFNGTNRPDPSLNPTYLVELRRLCPQNGNGTVLVNFDSVTPTTFDRQYYTNLLNGKGLIQSDQVLFSTPGADTIPLVNQYSSNTFVFFGAFVDAMIRMGNLKPLTGTQGEIRQNCRVVNPRIRVVENDDGVVSSI

SEQ ID NO: 2974 - protein, 338 aa, Arabidopsis thaliana
  peptide (1)..(338): Ceres Seq. ID no. 12580523
  misc_feature (36)..(286): Pfam Name: Pfam Description:  Peroxidase
  misc_feature (1)..(338): NCBI GI NO: 15224497 NR Description: peroxidase, putative; protein id: At2g38390
  misc_feature (1)..(338): NCBI GI NO: 129812 NR Description: Peroxidase C3 precursor
  misc_feature (1)..(338): NCBI GI NO: 15224496 NR Description: peroxidase; protein id: At2g38380
  misc_feature (1)..(338): NCBI GI NO: 81653 NR Description: peroxidase (EC 1.11.1.7) E - Arabidopsis thaliana
  misc_feature (19)..(324): NCBI GI NO: 26398007 NR Description: Peroxidase E5
  misc_feature (1)..(322): NCBI GI NO: 21592888 NR Description: peroxidase [Arabidopsis thaliana]
  misc_feature (1)..(322): NCBI GI NO: 30690396 NR Description: peroxidase, putative [Arabidopsis thaliana]
  misc_feature (1)..(322): NCBI GI NO: 25453209 NR Description: Peroxidase 32 precursor
  misc_feature (1)..(322): NCBI GI NO: 15229095 NR Description: peroxidase, putative; protein id: At3g49120
  misc_feature (1)..(322): NCBI GI NO: 480907 NR Description: peroxidase (EC 1.11.1.7) Cb - Arabidopsis thaliana
MGALIVGCLLLQASNSNAQLRPDFYFRTCPPIFNIIGDTIVNELRTDPRIAASLLRLHFHDCFVRGCDASILLDNSTSFRTEKDAAPNKNSVRGFDVIDRMKAAIERACPRTVSCADIITIASQISVLLSGGPWWPVPLGRRDSVEAFFALANTALPSPFSTLTQLKTAFADVGLNRPSDLVALSGGHTFGKAQCQFVTPRLYNFNGTNRPDPSLNPTYLVELRRLCPQNGNGTVLVNFDSVTPTTFDRQYYTNLLNGKGLIQSDQVLFSTPGADTIPLVNQYSSNTFVFFGAFVDAMIRMGNLKPLTGTQGEIRQNCRVVNPRIRVVENDDGVVSSI

SEQ ID NO: 2975 - DNA, 1387 bp, Arabidopsis thaliana
  misc_feature (1)..(1387): Ceres Seq. ID no. 13486745
attgtttcagaaaagctttaacctaatttcacttcgtctctctctcgcgctcccaatttctccgccggcgggaaaaccatgtcgcacttcggaaggtcaggtccaccggatatcagcgacacctactcacttctcgtccttaacatcaccttccgtacgactgctgatgatctctatcctctattcgcaaagtatggaaaggtcgttgatgtgtttattcccagagatcgaaggactggtgattcgcgtggttttgcgtttgttcggtataagtataaagacgaagctcacaaagcagtggaaaggcttgatggaagagttgttgatggcagagaaataactgttcagtttgcgaaatatgggccaaatgctgaaaaaatttccaaaggaagagttgtggaaccaccgccgaagtcacgaagatctagaagccgtagtcctaggcggagtcgtagtcctaggaggagccgtagcccgcctagacgtcgtagtcccagaagaagccgcagtcctcgtaggaggtcccgagatgactatagggaaaaagactaccggaagcagagcaggagcagaagctatgacaggcgtgaaaggcatgaggagaaggatagagatcatcgtcgtcgcactaggtctcgtagtgccagcccagatgaaaaacgcagagtcagaggccgttatgataatgagagccgcagtcacagtcgttccttgagtgcatctcctgctcgccgcagccctagaagttcctccccacagaaaacctctcctgctagagaagtttctcctgataagcgtagcaatgagaggtctccatctcctcgtcgcagcctcagcccaagaagccctgctttgcaaaaggcctctccttctaaggagatgtctcctgaaaggcgtagcaatgagaggtccccatctcctggtagccctgctcctctgcgcaaagttgatgctgcttctcgaagtcaatctccttatgctgcggaatgactgcagccacttgtgaaagtgatacggtgtatgatgaaaaacacgtttgcttgtactgatgatgtttcatcattaagcactggaacgtctaccctctgtagtattacttgctttccgtaggtgccctcaaactactgagtactgactgtatctttgtttcctgttatcgttctggtttagtgttcatgtgcaagaattattactgtttgaacagcctttttagtctctgttttatttgaatcttctctggtttggaattcatagcattctaactccattcccctggcttgtcttggatttttctagtctggttcgagaaaagaattgactgggaagatggcacaaccatgttgagattgtagctgttgatggctgtttatgaaactgtagatgatct

SEQ ID NO: 2976 - protein, 303 aa, Arabidopsis thaliana
  peptide (1)..(303): Ceres Seq. ID no. 13486746
  misc_feature (18)..(89): Pfam Name: a.k.a. RRM, RBD, or RNP domain Pfam Description: RNA recognition motif.
  misc_feature (1)..(303): NCBI GI NO: 15237641 NR Description: arginine/serine-rich splicing factor SC35
  misc_feature (1)..(303): NCBI GI NO: 9843653 NR Description: splicing factor SC35 [Arabidopsis thaliana]
  misc_feature (1)..(280): NCBI GI NO: 33146621 NR Description: putative splicing factor, arginine/serine-rich 2
  misc_feature (1)..(288): NCBI GI NO: 7446336 NR Description: probable arginine/serine-rich splicing factor - alfalfa
  misc_feature (4)..(216): NCBI GI NO: 28279759 NR Description: Similar to splicing factor
  misc_feature (4)..(234): NCBI GI NO: 266991 NR Description: Splicing factor, arginine/serine-rich 2
  misc_feature (4)..(234): NCBI GI NO: 6755478 NR Description: splicing factor, arginine/serine-rich 2
  misc_feature (4)..(234): NCBI GI NO: 4506899 NR Description: splicing factor, arginine/serine-rich 2
  misc_feature (5)..(279): NCBI GI NO: 15055543 NR Description: Splicing factor, arginine/serine-rich, 46kD
  misc_feature (5)..(298): NCBI GI NO: 29735276 NR Description: similar to 46kD arginine/serine-rich splicing factor
MSHFGRSGPPDISDTYSLLVLNITFRTTADDLYPLFAKYGKVVDVFIPRDRRTGDSRGFAFVRYKYKDEAHKAVERLDGRVVDGREITVQFAKYGPNAEKISKGRVVEPPPKSRRSRSRSPRRSRSPRRSRSPPRRRSPRRSRSPRRRSRDDYREKDYRKQSRSRSYDRRERHEEKDRDHRRRTRSRSASPDEKRRVRGRYDNESRSHSRSLSASPARRSPRSSSPQKTSPAREVSPDKRSNERSPSPRRSLSPRSPALQKASPSKEMSPERRSNERSPSPGSPAPLRKVDAASRSQSPYAAE

SEQ ID NO: 2977 - DNA, 1539 bp, Arabidopsis thaliana
  misc_feature (1)..(1539): Ceres Seq. ID no. 13487911
aatcaaaccttaggaagagccatgggtgaagaagctatagttctgtatcctgcaccaccaataggtcacttagtgtccatggttgagttaggtaaaaccatcctctccaaaaacccatctctctccatccacattatcttagttccaccgccttatcagccggaatcaaccgccacttacatctcctccgtctcctcctccttcccttcaataaccttccaccatcttcccgccgtcacaccgtactcctcctcctccacctctcgccaccaccacgaatctctcctcctagagatcctctgttttagcaacccaagtgtccaccgaactcttttctcactctctcggaatttcaatgtccgagcaatgatcatcgatttcttctgcaccgccgttttagacatcaccgctgacttcacgttcccggtttacttcttctacacctctggagccgcatgtctcgccttttccttctatctcccgaccatcgacgaaacaacccccggaaaaaacctcaaagacattcctacagttcatatccccggcgttcctccgatgaagggctccgatatgcctaaggcggtgctcgaacgagacgatgaggtctacgatgtttttataatgttcggtaaacagctctcgaagtcgtcagggattattatcaatacgtttgatgctttagaaaacagagccatcaaggccataacagaggagctctgttttcgcaatatttatccaattggaccgctcattgtaaacggaagaatcgaagatagaaacgacaacaaggcagtttcttgtctcaattggctggattcgcagccggaaaagagtgttgtgtttctctgttttggaagcttaggtttgttctcaaaagaacaggtgatagagattgctgttggtttagagaaaagtgggcagagattcttgtgggtggtccgtaatccacccgagttagaaaagacagaactggatttgaaatcactcttaccagaaggattcttaagccgaaccgaagacaaagggatggtcgtgaaatcatgggctccgcaagttccggttctgaatcataaagcagtcgggggattcgtcactcattgcggttggaattcaattcttgaagctgtttgtgctggtgtgccgatggtggcttggccgttgtacgctgagcagaggtttaatagagtgatgattgtggatgagatcaagattgcgatttcgatgaatgaatcagagacgggtttcgtgagctctacagaggtggagaaacgagtccaagagataattggggagtgtccggttagggagcgaaccatggctatgaagaacgcagccgaattagccttgacagaaactggttcgtctcataccgcattaactactttactccagtcgtggagcccaaagtgatctttgaaattaagtcttgcatcaattaataactttgtagtctctcagaatcatgtctttgggggttattcgttttactagttcaaagttatgtctctgagaccgcagatggaaagaacaatttatacc

SEQ ID NO: 2978 - protein, 469 aa, Arabidopsis thaliana
  peptide (1)..(469): Ceres Seq. ID no. 13487912
  misc_feature (12)..(469): Pfam Name: Pfam Description:  UDP-glucoronosyl and UDP-glucosyl transferase
  misc_feature (8)..(469): NCBI GI NO: 18401158 NR Description: glycosyltransferase family [Arabidopsis thaliana]
  misc_feature (8)..(469): NCBI GI NO: 21593785 NR Description: putative glucosyltransferase
  misc_feature (8)..(452): NCBI GI NO: 18401155 NR Description: glycosyltransferase family [Arabidopsis thaliana]
  misc_feature (8)..(452): NCBI GI NO: 30684106 NR Description: glycosyltransferase family [Arabidopsis thaliana]
  misc_feature (13)..(466): NCBI GI NO: 22535568 NR Description: putative glucosyltransferase
  misc_feature (8)..(466): NCBI GI NO: 19911189 NR Description: glucosyltransferase-3 [Vigna angularis]
  misc_feature (10)..(466): NCBI GI NO: 19911193 NR Description: glucosyltransferase-5 [Vigna angularis]
  misc_feature (10)..(464): NCBI GI NO: 34910204 NR Description: putative flavonol glucosyltransferase
  misc_feature (14)..(466): NCBI GI NO: 34910208 NR Description: putative flavonol glucosyltransferase
  misc_feature (98)..(417): NCBI GI NO: 17484017 NR Description: UDP-glycosyltransfersase [Jatropha curcas]
NQTLGRAMGEEAIVLYPAPPIGHLVSMVELGKTILSKNPSLSIHIILVPPPYQPESTATYISSVSSSFPSITFHHLPAVTPYSSSSTSRHHHESLLLEILCFSNPSVHRTLFSLSRNFNVRAMIIDFFCTAVLDITADFTFPVYFFYTSGAACLAFSFYLPTIDETTPGKNLKDIPTVHIPGVPPMKGSDMPKAVLERDDEVYDVFIMFGKQLSKSSGIIINTFDALENRAIKAITEELCFRNIYPIGPLIVNGRIEDRNDNKAVSCLNWLDSQPEKSVVFLCFGSLGLFSKEQVIEIAVGLEKSGQRFLWVVRNPPELEKTELDLKSLLPEGFLSRTEDKGMVVKSWAPQVPVLNHKAVGGFVTHCGWNSILEAVCAGVPMVAWPLYAEQRFNRVMIVDEIKIAISMNESETGFVSSTEVEKRVQEIIGECPVRERTMAMKNAAELALTETGSSHTALTTLLQSWSPK

SEQ ID NO: 2979 - protein, 462 aa, Arabidopsis thaliana
  peptide (1)..(462): Ceres Seq. ID no. 13487913
  misc_feature (5)..(462): Pfam Name: Pfam Description:  UDP-glucoronosyl and UDP-glucosyl transferase
  misc_feature (1)..(462): NCBI GI NO: 18401158 NR Description: glycosyltransferase family [Arabidopsis thaliana]
  misc_feature (1)..(462): NCBI GI NO: 21593785 NR Description: putative glucosyltransferase
  misc_feature (1)..(445): NCBI GI NO: 18401155 NR Description: glycosyltransferase family [Arabidopsis thaliana]
  misc_feature (1)..(445): NCBI GI NO: 30684106 NR Description: glycosyltransferase family [Arabidopsis thaliana]
  misc_feature (6)..(459): NCBI GI NO: 22535568 NR Description: putative glucosyltransferase
  misc_feature (1)..(459): NCBI GI NO: 19911189 NR Description: glucosyltransferase-3 [Vigna angularis]
  misc_feature (3)..(459): NCBI GI NO: 19911193 NR Description: glucosyltransferase-5 [Vigna angularis]
  misc_feature (3)..(457): NCBI GI NO: 34910204 NR Description: putative flavonol glucosyltransferase
  misc_feature (7)..(459): NCBI GI NO: 34910208 NR Description: putative flavonol glucosyltransferase
  misc_feature (91)..(410): NCBI GI NO: 17484017 NR Description: UDP-glycosyltransfersase [Jatropha curcas]
MGEEAIVLYPAPPIGHLVSMVELGKTILSKNPSLSIHIILVPPPYQPESTATYISSVSSSFPSITFHHLPAVTPYSSSSTSRHHHESLLLEILCFSNPSVHRTLFSLSRNFNVRAMIIDFFCTAVLDITADFTFPVYFFYTSGAACLAFSFYLPTIDETTPGKNLKDIPTVHIPGVPPMKGSDMPKAVLERDDEVYDVFIMFGKQLSKSSGIIINTFDALENRAIKAITEELCFRNIYPIGPLIVNGRIEDRNDNKAVSCLNWLDSQPEKSVVFLCFGSLGLFSKEQVIEIAVGLEKSGQRFLWVVRNPPELEKTELDLKSLLPEGFLSRTEDKGMVVKSWAPQVPVLNHKAVGGFVTHCGWNSILEAVCAGVPMVAWPLYAEQRFNRVMIVDEIKIAISMNESETGFVSSTEVEKRVQEIIGECPVRERTMAMKNAAELALTETGSSHTALTTLLQSWSPK

SEQ ID NO: 2980 - protein, 443 aa, Arabidopsis thaliana
  peptide (1)..(443): Ceres Seq. ID no. 13487914
  misc_feature (1)..(443): Pfam Name: Pfam Description:  UDP-glucoronosyl and UDP-glucosyl transferase
  misc_feature (1)..(443): NCBI GI NO: 18401158 NR Description: glycosyltransferase family [Arabidopsis thaliana]
  misc_feature (1)..(443): NCBI GI NO: 21593785 NR Description: putative glucosyltransferase
  misc_feature (1)..(426): NCBI GI NO: 18401155 NR Description: glycosyltransferase family [Arabidopsis thaliana]
  misc_feature (1)..(426): NCBI GI NO: 30684106 NR Description: glycosyltransferase family [Arabidopsis thaliana]
  misc_feature (1)..(440): NCBI GI NO: 22535568 NR Description: putative glucosyltransferase
  misc_feature (1)..(440): NCBI GI NO: 19911189 NR Description: glucosyltransferase-3 [Vigna angularis]
  misc_feature (1)..(440): NCBI GI NO: 19911193 NR Description: glucosyltransferase-5 [Vigna angularis]
  misc_feature (1)..(438): NCBI GI NO: 34910204 NR Description: putative flavonol glucosyltransferase
  misc_feature (1)..(440): NCBI GI NO: 34910208 NR Description: putative flavonol glucosyltransferase
  misc_feature (72)..(391): NCBI GI NO: 17484017 NR Description: UDP-glycosyltransfersase [Jatropha curcas]
MVELGKTILSKNPSLSIHIILVPPPYQPESTATYISSVSSSFPSITFHHLPAVTPYSSSSTSRHHHESLLLEILCFSNPSVHRTLFSLSRNFNVRAMIIDFFCTAVLDITADFTFPVYFFYTSGAACLAFSFYLPTIDETTPGKNLKDIPTVHIPGVPPMKGSDMPKAVLERDDEVYDVFIMFGKQLSKSSGIIINTFDALENRAIKAITEELCFRNIYPIGPLIVNGRIEDRNDNKAVSCLNWLDSQPEKSVVFLCFGSLGLFSKEQVIEIAVGLEKSGQRFLWVVRNPPELEKTELDLKSLLPEGFLSRTEDKGMVVKSWAPQVPVLNHKAVGGFVTHCGWNSILEAVCAGVPMVAWPLYAEQRFNRVMIVDEIKIAISMNESETGFVSSTEVEKRVQEIIGECPVRERTMAMKNAAELALTETGSSHTALTTLLQSWSPK

SEQ ID NO: 2981 - DNA, 1856 bp, Arabidopsis thaliana
  misc_feature (1)..(1856): Ceres Seq. ID no. 12324698
aaatcataaaaacacaagttttcgacagatcaactgttttcttcattacgtgttcttcaatggcgtcacttcactgattctattcctatcaaagccacttacccatttccttttatatgcacaaattctcataaagttttcatttttattccatttttctcggaagccatggaagctgctaatgagcctgttaatggcggatccgtacagatccgaacagagaacaacgaaagacgaaagcttcctaatttcttacaaagcgtcaacatgaaatacgtcaagctaggttatcattacctcattactcatctcttcaagctctgtttggttccattaatggcggttttagtcacagagacctctcgattaacaacagacgatctttaccagatttggcttcatctccaatacaatctcgttgctttcatctttctctctgctttagctatctttggctccaccgtttacatcatgagtcgtcccagatctgtttatctcgttgattactcttgttatcttcctccggagagtcttcaggttaagtatcagaagtttatggatcattctaagttgattgaagatttcaatgagtcatctttagagtttcagaggaagattcttgaacgttctggtttaggagaagagacttatctccctgaagctttacattgtatccctccgaggcctacgatgatggcggctcgtgaggaatctgagcaggtaatgtttggtgctcttgataagcttttcgagaataccaagattaaccctagggatattggtgtgttggttgtgaattgtagcttgtttaatcctacaccttcgttgtcagctatgattgttaacaagtataagcttagagggaatgttaagagttttaaccttggtggaatggggtgtagtgctggtgttatctctatcgatttagctaaagatatgttgcaagttcataggaatacttatgctgttgtggttagtactgagaacattactcagaattggtattttgggaataagaaggctatgttgattccgaattgtttgtttcgtgttggtggttcggcgattttgttgtcgaacaaggggaaagatcgtagacggtctaagtataagcttgttcataccgttaggactcataaaggagctgttgagaaggctttcaactgtgtttaccaagagcaagatgataatgggaagaccggggtttcgttgtcgaaagatcttatggctatagctggggaagctcttaaggcgaatatcactactttaggtcctttggttcttcctataagtgagcagattctgtttttcatgactttggttacgaagaaactgtttaactcgaagctgaagccgtatattccgaatttcaagcttgcgtttgatcatttctgtatccatgctggtggtagagctgtgattgatgagcttgagaagaatctgcagctttcgcagactcatgtcgaggcatcgagaatgacactgcatagatttggaaacacttcttcgagctcgatttggtatgaactggcttacatagaggctaaaggtaggatgaagaaaggaaaccgggtttggcagattgcttttggaagtgggtttaagtgtaacagtgcagtttgggtggctctaaacaatgtcaagccttcggttagtagtccgtgggaacactgcatcgaccgatatccggttaagctcgacttctgatttaatcaaaaaccatttgtttggttagtcctagtctttactagactctgccttgtttatttttcttcttttcttgttaagctcttgtactcttaatgtgacgcttcttgattattactctcgcgttttattctatggcatctttatcc

SEQ ID NO: 2982 - protein, 512 aa, Arabidopsis thaliana
  peptide (1)..(512): Ceres Seq. ID no. 12324699
  misc_feature (346)..(489): Pfam Name: Pfam Description:  Chalcone and stilbene synthases
  misc_feature (1)..(512): NCBI GI NO: 15226724 NR Description: putative beta-ketoacyl-CoA synthase
  misc_feature (10)..(512): NCBI GI NO: 15223556 NR Description: very-long-chain fatty acid condensing enzyme CUT1
  misc_feature (29)..(511): NCBI GI NO: 15236133 NR Description: putative ketoacyl-CoA synthase
  misc_feature (14)..(510): NCBI GI NO: 32172502 NR Description: FAE1 [Marchantia polymorpha]
  misc_feature (1)..(510): NCBI GI NO: 29417540 NR Description: beta-ketoacyl-CoA-synthase [Marchantia polymorpha]
  misc_feature (22)..(510): NCBI GI NO: 32172500 NR Description: FAE3 [Marchantia polymorpha]
  misc_feature (23)..(510): NCBI GI NO: 15225767 NR Description: putative beta-ketoacyl-CoA synthase
  misc_feature (25)..(508): NCBI GI NO: 17979464 NR Description: At1g68530/T26J14_10 [Arabidopsis thaliana]
  misc_feature (25)..(508): NCBI GI NO: 15221431 NR Description: very-long-chain fatty acid condensing enzyme
  misc_feature (25)..(508): NCBI GI NO: 21593111 NR Description: very-long-chain fatty acid condensing enzyme CUT1
MEAANEPVNGGSVQIRTENNERRKLPNFLQSVNMKYVKLGYHYLITHLFKLCLVPLMAVLVTETSRLTTDDLYQIWLHLQYNLVAFIFLSALAIFGSTVYIMSRPRSVYLVDYSCYLPPESLQVKYQKFMDHSKLIEDFNESSLEFQRKILERSGLGEETYLPEALHCIPPRPTMMAAREESEQVMFGALDKLFENTKINPRDIGVLVVNCSLFNPTPSLSAMIVNKYKLRGNVKSFNLGGMGCSAGVISIDLAKDMLQVHRNTYAVVVSTENITQNWYFGNKKAMLIPNCLFRVGGSAILLSNKGKDRRRSKYKLVHTVRTHKGAVEKAFNCVYQEQDDNGKTGVSLSKDLMAIAGEALKANITTLGPLVLPISEQILFFMTLVTKKLFNSKLKPYIPNFKLAFDHFCIHAGGRAVIDELEKNLQLSQTHVEASRMTLHRFGNTSSSSIWYELAYIEAKGRMKKGNRVWQIAFGSGFKCNSAVWVALNNVKPSVSSPWEHCIDRYPVKLDF

SEQ ID NO: 2983 - protein, 479 aa, Arabidopsis thaliana
  peptide (1)..(479): Ceres Seq. ID no. 12324700
  misc_feature (313)..(456): Pfam Name: Pfam Description:  Chalcone and stilbene synthases
  misc_feature (1)..(479): NCBI GI NO: 15226724 NR Description: putative beta-ketoacyl-CoA synthase
  misc_feature (1)..(479): NCBI GI NO: 15223556 NR Description: very-long-chain fatty acid condensing enzyme CUT1
  misc_feature (1)..(478): NCBI GI NO: 15236133 NR Description: putative ketoacyl-CoA synthase
  misc_feature (1)..(477): NCBI GI NO: 32172502 NR Description: FAE1 [Marchantia polymorpha]
  misc_feature (1)..(477): NCBI GI NO: 29417540 NR Description: beta-ketoacyl-CoA-synthase [Marchantia polymorpha]
  misc_feature (1)..(477): NCBI GI NO: 32172500 NR Description: FAE3 [Marchantia polymorpha]
  misc_feature (1)..(477): NCBI GI NO: 15225767 NR Description: putative beta-ketoacyl-CoA synthase
  misc_feature (1)..(475): NCBI GI NO: 17979464 NR Description: At1g68530/T26J14_10 [Arabidopsis thaliana]
  misc_feature (1)..(475): NCBI GI NO: 15221431 NR Description: very-long-chain fatty acid condensing enzyme
  misc_feature (1)..(475): NCBI GI NO: 21593111 NR Description: very-long-chain fatty acid condensing enzyme CUT1
MKYVKLGYHYLITHLFKLCLVPLMAVLVTETSRLTTDDLYQIWLHLQYNLVAFIFLSALAIFGSTVYIMSRPRSVYLVDYSCYLPPESLQVKYQKFMDHSKLIEDFNESSLEFQRKILERSGLGEETYLPEALHCIPPRPTMMAAREESEQVMFGALDKLFENTKINPRDIGVLVVNCSLFNPTPSLSAMIVNKYKLRGNVKSFNLGGMGCSAGVISIDLAKDMLQVHRNTYAVVVSTENITQNWYFGNKKAMLIPNCLFRVGGSAILLSNKGKDRRRSKYKLVHTVRTHKGAVEKAFNCVYQEQDDNGKTGVSLSKDLMAIAGEALKANITTLGPLVLPISEQILFFMTLVTKKLFNSKLKPYIPNFKLAFDHFCIHAGGRAVIDELEKNLQLSQTHVEASRMTLHRFGNTSSSSIWYELAYIEAKGRMKKGNRVWQIAFGSGFKCNSAVWVALNNVKPSVSSPWEHCIDRYPVKLDF

SEQ ID NO: 2984 - protein, 456 aa, Arabidopsis thaliana
  peptide (1)..(456): Ceres Seq. ID no. 12324701
  misc_feature (290)..(433): Pfam Name: Pfam Description:  Chalcone and stilbene synthases
  misc_feature (1)..(456): NCBI GI NO: 15226724 NR Description: putative beta-ketoacyl-CoA synthase
  misc_feature (1)..(456): NCBI GI NO: 15223556 NR Description: very-long-chain fatty acid condensing enzyme CUT1
  misc_feature (1)..(455): NCBI GI NO: 15236133 NR Description: putative ketoacyl-CoA synthase
  misc_feature (1)..(454): NCBI GI NO: 32172502 NR Description: FAE1 [Marchantia polymorpha]
  misc_feature (1)..(454): NCBI GI NO: 29417540 NR Description: beta-ketoacyl-CoA-synthase [Marchantia polymorpha]
  misc_feature (1)..(454): NCBI GI NO: 32172500 NR Description: FAE3 [Marchantia polymorpha]
  misc_feature (1)..(454): NCBI GI NO: 15225767 NR Description: putative beta-ketoacyl-CoA synthase
  misc_feature (1)..(452): NCBI GI NO: 17979464 NR Description: At1g68530/T26J14_10 [Arabidopsis thaliana]
  misc_feature (1)..(452): NCBI GI NO: 15221431 NR Description: very-long-chain fatty acid condensing enzyme
  misc_feature (1)..(452): NCBI GI NO: 21593111 NR Description: very-long-chain fatty acid condensing enzyme CUT1
MAVLVTETSRLTTDDLYQIWLHLQYNLVAFIFLSALAIFGSTVYIMSRPRSVYLVDYSCYLPPESLQVKYQKFMDHSKLIEDFNESSLEFQRKILERSGLGEETYLPEALHCIPPRPTMMAAREESEQVMFGALDKLFENTKINPRDIGVLVVNCSLFNPTPSLSAMIVNKYKLRGNVKSFNLGGMGCSAGVISIDLAKDMLQVHRNTYAVVVSTENITQNWYFGNKKAMLIPNCLFRVGGSAILLSNKGKDRRRSKYKLVHTVRTHKGAVEKAFNCVYQEQDDNGKTGVSLSKDLMAIAGEALKANITTLGPLVLPISEQILFFMTLVTKKLFNSKLKPYIPNFKLAFDHFCIHAGGRAVIDELEKNLQLSQTHVEASRMTLHRFGNTSSSSIWYELAYIEAKGRMKKGNRVWQIAFGSGFKCNSAVWVALNNVKPSVSSPWEHCIDRYPVKLDF

SEQ ID NO: 2985 - DNA, 1553 bp, Arabidopsis thaliana
  misc_feature (1)..(1553): Ceres Seq. ID no. 13648203
gccacccagaaaaaaccctcaagtcttcttcttcttcctcaatctctccacctcttttcaaaccttcttcacactctctctcaatcaatcctttttcttctcaaatctttcagttttgatctctaaatttccagaaaatgagcaacgataaggacagtttcaatgtcagcgatctcacttctgctcttaaagatgaggatcgagctggtcttgtcaacgctcttaagaacaagctccagaatctagctggacaacattctgatgtgctcgagaatctgactcctaaaattagaaggcgtgttgaggttttgcgggagattcagggcaaacatgatgaaatagagacaaaattccgcgaggagagagctgctcttgaagccaagtatcaaaagttatatcagcctttgtataacaagcgttatgagattgtgaatggagctactgaagttgaaggggctccagaggatgctaagatggaccaaggagacgagaaaactgcagaagagaaaggagtccctagtttctggctgactgctctgaaaaataatgatgttatatctgaagagatcacagagcgtgatgaaggagcccttatatatcttaaagatatcaagtggtgcaagattgaagaaccaaagggattcaaacttgagtttttcttcgaccagaatccttacttcaaaaacaccctattaacaaaggcgtatcatatgattgatgaagatgagcctctgcttgagaaggctattgggacagagattgattggtatcctggaaaatgcttaactcagaagattcttaagaagaagcctaagaaaggtgcaaagaatgccaagccaattaccaaaactgaagattgtgaaagcttcttcaacttcttcaatcctccccaagttcctgatgatgatgaagacattgacgaagaaagagccgaggaacttcagaatctgatggaacaagattatgacattggttctacaatccgggagaagatcatacctcatgctgtctcatggtttactggtgaggctattgagggagaggagtttgaaatagacaatgacgatgaagatgatatcgatgaggatgaagatgaggatgaagaagatgaagacgaagatgaggaagaagacgacgaagatgaggaggaagaagtaagcaagaccaaaaagaagccatcagtcttacacaagaaaggagggagacctcaggttaccgatgatcaacaaggagagaggcctcctgaatgcaaacaacagtaaacaaaatcgaaaagtctaaacgaaaaccagtaaaagaaaaacaaatgttttgggttttgagtgaagtttcatggcctagttttttgcttccatgtaaggcaaaatgttttgaagactgctcataggaatgttgctgtaggcaaaagagtgagtttctccatgtggagatacttgataaattatttttggtgcatttgttttttttttctttaatcactaagttgaattttggtgtgttcgtcaaaattatatccttttaccacttgaattaaagtctcttttggtttcttt

SEQ ID NO: 2986 - protein, 374 aa, Arabidopsis thaliana
  peptide (1)..(374): Ceres Seq. ID no. 13648204
  misc_feature (52)..(300): Pfam Name: NAP Pfam Description: Nucleosome assembly protein
  misc_feature (1)..(374): NCBI GI NO: 18423918 NR Description: nucleosome assembly protein [Arabidopsis thaliana]
  misc_feature (1)..(374): NCBI GI NO: 8777435 NR Description: nucleosome assembly protein [Arabidopsis thaliana]
  misc_feature (1)..(374): NCBI GI NO: 549975 NR Description: nucleosome assembly protein I-like protein
  misc_feature (1)..(374): NCBI GI NO: 15236115 NR Description: nucleosome assembly protein I-related protein
  misc_feature (1)..(374): NCBI GI NO: 15224782 NR Description: nucleosome assembly protein -related
  misc_feature (1)..(374): NCBI GI NO: 7488816 NR Description: nucleosome assembly protein 1 - garden pea
  misc_feature (1)..(374): NCBI GI NO: 2129840 NR Description: nucleosome assembly protein 1 - soybean
  misc_feature (1)..(374): NCBI GI NO: 29569109 NR Description: nucleosome/chromatin assembly factor group A
  misc_feature (1)..(357): NCBI GI NO: 21898560 NR Description: nucleosome/chromatin assembly factor group A
  misc_feature (44)..(321): NCBI GI NO: 15231361 NR Description: nucleosome assembly protein -related
MSNDKDSFNVSDLTSALKDEDRAGLVNALKNKLQNLAGQHSDVLENLTPKIRRRVEVLREIQGKHDEIETKFREERAALEAKYQKLYQPLYNKRYEIVNGATEVEGAPEDAKMDQGDEKTAEEKGVPSFWLTALKNNDVISEEITERDEGALIYLKDIKWCKIEEPKGFKLEFFFDQNPYFKNTLLTKAYHMIDEDEPLLEKAIGTEIDWYPGKCLTQKILKKKPKKGAKNAKPITKTEDCESFFNFFNPPQVPDDDEDIDEERAEELQNLMEQDYDIGSTIREKIIPHAVSWFTGEAIEGEEFEIDNDDEDDIDEDEDEDEEDEDEDEEEDDEDEEEEVSKTKKKPSVLHKKGGRPQVTDDQQGERPPECKQQ

SEQ ID NO: 2987 - protein, 262 aa, Arabidopsis thaliana
  peptide (1)..(262): Ceres Seq. ID no. 13648205
  misc_feature (1)..(188): Pfam Name: NAP Pfam Description: Nucleosome assembly protein
  misc_feature (1)..(262): NCBI GI NO: 18423918 NR Description: nucleosome assembly protein [Arabidopsis thaliana]
  misc_feature (1)..(262): NCBI GI NO: 8777435 NR Description: nucleosome assembly protein [Arabidopsis thaliana]
  misc_feature (1)..(262): NCBI GI NO: 549975 NR Description: nucleosome assembly protein I-like protein
  misc_feature (1)..(262): NCBI GI NO: 15236115 NR Description: nucleosome assembly protein I-related protein
  misc_feature (1)..(262): NCBI GI NO: 15224782 NR Description: nucleosome assembly protein -related
  misc_feature (1)..(262): NCBI GI NO: 7488816 NR Description: nucleosome assembly protein 1 - garden pea
  misc_feature (1)..(262): NCBI GI NO: 2129840 NR Description: nucleosome assembly protein 1 - soybean
  misc_feature (1)..(262): NCBI GI NO: 29569109 NR Description: nucleosome/chromatin assembly factor group A
  misc_feature (1)..(245): NCBI GI NO: 21898560 NR Description: nucleosome/chromatin assembly factor group A
  misc_feature (1)..(209): NCBI GI NO: 15231361 NR Description: nucleosome assembly protein -related
MDQGDEKTAEEKGVPSFWLTALKNNDVISEEITERDEGALIYLKDIKWCKIEEPKGFKLEFFFDQNPYFKNTLLTKAYHMIDEDEPLLEKAIGTEIDWYPGKCLTQKILKKKPKKGAKNAKPITKTEDCESFFNFFNPPQVPDDDEDIDEERAEELQNLMEQDYDIGSTIREKIIPHAVSWFTGEAIEGEEFEIDNDDEDDIDEDEDEDEEDEDEDEEEDDEDEEEEVSKTKKKPSVLHKKGGRPQVTDDQQGERPPECKQQ

SEQ ID NO: 2988 - DNA, 768 bp, Arabidopsis thaliana
  misc_feature (1)..(768): Ceres Seq. ID no. 12394158
aaaaaaaccctagttttttgctctctcgaagttccgtgcgactctctgctcgagcaagatctcctaccgatacaatgattatctcagaggctaaccgcaaagaaatctgcaagtacctcttcaaagaaggagtttgctttgcgaagaaggatttcaatcttgctaagcatccgttgatcgatgtcccgaacctacaagtgattaagcttatgcagagtttcaaatccaaggagtatgttagagagacatttgcctggatgcattactattggtttttgaccaatgaagggatcgagttcttgagaacttatcttaatcttccatctgatgttgttcctgctactttgaagaagtcagctaagcctggtggtcgtccatttggtggcccacctggtgatcgctcaagaggacctcgccatgaaggaggagaccgtcccaggtttggtgaccgtgatgggtaccgtgcaggtcctcgagctggtggtgagtttggaggtgaaaagggtggagctcctgcagattaccagccatctttccaaggaagtgggcgtggttttggccgtggtgctggtggctacagcgcagctgcaccatctggttcaggtttgccttgaaaaagaaatgtctttaggtgacagtaagaccatggaggagttttcagctttaaattttgcttttgtaattcagattccggaatccttcataatctctatctgagtttagttttgttgttgaatcaaacatccgatttaaagttatgttcattcc

SEQ ID NO: 2989 - protein, 203 aa, Arabidopsis thaliana
  peptide (1)..(203): Ceres Seq. ID no. 12394159
  misc_feature (27)..(122): Pfam Name: Pfam Description:  Plectin/S10 domain
  misc_feature (25)..(203): NCBI GI NO: 15237217 NR Description: putative protein; protein id: At5g52650
  misc_feature (25)..(203): NCBI GI NO: 20139798 NR Description: 40S ribosomal protein S10-3
  misc_feature (25)..(203): NCBI GI NO: 15235985 NR Description: putative ribosomal protein S10
  misc_feature (25)..(202): NCBI GI NO: 34897532 NR Description: OSJNBa0042L16.3
  misc_feature (25)..(198): NCBI GI NO: 34905824 NR Description: putative ribosomal protein S10
  misc_feature (25)..(202): NCBI GI NO: 20140213 NR Description: 40S ribosomal protein S10
  misc_feature (25)..(203): NCBI GI NO: 15238099 NR Description: putative protein; protein id: At5g41520
  misc_feature (25)..(197): NCBI GI NO: 40642980 NR Description: ribosomal protein S10 [Crassostrea gigas]
  misc_feature (25)..(190): NCBI GI NO: 24266976 NR Description: ribosomal protein S10 [Branchiostoma belcheri]
  misc_feature (25)..(190): NCBI GI NO: 28200289 NR Description: ribosomal protein S10
KNPSFLLSRSSVRLSARARSPTDTMIISEANRKEICKYLFKEGVCFAKKDFNLAKHPLIDVPNLQVIKLMQSFKSKEYVRETFAWMHYYWFLTNEGIEFLRTYLNLPSDVVPATLKKSAKPGGRPFGGPPGDRSRGPRHEGGDRPRFGDRDGYRAGPRAGGEFGGEKGGAPADYQPSFQGSGRGFGRGAGGYSAAAPSGSGLP

SEQ ID NO: 2990 - protein, 179 aa, Arabidopsis thaliana
  peptide (1)..(179): Ceres Seq. ID no. 12394160
  misc_feature (3)..(98): Pfam Name: Pfam Description:  Plectin/S10 domain
  misc_feature (1)..(179): NCBI GI NO: 15237217 NR Description: putative protein; protein id: At5g52650
  misc_feature (1)..(179): NCBI GI NO: 20139798 NR Description: 40S ribosomal protein S10-3
  misc_feature (1)..(179): NCBI GI NO: 15235985 NR Description: putative ribosomal protein S10
  misc_feature (1)..(178): NCBI GI NO: 34897532 NR Description: OSJNBa0042L16.3
  misc_feature (1)..(174): NCBI GI NO: 34905824 NR Description: putative ribosomal protein S10
  misc_feature (1)..(178): NCBI GI NO: 20140213 NR Description: 40S ribosomal protein S10
  misc_feature (1)..(179): NCBI GI NO: 15238099 NR Description: putative protein; protein id: At5g41520
  misc_feature (1)..(173): NCBI GI NO: 40642980 NR Description: ribosomal protein S10 [Crassostrea gigas]
  misc_feature (1)..(166): NCBI GI NO: 24266976 NR Description: ribosomal protein S10 [Branchiostoma belcheri]
  misc_feature (1)..(166): NCBI GI NO: 28200289 NR Description: ribosomal protein S10
MIISEANRKEICKYLFKEGVCFAKKDFNLAKHPLIDVPNLQVIKLMQSFKSKEYVRETFAWMHYYWFLTNEGIEFLRTYLNLPSDVVPATLKKSAKPGGRPFGGPPGDRSRGPRHEGGDRPRFGDRDGYRAGPRAGGEFGGEKGGAPADYQPSFQGSGRGFGRGAGGYSAAAPSGSGLP

SEQ ID NO: 2991 - protein, 134 aa, Arabidopsis thaliana
  peptide (1)..(134): Ceres Seq. ID no. 12394161
  misc_feature (1)..(53): Pfam Name: Pfam Description:  Plectin/S10 domain
  misc_feature (1)..(134): NCBI GI NO: 15237217 NR Description: putative protein; protein id: At5g52650
  misc_feature (1)..(134): NCBI GI NO: 20139798 NR Description: 40S ribosomal protein S10-3
  misc_feature (1)..(134): NCBI GI NO: 15235985 NR Description: putative ribosomal protein S10
  misc_feature (1)..(133): NCBI GI NO: 34897532 NR Description: OSJNBa0042L16.3
  misc_feature (1)..(129): NCBI GI NO: 34905824 NR Description: putative ribosomal protein S10
  misc_feature (1)..(133): NCBI GI NO: 20140213 NR Description: 40S ribosomal protein S10
  misc_feature (1)..(134): NCBI GI NO: 15238099 NR Description: putative protein; protein id: At5g41520
  misc_feature (1)..(128): NCBI GI NO: 40642980 NR Description: ribosomal protein S10 [Crassostrea gigas]
  misc_feature (1)..(121): NCBI GI NO: 24266976 NR Description: ribosomal protein S10 [Branchiostoma belcheri]
  misc_feature (1)..(121): NCBI GI NO: 28200289 NR Description: ribosomal protein S10
MQSFKSKEYVRETFAWMHYYWFLTNEGIEFLRTYLNLPSDVVPATLKKSAKPGGRPFGGPPGDRSRGPRHEGGDRPRFGDRDGYRAGPRAGGEFGGEKGGAPADYQPSFQGSGRGFGRGAGGYSAAAPSGSGLP

SEQ ID NO: 2992 - DNA, 2393 bp, Arabidopsis thaliana
  misc_feature (1)..(2393): Ceres Seq. ID no. 13497068
catcgctgtctggaacagcgatgactcgagaaccggcagaagtatgaagaagactaagacttaccaagtcttctgtattgctgcactctctgtcctaactctgcagcttatcaatggttcatcagcagcaacacctccacctccaaatagtaattcttcaacttcttgtaacagagcctgtggaggagtctcaattccgttcccgttcggaatcgggaaggattgttatctcaatggctggtatgaggttatctgcaacacttccacttccgggtcgtctggcacaacggttccgttcctctcacggatcaatagcgaagtggtgaacatctctcttccagatggtaagaaactatatggagtagttcacatcaaaggtccagtgacatcgttgggttgctctagtagtagtagtagcagtcaagtatccgaaatgtcattgccgaatttgaacgtcacaggcaggggaagtccatatttcctcactgatgagaactgcctcgtgatggttggttgtggtacaaaggctttgatgaaggatatagaatcagagatcttgggttgtgaatcgagctgtgaagatagcaagagtagtgaagaagtaacaaactcgaaatgtgacggttacaaatgctgccaggcgagaataccgttggagcgtcctcaggttattggtatcaatatagaaaacactagtgccacaagagggaaagaagggtgtagtgttgcgttcttgactaacaaaaggtatgcgccgatgaatgttaccgagccagaacaattccatgctggtggctacgcagtggttgagctaggttggtactttgatacatcggattcacgctataggaaccccttaggttgtagaaacatgacgcggtacagttcttacagctcctttgataaatgtagttgtgagtatgattacttttctgggatgagttataggatttgctattgcaactatggctacacagggaacccataccttcgacatggctgcatagacatagacgaatgtgaaggacaccacaattgtggagaagggacttgtgtgaacatgcctggaacacatagctgcgagcccaagataacgaaaccggaaaaagcctctgtgcttcaaggtgttcttataagtctaggagtgctgcttttcgtccttggaatcttggggttgtacaaattcattaagaagcgaacgaggatcatccgcaacaaaaactttttcaaacgtaatggtggcttgctgttgaaacaacaactaattacaaagaacggaaatgttgatatgtcaaggatatttagctcaaaagagttgaagaaagctactgataacttcagcatgaacagggtgcttgggcaagggggtcaaggaactgtgtacaagggaatgttggcggaagggagaatcgttgcggttaaaagatcgaaagttgtgggtgaaggcaagatggaagagttcatcaatgaagtcgtacttctctcacaaattaaccataggaacattgtgaaactcttgggatgttgtctagagactgaagttcctgtcttggtttacgaatatattcctaatggagatctgttcaagcgtcttcatgaaaaatctgaatccaatgattacacgatgacttgggaagtacgtcttcgtatagctatagagatagcgggagctctttcatacatgcactcagctgcatcgattccaatataccacagagatatcaagactaccaatatactattagatgaaaaatatagagccaaagtatctgatttcggaacttcaagatccataaccattgctcaaactcatctaacaacgttagttgcaggcacttttgggtatatggatccggagtactttttatcaagccaatatactgacaagagcgatgtttacagtttcggggtggtcttggtggagctcataaccggagaaaaaccactgtcaaggaagaggattggcaactgatttccttgaggccatgaaagagaacagagtgattgacacaattgatattcggatcaaaggagaaagcaagctgtgccaagtgatggcagtcgcaaaactcgctcgaaagtgtcttagcaggaaagggagaaagcggccaaacatgagagaggtttcatttgagctggagaggatccgttcttcatcacctgaagatttagaggtccatgttagaaatgttgatgcagaggaacaaatcatggaaatcaacagagaacgattttgagggtatgtacatgagtgacaagatccattctttatgttaaactagaagttgcccacaaatatgcctttaattgctttcaaaatacgaattaaatacgatgataacttgtagttaaagtctcaacttgatatgtttatagataataaaattttagtg

SEQ ID NO: 2993 - protein, 656 aa, Arabidopsis thaliana
  peptide (1)..(656): Ceres Seq. ID no. 13497069
  misc_feature (37)..(653): NCBI GI NO: 15219143 NR Description: WAK-like kinase (WLK) [Arabidopsis thaliana]
  misc_feature (17)..(653): NCBI GI NO: 15219132 NR Description: WAK-like kinase (WLK) [Arabidopsis thaliana]
  misc_feature (103)..(653): NCBI GI NO: 15219137 NR Description: WAK-like kinase (WLK) [Arabidopsis thaliana]
  misc_feature (19)..(653): NCBI GI NO: 15219445 NR Description: WAK-like kinase (WLK) [Arabidopsis thaliana]
  misc_feature (17)..(653): NCBI GI NO: 15219134 NR Description: WAK-like kinase (WLK) [Arabidopsis thaliana]
  misc_feature (15)..(390): NCBI GI NO: 15219140 NR Description: WAK-like kinase (WLK) [Arabidopsis thaliana]
  misc_feature (376)..(651): NCBI GI NO: 15219140 NR Description: WAK-like kinase (WLK) [Arabidopsis thaliana]
  misc_feature (212)..(653): NCBI GI NO: 30699443 NR Description: WAK-like kinase (WLK) [Arabidopsis thaliana]
  misc_feature (19)..(175): NCBI GI NO: 30699443 NR Description: WAK-like kinase (WLK) [Arabidopsis thaliana]
  misc_feature (60)..(649): NCBI GI NO: 25287654 NR Description: protein F18O14.11
IAVWNSDDSRTGRSMKKTKTYQVFCIAALSVLTLQLINGSSAATPPPPNSNSSTSCNRACGGVSIPFPFGIGKDCYLNGWYEVICNTSTSGSSGTTVPFLSRINSEVVNISLPDGKKLYGVVHIKGPVTSLGCSSSSSSSQVSEMSLPNLNVTGRGSPYFLTDENCLVMVGCGTKALMKDIESEILGCESSCEDSKSSEEVTNSKCDGYKCCQARIPLERPQVIGINIENTSATRGKEGCSVAFLTNKRYAPMNVTEPEQFHAGGYAVVELGWYFDTSDSRYRNPLGCRNMTRYSSYSSFDKCSCEYDYFSGMSYRICYCNYGYTGNPYLRHGCIDIDECEGHHNCGEGTCVNMPGTHSCEPKITKPEKASVLQGVLISLGVLLFVLGILGLYKFIKKRTRIIRNKNFFKRNGGLLLKQQLITKNGNVDMSRIFSSKELKKATDNFSMNRVLGQGGQGTVYKGMLAEGRIVAVKRSKVVGEGKMEEFINEVVLLSQINHRNIVKLLGCCLETEVPVLVYEYIPNGDLFKRLHEKSESNDYTMTWEVRLRIAIEIAGALSYMHSAASIPIYHRDIKTTNILLDEKYRAKVSDFGTSRSITIAQTHLTTLVAGTFGYMDPEYFLSSQYTDKSDVYSFGVVLVELITGEKPLSRKRIGN

SEQ ID NO: 2994 - protein, 642 aa, Arabidopsis thaliana
  peptide (1)..(642): Ceres Seq. ID no. 13497070
  misc_feature (23)..(639): NCBI GI NO: 15219143 NR Description: WAK-like kinase (WLK) [Arabidopsis thaliana]
  misc_feature (3)..(639): NCBI GI NO: 15219132 NR Description: WAK-like kinase (WLK) [Arabidopsis thaliana]
  misc_feature (89)..(639): NCBI GI NO: 15219137 NR Description: WAK-like kinase (WLK) [Arabidopsis thaliana]
  misc_feature (5)..(639): NCBI GI NO: 15219445 NR Description: WAK-like kinase (WLK) [Arabidopsis thaliana]
  misc_feature (3)..(639): NCBI GI NO: 15219134 NR Description: WAK-like kinase (WLK) [Arabidopsis thaliana]
  misc_feature (1)..(376): NCBI GI NO: 15219140 NR Description: WAK-like kinase (WLK) [Arabidopsis thaliana]
  misc_feature (362)..(637): NCBI GI NO: 15219140 NR Description: WAK-like kinase (WLK) [Arabidopsis thaliana]
  misc_feature (198)..(639): NCBI GI NO: 30699443 NR Description: WAK-like kinase (WLK) [Arabidopsis thaliana]
  misc_feature (5)..(161): NCBI GI NO: 30699443 NR Description: WAK-like kinase (WLK) [Arabidopsis thaliana]
  misc_feature (46)..(635): NCBI GI NO: 25287654 NR Description: protein F18O14.11
MKKTKTYQVFCIAALSVLTLQLINGSSAATPPPPNSNSSTSCNRACGGVSIPFPFGIGKDCYLNGWYEVICNTSTSGSSGTTVPFLSRINSEVVNISLPDGKKLYGVVHIKGPVTSLGCSSSSSSSQVSEMSLPNLNVTGRGSPYFLTDENCLVMVGCGTKALMKDIESEILGCESSCEDSKSSEEVTNSKCDGYKCCQARIPLERPQVIGINIENTSATRGKEGCSVAFLTNKRYAPMNVTEPEQFHAGGYAVVELGWYFDTSDSRYRNPLGCRNMTRYSSYSSFDKCSCEYDYFSGMSYRICYCNYGYTGNPYLRHGCIDIDECEGHHNCGEGTCVNMPGTHSCEPKITKPEKASVLQGVLISLGVLLFVLGILGLYKFIKKRTRIIRNKNFFKRNGGLLLKQQLITKNGNVDMSRIFSSKELKKATDNFSMNRVLGQGGQGTVYKGMLAEGRIVAVKRSKVVGEGKMEEFINEVVLLSQINHRNIVKLLGCCLETEVPVLVYEYIPNGDLFKRLHEKSESNDYTMTWEVRLRIAIEIAGALSYMHSAASIPIYHRDIKTTNILLDEKYRAKVSDFGTSRSITIAQTHLTTLVAGTFGYMDPEYFLSSQYTDKSDVYSFGVVLVELITGEKPLSRKRIGN

SEQ ID NO: 2995 - protein, 512 aa, Arabidopsis thaliana
  peptide (1)..(512): Ceres Seq. ID no. 13497071
  misc_feature (1)..(509): NCBI GI NO: 15219143 NR Description: WAK-like kinase (WLK) [Arabidopsis thaliana]
  misc_feature (1)..(509): NCBI GI NO: 15219132 NR Description: WAK-like kinase (WLK) [Arabidopsis thaliana]
  misc_feature (1)..(509): NCBI GI NO: 15219137 NR Description: WAK-like kinase (WLK) [Arabidopsis thaliana]
  misc_feature (1)..(509): NCBI GI NO: 15219445 NR Description: WAK-like kinase (WLK) [Arabidopsis thaliana]
  misc_feature (1)..(509): NCBI GI NO: 15219134 NR Description: WAK-like kinase (WLK) [Arabidopsis thaliana]
  misc_feature (1)..(246): NCBI GI NO: 15219140 NR Description: WAK-like kinase (WLK) [Arabidopsis thaliana]
  misc_feature (232)..(507): NCBI GI NO: 15219140 NR Description: WAK-like kinase (WLK) [Arabidopsis thaliana]
  misc_feature (68)..(509): NCBI GI NO: 30699443 NR Description: WAK-like kinase (WLK) [Arabidopsis thaliana]
  misc_feature (1)..(31): NCBI GI NO: 30699443 NR Description: WAK-like kinase (WLK) [Arabidopsis thaliana]
  misc_feature (1)..(505): NCBI GI NO: 25287654 NR Description: protein F18O14.11
MSLPNLNVTGRGSPYFLTDENCLVMVGCGTKALMKDIESEILGCESSCEDSKSSEEVTNSKCDGYKCCQARIPLERPQVIGINIENTSATRGKEGCSVAFLTNKRYAPMNVTEPEQFHAGGYAVVELGWYFDTSDSRYRNPLGCRNMTRYSSYSSFDKCSCEYDYFSGMSYRICYCNYGYTGNPYLRHGCIDIDECEGHHNCGEGTCVNMPGTHSCEPKITKPEKASVLQGVLISLGVLLFVLGILGLYKFIKKRTRIIRNKNFFKRNGGLLLKQQLITKNGNVDMSRIFSSKELKKATDNFSMNRVLGQGGQGTVYKGMLAEGRIVAVKRSKVVGEGKMEEFINEVVLLSQINHRNIVKLLGCCLETEVPVLVYEYIPNGDLFKRLHEKSESNDYTMTWEVRLRIAIEIAGALSYMHSAASIPIYHRDIKTTNILLDEKYRAKVSDFGTSRSITIAQTHLTTLVAGTFGYMDPEYFLSSQYTDKSDVYSFGVVLVELITGEKPLSRKRIGN

SEQ ID NO: 2996 - DNA, 672 bp, Arabidopsis thaliana
  misc_feature (1)..(672): Ceres Seq. ID no. 12326318
atcaaaataaaaggaaaaaaaaaaaaaatctttgagatgagacttgttctctctggtgcctcttctttcacctccaaccttttttgttcctcccaacaggtcaatggaagaggaaaagaactgaaaaacccaatttctctaaaccacaacaaagatttggactttctgttaaagaagttagctccgccactcacggcggttttacttgctgtttcacccatctgtttccctccagaatctcttgggcagactttggatatacagagaggagctacattgtttaatagagcttgtatcgggtgtcatgatacaggtggaaacattattcaaccgggtgcaacgcttttcacaaaagacctcgaaagaaatggagttgatactgaggaagaaatatatcgtgttacctactttggaaagggaagaatgccgggatttggtgagaaatgcacaccgagaggacaatgtacctttggaccgcggttgcaggacgaagaaatcaagcttctcgctgaatttgtaaagtttcaagctgaccaaggctggccaactgtatctaccgactagcaactaggcgttcgtcttgtgagcgtttttgtaatccaattaatccatagggttgtatctacttacacttataactattccttctgggaggtttcattgcaattgctc

SEQ ID NO: 2997 - protein, 187 aa, Arabidopsis thaliana
  peptide (1)..(187): Ceres Seq. ID no. 12326319
  misc_feature (13)..(187): NCBI GI NO: 18422509 NR Description: expressed protein; protein id: At5g45040
  misc_feature (79)..(187): NCBI GI NO: 10177496 NR Description: gene_id:K21C13.23~unknown protein
  misc_feature (58)..(187): NCBI GI NO: 34899810 NR Description: putative c6 type cytochrome
  misc_feature (118)..(187): NCBI GI NO: 34393286 NR Description: cytochrome C6, chloroplast precursor-like protein
  misc_feature (56)..(145): NCBI GI NO: 33862735 NR Description: Cytochrome c, class IC:Cytochrome c, class I
  misc_feature (67)..(181): NCBI GI NO: 37521549 NR Description: cytochrome c6 [Gloeobacter violaceus]
  misc_feature (86)..(181): NCBI GI NO: 117923 NR Description: Cytochrome C6
  misc_feature (67)..(181): NCBI GI NO: 22652035 NR Description: putative cytochrome c6-2
  misc_feature (57)..(181): NCBI GI NO: 20141074 NR Description: Cytochrome C6 precursor
  misc_feature (57)..(181): NCBI GI NO: 23040173 NR Description: hypothetical protein
IKIKGKKKKIFEMRLVLSGASSFTSNLFCSSQQVNGRGKELKNPISLNHNKDLDFLLKKLAPPLTAVLLAVSPICFPPESLGQTLDIQRGATLFNRACIGCHDTGGNIIQPGATLFTKDLERNGVDTEEEIYRVTYFGKGRMPGFGEKCTPRGQCTFGPRLQDEEIKLLAEFVKFQADQGWPTVSTD

SEQ ID NO: 2998 - protein, 175 aa, Arabidopsis thaliana
  peptide (1)..(175): Ceres Seq. ID no. 12326320
  misc_feature (1)..(175): NCBI GI NO: 18422509 NR Description: expressed protein; protein id: At5g45040
  misc_feature (67)..(175): NCBI GI NO: 10177496 NR Description: gene_id:K21C13.23~unknown protein
  misc_feature (46)..(175): NCBI GI NO: 34899810 NR Description: putative c6 type cytochrome
  misc_feature (106)..(175): NCBI GI NO: 34393286 NR Description: cytochrome C6, chloroplast precursor-like protein
  misc_feature (44)..(133): NCBI GI NO: 33862735 NR Description: Cytochrome c, class IC:Cytochrome c, class I
  misc_feature (55)..(169): NCBI GI NO: 37521549 NR Description: cytochrome c6 [Gloeobacter violaceus]
  misc_feature (74)..(169): NCBI GI NO: 117923 NR Description: Cytochrome C6
  misc_feature (55)..(169): NCBI GI NO: 22652035 NR Description: putative cytochrome c6-2
  misc_feature (45)..(169): NCBI GI NO: 20141074 NR Description: Cytochrome C6 precursor
  misc_feature (45)..(169): NCBI GI NO: 23040173 NR Description: hypothetical protein
MRLVLSGASSFTSNLFCSSQQVNGRGKELKNPISLNHNKDLDFLLKKLAPPLTAVLLAVSPICFPPESLGQTLDIQRGATLFNRACIGCHDTGGNIIQPGATLFTKDLERNGVDTEEEIYRVTYFGKGRMPGFGEKCTPRGQCTFGPRLQDEEIKLLAEFVKFQADQGWPTVSTD

SEQ ID NO: 2999 - DNA, 1704 bp, Arabidopsis thaliana
  misc_feature (1)..(1704): Ceres Seq. ID no. 12321264
aaaaacttcaccaaccccatttttaagcccctttctttgtttttatcctccgatcgatcaaaccaagaaaaaacactttcgtatttccctcgacgaaaaaaatggcaaccatttcgaatctcgctaatcttccccgcgccacctgcgtcgactccaaatcttcttcctcttcctccgtcttacctagatccttcgtcaatttccgcgctttgaatgcaaagctttcctcttctcagctttctcttcgttataaccaacgatcaataccttccctctctgtgaggtgttcagtgtctggtggaaatggaactgctggaaagagaacgactcttcatgatctatatgagaaggaaggtcagagtccttggtatgataatctttgccgtccagtcacagatcttctcccgttgattgctcgtggtgttagaggtgttactagcaaccctgcgatcttccaaaaagccatttccacttcaaatgcttataatgatcaattcaggacacttgtggaatcgggaaaggacattgaaagtgcgtattgggaacttgtggtgaaggatattcaggatgcctgcaaactttttgagccaatctatgaccagacagaaggtgcggatggctatgtctctgttgaagtttcacctaggcttgctgatgatacccaaggaactgttgaagctgctaaatatcttagcaaggttgtcaaccgtcgtaatgtctacattaagattcctgctactgctccatgcattccttccatcagggatgtcattgcagctggaataagtgtcaatgtcacgcttatattctcaatcgccagatatgaagcagtgatcgatgcatatttggatggcctcgaggcgtctggacttgatgacctctcaagagttaccagtgttgcttccttctttgtcagtcgggtggatactctcatggacaagatgcttgagcaaattggtacccctgaagccttagatctccgtgggaaggcggctgtggctcaagctgcattagcatacaagctataccagcagaaattctctggcccaagatgggaagctctggtaaagaaaggtgccaagaaacagagacttctctgggcatcaacaagtgtaaagaacccagcttactctgacaccttatatgtcgctcctctcatcggacctgacactgtatcaaccatgccggatcaagccctggaagcattcgcagatcatggaatagtgaagaggacaatagatgcgaatgtgtcagaagcagaagggatttacagtgcactagagaagctgggaatagactggaacaaagtaggagaacagttggaagacgaaggagtagattccttcaagaagagtttcgagagtctgctcggtacactgcaagacaaggccaacactctcaaactagccagccattgaggaaatgagtcatcattatgtttttggttacgctaaaataaaaagaagaacctttggcttttgttcttcaatccttatgcatgctttctaaagtggttatgatggattttgcttgatgttccacattatgggttattctattttctttgttcttgtaagatgatgcttcagaagagtttgttactttttaccgtatttgtaatttacattttcactgaaaacaattggcgagtaaaaaagtgtccttgtcttcttctttgttcggattatatgaacaattgttcct

SEQ ID NO: 3000 - protein, 438 aa, Arabidopsis thaliana
  peptide (1)..(438): Ceres Seq. ID no. 12321265
  misc_feature (87)..(426): Pfam Name: Pfam Description:  Transaldolase
  misc_feature (1)..(438): NCBI GI NO: 15240625 NR Description: transaldolase - like protein
  misc_feature (1)..(437): NCBI GI NO: 7489279 NR Description: transaldolase (EC 2.2.1.2) - potato
  misc_feature (1)..(437): NCBI GI NO: 10441272 NR Description: transaldolase [Lycopersicon esculentum]
  misc_feature (1)..(437): NCBI GI NO: 32481059 NR Description: transaldolase [Lycopersicon esculentum]
  misc_feature (117)..(434): NCBI GI NO: 34907042 NR Description: putative transaldolase
  misc_feature (59)..(117): NCBI GI NO: 34907042 NR Description: putative transaldolase
  misc_feature (83)..(433): NCBI GI NO: 29832856 NR Description: putative transaldolase
  misc_feature (84)..(433): NCBI GI NO: 21220422 NR Description: putative transaldolase
  misc_feature (84)..(423): NCBI GI NO: 29828309 NR Description: putative transaldolase
  misc_feature (77)..(433): NCBI GI NO: 37522946 NR Description: transaldolase [Gloeobacter violaceus]
MATISNLANLPRATCVDSKSSSSSSVLPRSFVNFRALNAKLSSSQLSLRYNQRSIPSLSVRCSVSGGNGTAGKRTTLHDLYEKEGQSPWYDNLCRPVTDLLPLIARGVRGVTSNPAIFQKAISTSNAYNDQFRTLVESGKDIESAYWELVVKDIQDACKLFEPIYDQTEGADGYVSVEVSPRLADDTQGTVEAAKYLSKVVNRRNVYIKIPATAPCIPSIRDVIAAGISVNVTLIFSIARYEAVIDAYLDGLEASGLDDLSRVTSVASFFVSRVDTLMDKMLEQIGTPEALDLRGKAAVAQAALAYKLYQQKFSGPRWEALVKKGAKKQRLLWASTSVKNPAYSDTLYVAPLIGPDTVSTMPDQALEAFADHGIVKRTIDANVSEAEGIYSALEKLGIDWNKVGEQLEDEGVDSFKKSFESLLGTLQDKANTLKLASH

SEQ ID NO: 3001 - DNA, 766 bp, Arabidopsis thaliana
  misc_feature (1)..(766): Ceres Seq. ID no. 12370152
atggccggtgaacaaaaaaaaaaaaaaaaaagccaaaggagcattggtatctcaaacaatatttgccctttctctatctctctctcatcactatttgccatctctttctctctccctctctttcaaatgtcaataaaccaatactcaagcgatttccactaccattctctcatgtggcaacaacagcagcaacaacaacaacaccaaaacgacgtcgtggaagaaaaagaagctcttttcgagaaacccttaaccccaagtgacgtcggaaaactcaaccgcctcgtcatcccaaaacagcacgccgagagatacttcccactagcggccgccgccgcagacgccgtggagaaaggacttctcctctgctttgaggacgaggaaggtaaaccatggagattcagatactcgtactggaacagtagccagagttatgtcttgaccaaaggctggagcagatacgtcaaggagaagcaccttgacgccggagacgtcgttctcttccatcgacaccgttcagacggcggaagattcttcattggctggagaagacgcggtgactcttcttcctcctccgactcttatcgccatgttcaatccaatgcctcgctccaatattatcctcatgcaggtaccctttttatttaattaaacttttttttgtgtcataaccaaaaaaatttgaacctaaattcagattaatcttgaacaaaaaatgtcgaatatctttgacatttaaaggtgtagtgaaacacaatagtttttc

SEQ ID NO: 3002 - protein, 215 aa, Arabidopsis thaliana
  peptide (1)..(215): Ceres Seq. ID no. 12370153
  misc_feature (79)..(188): Pfam Name: Pfam Description:  B3 DNA binding domain
  misc_feature (43)..(215): NCBI GI NO: 30686674 NR Description: DNA-binding protein, putative
  misc_feature (43)..(211): NCBI GI NO: 30686669 NR Description: DNA-binding protein, putative
  misc_feature (58)..(215): NCBI GI NO: 25408446 NR Description: probable RAV2-like DNA binding protein
  misc_feature (43)..(210): NCBI GI NO: 15239984 NR Description: putative protein; protein id: At5g06250.1
  misc_feature (53)..(191): NCBI GI NO: 30681787 NR Description: DNA-binding protein, putative
  misc_feature (53)..(191): NCBI GI NO: 30681791 NR Description: DNA-binding protein, putative
  misc_feature (75)..(187): NCBI GI NO: 34902226 NR Description: Putative RAV-like B3 domain DNA binding protein
  misc_feature (71)..(187): NCBI GI NO: 32492293 NR Description: OSJNBa0088A01.1
  misc_feature (58)..(185): NCBI GI NO: 15228649 NR Description: RAV-like protein; protein id: At3g61970
  misc_feature (58)..(185): NCBI GI NO: 26450371 NR Description: putative RAV [Arabidopsis thaliana]
MAGEQKKKKKSQRSIGISNNICPFSISLSSLFAISFSLPLFQMSINQYSSDFHYHSLMWQQQQQQQQHQNDVVEEKEALFEKPLTPSDVGKLNRLVIPKQHAERYFPLAAAAADAVEKGLLLCFEDEEGKPWRFRYSYWNSSQSYVLTKGWSRYVKEKHLDAGDVVLFHRHRSDGGRFFIGWRRRGDSSSSSDSYRHVQSNASLQYYPHAGTLFI

SEQ ID NO: 3003 - protein, 173 aa, Arabidopsis thaliana
  peptide (1)..(173): Ceres Seq. ID no. 12370154
  misc_feature (37)..(146): Pfam Name: Pfam Description:  B3 DNA binding domain
  misc_feature (1)..(173): NCBI GI NO: 30686674 NR Description: DNA-binding protein, putative
  misc_feature (1)..(169): NCBI GI NO: 30686669 NR Description: DNA-binding protein, putative
  misc_feature (16)..(173): NCBI GI NO: 25408446 NR Description: probable RAV2-like DNA binding protein
  misc_feature (1)..(168): NCBI GI NO: 15239984 NR Description: putative protein; protein id: At5g06250.1
  misc_feature (11)..(149): NCBI GI NO: 30681787 NR Description: DNA-binding protein, putative
  misc_feature (11)..(149): NCBI GI NO: 30681791 NR Description: DNA-binding protein, putative
  misc_feature (33)..(145): NCBI GI NO: 34902226 NR Description: Putative RAV-like B3 domain DNA binding protein
  misc_feature (29)..(145): NCBI GI NO: 32492293 NR Description: OSJNBa0088A01.1
  misc_feature (16)..(143): NCBI GI NO: 15228649 NR Description: RAV-like protein; protein id: At3g61970
  misc_feature (16)..(143): NCBI GI NO: 26450371 NR Description: putative RAV [Arabidopsis thaliana]
MSINQYSSDFHYHSLMWQQQQQQQQHQNDVVEEKEALFEKPLTPSDVGKLNRLVIPKQHAERYFPLAAAAADAVEKGLLLCFEDEEGKPWRFRYSYWNSSQSYVLTKGWSRYVKEKHLDAGDVVLFHRHRSDGGRFFIGWRRRGDSSSSSDSYRHVQSNASLQYYPHAGTLFI

SEQ ID NO: 3004 - protein, 158 aa, Arabidopsis thaliana
  peptide (1)..(158): Ceres Seq. ID no. 12370155
  misc_feature (22)..(131): Pfam Name: Pfam Description:  B3 DNA binding domain
  misc_feature (1)..(158): NCBI GI NO: 30686674 NR Description: DNA-binding protein, putative
  misc_feature (1)..(154): NCBI GI NO: 30686669 NR Description: DNA-binding protein, putative
  misc_feature (1)..(158): NCBI GI NO: 25408446 NR Description: probable RAV2-like DNA binding protein
  misc_feature (1)..(153): NCBI GI NO: 15239984 NR Description: putative protein; protein id: At5g06250.1
  misc_feature (1)..(134): NCBI GI NO: 30681787 NR Description: DNA-binding protein, putative
  misc_feature (1)..(134): NCBI GI NO: 30681791 NR Description: DNA-binding protein, putative
  misc_feature (18)..(130): NCBI GI NO: 34902226 NR Description: Putative RAV-like B3 domain DNA binding protein
  misc_feature (14)..(130): NCBI GI NO: 32492293 NR Description: OSJNBa0088A01.1
  misc_feature (1)..(128): NCBI GI NO: 15228649 NR Description: RAV-like protein; protein id: At3g61970
  misc_feature (1)..(128): NCBI GI NO: 26450371 NR Description: putative RAV [Arabidopsis thaliana]
MWQQQQQQQQHQNDVVEEKEALFEKPLTPSDVGKLNRLVIPKQHAERYFPLAAAAADAVEKGLLLCFEDEEGKPWRFRYSYWNSSQSYVLTKGWSRYVKEKHLDAGDVVLFHRHRSDGGRFFIGWRRRGDSSSSSDSYRHVQSNASLQYYPHAGTLFI

SEQ ID NO: 3005 - DNA, 618 bp, Arabidopsis thaliana
  misc_feature (1)..(618): Ceres Seq. ID no. 13592989
cccactctgtgcattaggtttcattttagcggcagacgagagagctaaagcaaggagcaaccctaaccatggcgactcaaccagctactgaatctgtgcaatgcttcggaaggaagaagaccgcagtggccgtcactcactgcaagcgtggatctggtttgatcaagctcaacggttgcccaatcgagcttttccagcctgagatcctccgattcaagatcttcgagccggttcttctcctcggaaagcaccgtttcgctggtgtgaacatgaggatccgtgtcaacggtggtggtcacacatcccaggtttacgccatccgtcagagtatcgcgaaggctcttgttgcgtactaccagaagtatgtggatgagcagtcgaagaaggagattaaggatatcttggtgaggtatgataggactctgcttgtggcggatccgaggaggtgtgagactctttagattttataatttctgctttattatgcttgttggattatggtgattctccaagaaacttatgttttgttatgtctactattttcttatttttatttcattgtcttgttggtatttactctcaaaaaaaaaaaaaaaaaagcttatcgataccgtcgac

SEQ ID NO: 3006 - protein, 130 aa, Arabidopsis thaliana
  peptide (1)..(130): Ceres Seq. ID no. 13592990
  misc_feature (14)..(128): Pfam Name: Pfam Description:  Ribosomal protein S9/S16
  misc_feature (1)..(128): NCBI GI NO: 15238809 NR Description: 40S ribosomal protein S16 (RPS16C)
  misc_feature (1)..(128): NCBI GI NO: 15226676 NR Description: 40S ribosomal protein S16 (RPS16A)
  misc_feature (1)..(129): NCBI GI NO: 15229252 NR Description: 40S ribosomal protein S16 (RPS16B)
  misc_feature (2)..(128): NCBI GI NO: 6984222 NR Description: 40S ribosomal protein S16 [Euphorbia esula]
  misc_feature (1)..(128): NCBI GI NO: 3122800 NR Description: 40S RIBOSOMAL PROTEIN S16
  misc_feature (4)..(128): NCBI GI NO: 1173209 NR Description: 40S RIBOSOMAL PROTEIN S16
  misc_feature (6)..(128): NCBI GI NO: 17369864 NR Description: 40S ribosomal protein S16
  misc_feature (1)..(129): NCBI GI NO: 39850096 NR Description: Unknown (protein for IMAGE:6887619)
  misc_feature (1)..(129): NCBI GI NO: 4506691 NR Description: ribosomal protein S16; 40S ribosomal protein S16
  misc_feature (1)..(129): NCBI GI NO: 15294045 NR Description: 40S ribosomal protein S16 [Ictalurus punctatus]
MATQPATESVQCFGRKKTAVAVTHCKRGSGLIKLNGCPIELFQPEILRFKIFEPVLLLGKHRFAGVNMRIRVNGGGHTSQVYAIRQSIAKALVAYYQKYVDEQSKKEIKDILVRYDRTLLVADPRRCETL

SEQ ID NO: 3007 - DNA, 798 bp, Arabidopsis thaliana
  misc_feature (1)..(798): Ceres Seq. ID no. 12341925
attgcaaccatttctctgctgtttcttcgtcgtttagcttcagaggacgacaatacgctgtgtgtgtgggtgtgagtttcttaagagaagtcagaaacaatgattgggttgtttaaagtaaaggaaaagcaaagagaacaagctcaaaatgctactagaggaggagcttctgttaagaagcaatctgctggcgaacttcgtcttcacaaagatatatcagagttgaaccttcctagctcttgttcaatatcttttccaaatggcaaagatgatttgatgaactttgaagtatccattaaacctgatgatggatattaccacaatggtacgtttgttttcacattccaagtctctcctgtgtatccacatgaagctccaaaagttaaatgcaaaaccaaggtttatcatcccaatatcgatttggaaggaaacgtttgcctgaacatcttgcgtgaagattggaaacctgttcttaacattaacacagttatctacggactcttccatctgttcacggaacccaattctgaagatcccttgaaccatgatgctgcagcagttttgagggataacccaaagctctttgagaccaatgttcgcagggccatgaccggtggatatgtcggtcagacctttttcccgcgttgtatctaacaaagctctggtttgtcttcttcaaggaaaaagataagaaccaaaccctttgtccgccattgtatttcttctctttctcaaggaccctcgtttgtttgtttgatcttgtaaaattacattccgcgttaaagtaaccctttcctt

SEQ ID NO: 3008 - protein, 184 aa, Arabidopsis thaliana
  peptide (1)..(184): Ceres Seq. ID no. 12341926
  misc_feature (1)..(184): NCBI GI NO: 6635457 NR Description: RUB1 conjugating enzyme [Arabidopsis thaliana]
  misc_feature (1)..(184): NCBI GI NO: 25407764 NR Description: ubiquitin-protein ligase-like protein
  misc_feature (1)..(184): NCBI GI NO: 18398792 NR Description: RUB1-conjugating enzyme, putative
  misc_feature (1)..(184): NCBI GI NO: 26000688 NR Description: RUB1 conjugating enzyme [Olea europaea]
  misc_feature (1)..(183): NCBI GI NO: 37531910 NR Description: putative ubiquitin-conjugating enzyme
  misc_feature (31)..(184): NCBI GI NO: 10946511 NR Description: RUB1 conjugating enzyme [Lycopersicon esculentum]
  misc_feature (1)..(184): NCBI GI NO: 40253382 NR Description: putative RUB1 conjugating enzyme
  misc_feature (1)..(174): NCBI GI NO: 32400752 NR Description: RUB1-conjugating enzyme [Triticum aestivum]
  misc_feature (1)..(184): NCBI GI NO: 4507791 NR Description: ubiquitin-conjugating enzyme E2M
  misc_feature (1)..(184): NCBI GI NO: 30585323 NR Description: Homo sapiens ubiquitin-conjugating enzyme E2M
MIGLFKVKEKQREQAQNATRGGASVKKQSAGELRLHKDISELNLPSSCSISFPNGKDDLMNFEVSIKPDDGYYHNGTFVFTFQVSPVYPHEAPKVKCKTKVYHPNIDLEGNVCLNILREDWKPVLNINTVIYGLFHLFTEPNSEDPLNHDAAAVLRDNPKLFETNVRRAMTGGYVGQTFFPRCI

SEQ ID NO: 3009 - protein, 125 aa, Arabidopsis thaliana
  peptide (1)..(125): Ceres Seq. ID no. 12341927
  misc_feature (1)..(125): NCBI GI NO: 6635457 NR Description: RUB1 conjugating enzyme [Arabidopsis thaliana]
  misc_feature (1)..(125): NCBI GI NO: 25407764 NR Description: ubiquitin-protein ligase-like protein
  misc_feature (1)..(125): NCBI GI NO: 18398792 NR Description: RUB1-conjugating enzyme, putative
  misc_feature (1)..(125): NCBI GI NO: 26000688 NR Description: RUB1 conjugating enzyme [Olea europaea]
  misc_feature (1)..(124): NCBI GI NO: 37531910 NR Description: putative ubiquitin-conjugating enzyme
  misc_feature (1)..(125): NCBI GI NO: 10946511 NR Description: RUB1 conjugating enzyme [Lycopersicon esculentum]
  misc_feature (1)..(125): NCBI GI NO: 40253382 NR Description: putative RUB1 conjugating enzyme
  misc_feature (1)..(115): NCBI GI NO: 32400752 NR Description: RUB1-conjugating enzyme [Triticum aestivum]
  misc_feature (1)..(125): NCBI GI NO: 4507791 NR Description: ubiquitin-conjugating enzyme E2M
  misc_feature (1)..(125): NCBI GI NO: 30585323 NR Description: Homo sapiens ubiquitin-conjugating enzyme E2M
MNFEVSIKPDDGYYHNGTFVFTFQVSPVYPHEAPKVKCKTKVYHPNIDLEGNVCLNILREDWKPVLNINTVIYGLFHLFTEPNSEDPLNHDAAAVLRDNPKLFETNVRRAMTGGYVGQTFFPRCI

SEQ ID NO: 3010 - DNA, 734 bp, Arabidopsis thaliana
  misc_feature (1)..(734): Ceres Seq. ID no. 12326850
aggttggttcctcgtgagagaaagtctttccctctaatttctctagagagacagagagagagagatagctagagatgggtgcttctgcttcggttcccgagagatccgtccatcaattcactgtaaaggatagctccggcaaggacctgaatatgagcatttaccaagggaaagtcctcctcatcgtcaatgttgcttccaaatgcggtttcaccgaaacaaactatacacagctcaccgaactttaccggaaatacaaggaccaagattttgagatcttggcattcccttgcaaccagtttctataccaggagcccggcacaagtcaagaggctcatgaatttgcctgcgaacgctttaaggccgaataccctgttttccaaaaggtacgcgtaaacggtcaaaacgcagcaccaatctataaattccttaaggcaagtaaacccacctttctgggttccagaattaagtggaacttcaccaagttcttggtcggcaaagatggcttagtgattgatcgttatggcacgatggttacaccgctatcaatcgagaaagacatcaagaaagctcttgaagacgcttgaaaacaacagacgagattgccaattaacaatcacggttaattttgtaatgtaaattgcagcttttatgtcgaaatttctttttggacatgtttctctgtttagtgtataaaaaaagaattccttttggaagagtaggttgctgttttc

SEQ ID NO: 3011 - protein, 170 aa, Arabidopsis thaliana
  peptide (1)..(170): Ceres Seq. ID no. 12326851
  misc_feature (11)..(120): Pfam Name: Pfam Description:  Glutathione peroxidase
  misc_feature (1)..(170): NCBI GI NO: 18407538 NR Description: glutathione peroxidase, putative
  misc_feature (1)..(163): NCBI GI NO: 25285637 NR Description: probable glutathione peroxidase
  misc_feature (1)..(167): NCBI GI NO: 15229378 NR Description: glutathione peroxidase, putative
  misc_feature (1)..(169): NCBI GI NO: 11544696 NR Description: putative phospholipid hydroperoxide glutathione peroxidase
  misc_feature (1)..(167): NCBI GI NO: 27544804 NR Description: phospholipid hydroperoxide glutathione peroxidase-like
  misc_feature (1)..(167): NCBI GI NO: 6179600 NR Description: GPX12Hv, glutathione peroxidase-like protein
  misc_feature (1)..(167): NCBI GI NO: 22268405 NR Description: putative glutathione peroxidase [Zea mays]
  misc_feature (1)..(167): NCBI GI NO: 6179604 NR Description: glutathione peroxidase-like protein GPX54Hv
  misc_feature (1)..(167): NCBI GI NO: 34334012 NR Description: cytosolic glutathione peroxidase
  misc_feature (5)..(167): NCBI GI NO: 21360380 NR Description: glutathione peroxidase 1 [Oryza sativa]
MGASASVPERSVHQFTVKDSSGKDLNMSIYQGKVLLIVNVASKCGFTETNYTQLTELYRKYKDQDFEILAFPCNQFLYQEPGTSQEAHEFACERFKAEYPVFQKVRVNGQNAAPIYKFLKASKPTFLGSRIKWNFTKFLVGKDGLVIDRYGTMVTPLSIEKDIKKALEDA

SEQ ID NO: 3012 - protein, 144 aa, Arabidopsis thaliana
  peptide (1)..(144): Ceres Seq. ID no. 12326852
  misc_feature (1)..(94): Pfam Name: Pfam Description:  Glutathione peroxidase
  misc_feature (1)..(144): NCBI GI NO: 18407538 NR Description: glutathione peroxidase, putative
  misc_feature (1)..(137): NCBI GI NO: 25285637 NR Description: probable glutathione peroxidase
  misc_feature (1)..(141): NCBI GI NO: 15229378 NR Description: glutathione peroxidase, putative
  misc_feature (1)..(143): NCBI GI NO: 11544696 NR Description: putative phospholipid hydroperoxide glutathione peroxidase
  misc_feature (1)..(141): NCBI GI NO: 27544804 NR Description: phospholipid hydroperoxide glutathione peroxidase-like
  misc_feature (1)..(141): NCBI GI NO: 6179600 NR Description: GPX12Hv, glutathione peroxidase-like protein
  misc_feature (1)..(141): NCBI GI NO: 22268405 NR Description: putative glutathione peroxidase [Zea mays]
  misc_feature (1)..(141): NCBI GI NO: 6179604 NR Description: glutathione peroxidase-like protein GPX54Hv
  misc_feature (1)..(141): NCBI GI NO: 34334012 NR Description: cytosolic glutathione peroxidase
  misc_feature (1)..(141): NCBI GI NO: 21360380 NR Description: glutathione peroxidase 1 [Oryza sativa]
MSIYQGKVLLIVNVASKCGFTETNYTQLTELYRKYKDQDFEILAFPCNQFLYQEPGTSQEAHEFACERFKAEYPVFQKVRVNGQNAAPIYKFLKASKPTFLGSRIKWNFTKFLVGKDGLVIDRYGTMVTPLSIEKDIKKALEDA

SEQ ID NO: 3013 - DNA, 885 bp, Arabidopsis thaliana; identical to SEQ ID NO: 947
  misc_feature (1)..(885): Ceres Seq. ID no. 13492248

SEQ ID NO: 3014 - protein, 167 aa, Arabidopsis thaliana; identical to SEQ ID NO: 948
  peptide (1)..(167): Ceres Seq. ID no. 13492249
  misc_feature (1)..(167): NCBI GI NO: 18410268 NR Description: ubiquitin-conjugating enzyme 14 (UBC14)
  misc_feature (1)..(166): NCBI GI NO: 19347846 NR Description: putative E2, ubiquitin-conjugating enzyme UBC7
  misc_feature (1)..(166): NCBI GI NO: 28973769 NR Description: putative E2, ubiquitin-conjugating enzyme UBC7
  misc_feature (4)..(166): NCBI GI NO: 31088843 NR Description: Ubiquitin-conjugating enzyme E2 7
  misc_feature (3)..(166): NCBI GI NO: 18408206 NR Description: ubiquitin-conjugating enzyme 13 (UBC13)
  misc_feature (4)..(167): NCBI GI NO: 34908132 NR Description: putative Ubiquitin carrier protein UBC7
  misc_feature (4)..(167): NCBI GI NO: 7437989 NR Description: ubiquitin-conjugating enzyme E2 - maize
  misc_feature (5)..(166): NCBI GI NO: 7437988 NR Description: ubiquitin-conjugating enzyme - maize
  misc_feature (34)..(166): NCBI GI NO: 18424219 NR Description: ubiquitin-conjugating enzyme 7 (UBC7)
  misc_feature (21)..(167): NCBI GI NO: 136647 NR Description: Ubiquitin-conjugating enzyme E2 7

SEQ ID NO: 3015 - protein, 125 aa, Arabidopsis thaliana; identical to SEQ ID NO: 949
  peptide (1)..(125): Ceres Seq. ID no. 13492250
  misc_feature (1)..(125): NCBI GI NO: 18410268 NR Description: ubiquitin-conjugating enzyme 14 (UBC14)
  misc_feature (1)..(124): NCBI GI NO: 19347846 NR Description: putative E2, ubiquitin-conjugating enzyme UBC7
  misc_feature (1)..(124): NCBI GI NO: 28973769 NR Description: putative E2, ubiquitin-conjugating enzyme UBC7
  misc_feature (1)..(124): NCBI GI NO: 31088843 NR Description: Ubiquitin-conjugating enzyme E2 7
  misc_feature (1)..(124): NCBI GI NO: 18408206 NR Description: ubiquitin-conjugating enzyme 13 (UBC13)
  misc_feature (1)..(125): NCBI GI NO: 34908132 NR Description: putative Ubiquitin carrier protein UBC7
  misc_feature (1)..(125): NCBI GI NO: 7437989 NR Description: ubiquitin-conjugating enzyme E2 - maize
  misc_feature (1)..(124): NCBI GI NO: 7437988 NR Description: ubiquitin-conjugating enzyme - maize
  misc_feature (1)..(124): NCBI GI NO: 18424219 NR Description: ubiquitin-conjugating enzyme 7 (UBC7)
  misc_feature (1)..(125): NCBI GI NO: 136647 NR Description: Ubiquitin-conjugating enzyme E2 7

SEQ ID NO: 3016 - protein, 109 aa, Arabidopsis thaliana; identical to SEQ ID NO: 950
  peptide (1)..(109): Ceres Seq. ID no. 13492251
  misc_feature (1)..(109): NCBI GI NO: 18410268 NR Description: ubiquitin-conjugating enzyme 14 (UBC14)
  misc_feature (1)..(108): NCBI GI NO: 19347846 NR Description: putative E2, ubiquitin-conjugating enzyme UBC7
  misc_feature (1)..(108): NCBI GI NO: 28973769 NR Description: putative E2, ubiquitin-conjugating enzyme UBC7
  misc_feature (1)..(108): NCBI GI NO: 31088843 NR Description: Ubiquitin-conjugating enzyme E2 7
  misc_feature (1)..(108): NCBI GI NO: 18408206 NR Description: ubiquitin-conjugating enzyme 13 (UBC13)
  misc_feature (1)..(109): NCBI GI NO: 34908132 NR Description: putative Ubiquitin carrier protein UBC7
  misc_feature (1)..(109): NCBI GI NO: 7437989 NR Description: ubiquitin-conjugating enzyme E2 - maize
  misc_feature (1)..(108): NCBI GI NO: 7437988 NR Description: ubiquitin-conjugating enzyme - maize
  misc_feature (1)..(108): NCBI GI NO: 18424219 NR Description: ubiquitin-conjugating enzyme 7 (UBC7)
  misc_feature (1)..(109): NCBI GI NO: 136647 NR Description: Ubiquitin-conjugating enzyme E2 7

SEQ ID NO: 3017 - DNA, 1572 bp, Arabidopsis thaliana
  misc_feature (1)..(1572): Ceres Seq. ID no. 12339826
acaagagtacaagagagaaagaaaggaacctcgaactcagagaaattgagagaagagagaagaatcatgggacaaggaccatcgggaggattgaatcggcaaggagatcggaaacctgatggtggagataagaaagagaagaagtttgagccggcggcaccaccggctcgtgtagggaggaagcaaaggaagcagaaagggccagaggcggcggcgagacttccgacggtgactccgtctactaagtgtaagctccggttactgaaattggaacggatcaaggattatttgttgatggaggaagagtttgtggcgaatcaagagaggttgaaacctcaggaagagaaagctgaggaagatagatctaaggttgatgatcttcgtggtacacctatgagtgttgggaatttggaagagttgattgatgagaatcacgctattgtttcttcttctgttggacctgagtactacgttgggattttgtccttcgttgataaagatcagcttgaacctggatgttcgattttgatgcataataaggttctctctgttgttgggattctacaagatgaagtggatccaatggtgtctgtgatgaaagttgagaaagctcctttggagtcatatgctgatattggaggtttagaagctcagattcaggagattaaggaagctgttgagcttcctttgactcatcctgagttgtatgaagatattggtattaaaccaccaaagggtgtaattttgtatggtgagcctggaactgggaagacattgcttgctaaggcggttgcgaattcaacatcagctactttcttgagagttgttggtagtgagctgattcagaagtatttgggagatggtcctaagcttgtgagagaacttttcagagttgctgatgacctttcaccatcaatcgtcttcatagatgagattgatgctgttggtaccaagcggtatgacgctcactcaggaggtgaacgtgagatccaaagaactatgttggaacttctgaaccagcttgatggatttgattcaagaggagatgttaaggtcatccttgcaacaaacagaatcgagagtcttgacccagcactgcttcgacctggacggattgataggaaaatcgagttccctctcccagatatcaaaacaagaagacgtatcttccagatacacacatcgaagatgactctctcggaagatgtaaacctcgaagagtttgtgatgacgaaagacgagttctcaggagctgatataaaggctatatgcactgaggctggtctactagctctcagggagcgtcgtatgaaggtgacacatcctgatttcaagaaagcaaaggagaaggttatgttcaagaagaaagaaggcgtccctgaaggcctctacatgtaaaattataatcatatcgtcatcatcggctttcctcctccacactttgttataatacttttgcttctgcttaggatctttctggtcatataaattgatcatgttttctgatctcctccggtaaaacaattcctcatttccatttaggatgtctatttcgcattaaacttaaccaac

SEQ ID NO: 3018 - protein, 465 aa, Arabidopsis thaliana
  peptide (1)..(465): Ceres Seq. ID no. 12339827
  misc_feature (246)..(433): Pfam Name: AAA Pfam Description: ATPase family associated with various cellular activities
  misc_feature (23)..(465): NCBI GI NO: 15235544 NR Description: 26S proteasome AAA-ATPase subunit RPT2a
  misc_feature (23)..(465): NCBI GI NO: 6652880 NR Description: 26S proteasome AAA-ATPase subunit RPT2a
  misc_feature (23)..(465): NCBI GI NO: 15225307 NR Description: 26S proteasome subunit 4; protein id: At2g20140
  misc_feature (23)..(465): NCBI GI NO: 13937244 NR Description: At2g20140/T2G17.6 [Arabidopsis thaliana]
  misc_feature (23)..(465): NCBI GI NO: 11045086 NR Description: 26S proteasome subunit 4-like protein
  misc_feature (23)..(465): NCBI GI NO: 21593177 NR Description: 26S proteasome subunit 4 [Arabidopsis thaliana]
  misc_feature (23)..(465): NCBI GI NO: 1172635 NR Description: 26S PROTEASE REGULATORY SUBUNIT 4 HOMOLOG
  misc_feature (23)..(465): NCBI GI NO: 17297987 NR Description: 26S proteasome regulatory particle triple-A ATPase subunit2b
  misc_feature (23)..(465): NCBI GI NO: 18479040 NR Description: 26S proteasome regulatory subunit IV
  misc_feature (23)..(465): NCBI GI NO: 1066065 NR Description: P26s4 [Drosophila melanogaster]
TRVQERKKGTSNSEKLREERRIMGQGPSGGLNRQGDRKPDGGDKKEKKFEPAAPPARVGRKQRKQKGPEAAARLPTVTPSTKCKLRLLKLERIKDYLLMEEEFVANQERLKPQEEKAEEDRSKVDDLRGTPMSVGNLEELIDENHAIVSSSVGPEYYVGILSFVDKDQLEPGCSILMHNKVLSVVGILQDEVDPMVSVMKVEKAPLESYADIGGLEAQIQEIKEAVELPLTHPELYEDIGIKPPKGVILYGEPGTGKTLLAKAVANSTSATFLRVVGSELIQKYLGDGPKLVRELFRVADDLSPSIVFIDEIDAVGTKRYDAHSGGEREIQRTMLELLNQLDGFDSRGDVKVILATNRIESLDPALLRPGRIDRKIEFPLPDIKTRRRIFQIHTSKMTLSEDVNLEEFVMTKDEFSGADIKAICTEAGLLALRERRMKVTHPDFKKAKEKVMFKKKEGVPEGLYM

SEQ ID NO: 3019 - protein, 443 aa, Arabidopsis thaliana
  peptide (1)..(443): Ceres Seq. ID no. 12339828
  misc_feature (224)..(411): Pfam Name: AAA Pfam Description: ATPase family associated with various cellular activities
  misc_feature (1)..(443): NCBI GI NO: 15235544 NR Description: 26S proteasome AAA-ATPase subunit RPT2a
  misc_feature (1)..(443): NCBI GI NO: 6652880 NR Description: 26S proteasome AAA-ATPase subunit RPT2a
  misc_feature (1)..(443): NCBI GI NO: 15225307 NR Description: 26S proteasome subunit 4; protein id: At2g20140
  misc_feature (1)..(443): NCBI GI NO: 13937244 NR Description: At2g20140/T2G17.6 [Arabidopsis thaliana]
  misc_feature (1)..(443): NCBI GI NO: 11045086 NR Description: 26S proteasome subunit 4-like protein
  misc_feature (1)..(443): NCBI GI NO: 21593177 NR Description: 26S proteasome subunit 4 [Arabidopsis thaliana]
  misc_feature (1)..(443): NCBI GI NO: 1172635 NR Description: 26S PROTEASE REGULATORY SUBUNIT 4 HOMOLOG
  misc_feature (1)..(443): NCBI GI NO: 17297987 NR Description: 26S proteasome regulatory particle triple-A ATPase subunit2b
  misc_feature (1)..(443): NCBI GI NO: 18479040 NR Description: 26S proteasome regulatory subunit IV
  misc_feature (1)..(443): NCBI GI NO: 1066065 NR Description: P26s4 [Drosophila melanogaster]
MGQGPSGGLNRQGDRKPDGGDKKEKKFEPAAPPARVGRKQRKQKGPEAAARLPTVTPSTKCKLRLLKLERIKDYLLMEEEFVANQERLKPQEEKAEEDRSKVDDLRGTPMSVGNLEELIDENHAIVSSSVGPEYYVGILSFVDKDQLEPGCSILMHNKVLSVVGILQDEVDPMVSVMKVEKAPLESYADIGGLEAQIQEIKEAVELPLTHPELYEDIGIKPPKGVILYGEPGTGKTLLAKAVANSTSATFLRVVGSELIQKYLGDGPKLVRELFRVADDLSPSIVFIDEIDAVGTKRYDAHSGGEREIQRTMLELLNQLDGFDSRGDVKVILATNRIESLDPALLRPGRIDRKIEFPLPDIKTRRRIFQIHTSKMTLSEDVNLEEFVMTKDEFSGADIKAICTEAGLLALRERRMKVTHPDFKKAKEKVMFKKKEGVPEGLYM

SEQ ID NO: 3020 - protein, 367 aa, Arabidopsis thaliana
  peptide (1)..(367): Ceres Seq. ID no. 12339829
  misc_feature (148)..(335): Pfam Name: AAA Pfam Description: ATPase family associated with various cellular activities
  misc_feature (1)..(367): NCBI GI NO: 15235544 NR Description: 26S proteasome AAA-ATPase subunit RPT2a
  misc_feature (1)..(367): NCBI GI NO: 6652880 NR Description: 26S proteasome AAA-ATPase subunit RPT2a
  misc_feature (1)..(367): NCBI GI NO: 15225307 NR Description: 26S proteasome subunit 4; protein id: At2g20140
  misc_feature (1)..(367): NCBI GI NO: 13937244 NR Description: At2g20140/T2G17.6 [Arabidopsis thaliana]
  misc_feature (1)..(367): NCBI GI NO: 11045086 NR Description: 26S proteasome subunit 4-like protein
  misc_feature (1)..(367): NCBI GI NO: 21593177 NR Description: 26S proteasome subunit 4 [Arabidopsis thaliana]
  misc_feature (1)..(367): NCBI GI NO: 1172635 NR Description: 26S PROTEASE REGULATORY SUBUNIT 4 HOMOLOG
  misc_feature (1)..(367): NCBI GI NO: 17297987 NR Description: 26S proteasome regulatory particle triple-A ATPase subunit2b
  misc_feature (1)..(367): NCBI GI NO: 18479040 NR Description: 26S proteasome regulatory subunit IV
  misc_feature (1)..(367): NCBI GI NO: 1066065 NR Description: P26s4 [Drosophila melanogaster]
MEEEFVANQERLKPQEEKAEEDRSKVDDLRGTPMSVGNLEELIDENHAIVSSSVGPEYYVGILSFVDKDQLEPGCSILMHNKVLSVVGILQDEVDPMVSVMKVEKAPLESYADIGGLEAQIQEIKEAVELPLTHPELYEDIGIKPPKGVILYGEPGTGKTLLAKAVANSTSATFLRVVGSELIQKYLGDGPKLVRELFRVADDLSPSIVFIDEIDAVGTKRYDAHSGGEREIQRTMLELLNQLDGFDSRGDVKVILATNRIESLDPALLRPGRIDRKIEFPLPDIKTRRRIFQIHTSKMTLSEDVNLEEFVMTKDEFSGADIKAICTEAGLLALRERRMKVTHPDFKKAKEKVMFKKKEGVPEGLYM

SEQ ID NO: 3021 - DNA, 961 bp, Arabidopsis thaliana
  misc_feature (1)..(961): Ceres Seq. ID no. 13496987
atatttcttcccatcgtcactagtcacgaccacacaaacaaaaaaaatataacatttagagagagagaaaggtacagcagtggcaaactcgtaaataaagaatgtcaaaagattgcggtaaccacggtggtggcaaagaagtagtcgtccggaaactctgcgccgccataatcgccttcatcgtaatagttctaatcaccatcttcctagtttgggtcatactcaggcccactaaaccaagattcgtcctccaagacgccaccgtctacgccttcaacctctcgcaaccaaacctccttacttcaaacttccaagtcacaatcgcatctcgtaaccctaactccaagatcggaatctactacgaccgtctccacgtctacgctacatacatgaaccagcagatcactctacgtacggcgattcctccgacgtatcaaggccacaaagaagtcaacgtttggtctcctttcgtctacgggactgcggttcccatcgcaccttacaactccgtcgctttgggagaggagaaagatcgtggatttgtagggttgatgatacgcgccgatgggaccgtgaggtggaaagtgaggactttgatcaccggaaaatatcatatccatgttcggtgtcaggcgttcatcaatcttggaaacaaagctgctggtgttcttgtcggtgataacgccgttaagtacacgttggctaataaatgcagtgtgaacgtttagaaagtttgacggcgttaagttgctttttttcttgaaattcaccaaacttctttccaccaacaggatactatttctgtttctacatatctttaagatttcactactttttggttgttattaagcttattgttgattatagaattattacaatcacgaaggtcagtggttggatttaactgtaaatccactttataaagttgaaataaaatggaggattgggttttggttctttt

SEQ ID NO: 3022 - protein, 208 aa, Arabidopsis thaliana
  peptide (1)..(208): Ceres Seq. ID no. 13496988
  misc_feature (1)..(208): NCBI GI NO: 15231227 NR Description: harpin-induced protein 1 family (HIN1)
  misc_feature (2)..(208): NCBI GI NO: 15227538 NR Description: harpin-induced protein 1 family (HIN1)
  misc_feature (3)..(208): NCBI GI NO: 18399308 NR Description: harpin-induced protein 1 family (HIN1)
  misc_feature (3)..(208): NCBI GI NO: 28392929 NR Description: putative VAMP protein SEC22 [Arabidopsis thaliana]
  misc_feature (2)..(207): NCBI GI NO: 15233951 NR Description: harpin-induced protein 1 family (HIN1)
  misc_feature (2)..(207): NCBI GI NO: 15227540 NR Description: harpin-induced protein 1 family (HIN1)
  misc_feature (2)..(208): NCBI GI NO: 15240001 NR Description: harpin-induced protein, putative (HIN1)
  misc_feature (3)..(208): NCBI GI NO: 15229906 NR Description: harpin-induced protein 1 family (HIN1)
  misc_feature (5)..(208): NCBI GI NO: 22326984 NR Description: harpin-induced protein 1 family (HIN1)
  misc_feature (1)..(208): NCBI GI NO: 38344036 NR Description: OJ991214_12.17
MSKDCGNHGGGKEVVVRKLCAAIIAFIVIVLITIFLVWVILRPTKPRFVLQDATVYAFNLSQPNLLTSNFQVTIASRNPNSKIGIYYDRLHVYATYMNQQITLRTAIPPTYQGHKEVNVWSPFVYGTAVPIAPYNSVALGEEKDRGFVGLMIRADGTVRWKVRTLITGKYHIHVRCQAFINLGNKAAGVLVGDNAVKYTLANKCSVNV

SEQ ID NO: 3023 - protein, 112 aa, Arabidopsis thaliana
  peptide (1)..(112): Ceres Seq. ID no. 13496989
  misc_feature (1)..(112): NCBI GI NO: 15231227 NR Description: harpin-induced protein 1 family (HIN1)
  misc_feature (1)..(112): NCBI GI NO: 15227538 NR Description: harpin-induced protein 1 family (HIN1)
  misc_feature (1)..(112): NCBI GI NO: 18399308 NR Description: harpin-induced protein 1 family (HIN1)
  misc_feature (1)..(112): NCBI GI NO: 28392929 NR Description: putative VAMP protein SEC22 [Arabidopsis thaliana]
  misc_feature (1)..(111): NCBI GI NO: 15233951 NR Description: harpin-induced protein 1 family (HIN1)
  misc_feature (1)..(111): NCBI GI NO: 15227540 NR Description: harpin-induced protein 1 family (HIN1)
  misc_feature (1)..(112): NCBI GI NO: 15240001 NR Description: harpin-induced protein, putative (HIN1)
  misc_feature (1)..(112): NCBI GI NO: 15229906 NR Description: harpin-induced protein 1 family (HIN1)
  misc_feature (1)..(112): NCBI GI NO: 22326984 NR Description: harpin-induced protein 1 family (HIN1)
  misc_feature (1)..(112): NCBI GI NO: 38344036 NR Description: OJ991214_12.17
MNQQITLRTAIPPTYQGHKEVNVWSPFVYGTAVPIAPYNSVALGEEKDRGFVGLMIRADGTVRWKVRTLITGKYHIHVRCQAFINLGNKAAGVLVGDNAVKYTLANKCSVNV

SEQ ID NO: 3024 - DNA, 834 bp, Arabidopsis thaliana
  misc_feature (1)..(834): Ceres Seq. ID no. 12488276
cattcgtctctttcgttcctctctgcgtgccctagttattcagatcgccgaatttgcagtaaggagacgaaaatatggtgcacgtttgctactaccgcaactatggaaagaccttcaagggaccacgtcgtccttacgagaaggagcgtcttgattctgaattgaagctggttggtgagtatggtctgcgtaacaagcgtgagctctggagagtgcagtactctcttagccgtatccgtaatgctgctagagatcttttgactcttgatgagaagagtccaagaaggatctttgaaggtgaggctttgctccgtaggatgaaccgttacgggcttcttgatgagagccagaacaagctcgattacgtcttggctttgactgttgagaactttcttgagcgtcgtcttcagactattgtgttcaagtctggtatggctaagtctatccatcactctcgtgtcctcatcaggcagaggcatatcagggttggaaagcaattggtgaacattccatcattcatggtgagacttgattcacagaagcacattgactttgccctcaccagtcccttcggtggtggccgtccaggaagagtgaagagaaggaacgagaagtctgcctccaagaaagcctcaggtggcggtgatgcagacggtgatgacgaagagtaaatctgaagtcgcaccgttttagctatgaatcaatctgctttttgatattttgtagtaagcaactttgttgttcgttttcagaggattgttttatggtttctttcttttactctcgagattgctaaacctttgggttatcatctatttctcacaattatctttt

SEQ ID NO: 3025 - protein, 198 aa, Arabidopsis thaliana
  peptide (1)..(198): Ceres Seq. ID no. 12488277
  misc_feature (6)..(108): Pfam Name: Pfam Description:  Ribosomal protein S4/S9 N-terminal domain
  misc_feature (1)..(198): NCBI GI NO: 15242241 NR Description: 40S ribosomal protein - like
  misc_feature (1)..(198): NCBI GI NO: 15242498 NR Description: 40S ribosomal protein S9-like
  misc_feature (1)..(198): NCBI GI NO: 6440857 NR Description: 40S ribosomal protein S9 [Chlamydomonas sp. HS-5]
  misc_feature (8)..(198): NCBI GI NO: 40741183 NR Description: RS9_PODAN 40S ribosomal protein S9 (S7)
  misc_feature (8)..(197): NCBI GI NO: 1710780 NR Description: 40S ribosomal protein S9 (S7)
  misc_feature (12)..(198): NCBI GI NO: 14141193 NR Description: ribosomal protein S9; 40S ribosomal protein S9
  misc_feature (12)..(198): NCBI GI NO: 13592067 NR Description: ribosomal protein S9 [Rattus norvegicus]
  misc_feature (12)..(198): NCBI GI NO: 27735416 NR Description: Similar to ribosomal protein S9 [Xenopus laevis]
  misc_feature (10)..(198): NCBI GI NO: 24661707 NR Description: Ribosomal protein S9 CG3395-PA
  misc_feature (12)..(196): NCBI GI NO: 15294029 NR Description: 40S ribosomal protein S9 [Ictalurus punctatus]
MVHVCYYRNYGKTFKGPRRPYEKERLDSELKLVGEYGLRNKRELWRVQYSLSRIRNAARDLLTLDEKSPRRIFEGEALLRRMNRYGLLDESQNKLDYVLALTVENFLERRLQTIVFKSGMAKSIHHSRVLIRQRHIRVGKQLVNIPSFMVRLDSQKHIDFALTSPFGGGRPGRVKRRNEKSASKKASGGGDADGDDEE

SEQ ID NO: 3026 - protein, 117 aa, Arabidopsis thaliana
  peptide (1)..(117): Ceres Seq. ID no. 12488278
  misc_feature (28)..(75): Pfam Name: Pfam Description:  S4 domain
  misc_feature (1)..(117): NCBI GI NO: 15242241 NR Description: 40S ribosomal protein - like
  misc_feature (1)..(117): NCBI GI NO: 15242498 NR Description: 40S ribosomal protein S9-like
  misc_feature (1)..(117): NCBI GI NO: 6440857 NR Description: 40S ribosomal protein S9 [Chlamydomonas sp. HS-5]
  misc_feature (1)..(117): NCBI GI NO: 40741183 NR Description: RS9_PODAN 40S ribosomal protein S9 (S7)
  misc_feature (1)..(116): NCBI GI NO: 1710780 NR Description: 40S ribosomal protein S9 (S7)
  misc_feature (1)..(117): NCBI GI NO: 14141193 NR Description: ribosomal protein S9; 40S ribosomal protein S9
  misc_feature (1)..(117): NCBI GI NO: 13592067 NR Description: ribosomal protein S9 [Rattus norvegicus]
  misc_feature (1)..(117): NCBI GI NO: 27735416 NR Description: Similar to ribosomal protein S9 [Xenopus laevis]
  misc_feature (1)..(117): NCBI GI NO: 24661707 NR Description: Ribosomal protein S9 CG3395-PA
  misc_feature (1)..(115): NCBI GI NO: 15294029 NR Description: 40S ribosomal protein S9 [Ictalurus punctatus]
MNRYGLLDESQNKLDYVLALTVENFLERRLQTIVFKSGMAKSIHHSRVLIRQRHIRVGKQLVNIPSFMVRLDSQKHIDFALTSPFGGGRPGRVKRRNEKSASKKASGGGDADGDDEE

SEQ ID NO: 3027 - DNA, 629 bp, Arabidopsis thaliana
  misc_feature (1)..(629): Ceres Seq. ID no. 12384479
acacatcggttagggttttagtttctcttaccgagattcaaatggcgcttagaggagtttggcagctcaagaaactcgttgtgagctactgtaattggggtggtagcagtagaggcatcagagcctttatggaatcagaattgcctgctctaaaggagaaaaacccgcagctcgaagtaattaccgagctttcacggggacaacatccttatttgaagggcatttacaggaatagaaatgaaagggtagtgtgtgtgaagaacatggatcctgaagaagtgcttttgaatgcaacgaggctgaggaactcgcttggacggaaagtggttaaactgaggacccgacatgtcaccaaacaccccagtgttcaaggcacctggacaactgctgtcaaattctgagactttcctgctaaattgtttgcaggttttcatcttctagctgttaaatcgaatgttgcaagtatcaggattggtcgtttatctgtattgcaaccccaagttgtttgtaccgtctgtgacttgggacaaagatgtagtcttcaaatgttttgcagtttttgcaatgtttgaattttgtcttgtccttctggttgagtctataataagattacacaagggtttaaggtt

SEQ ID NO: 3028 - protein, 132 aa, Arabidopsis thaliana
  peptide (1)..(132): Ceres Seq. ID no. 12384480
  misc_feature (15)..(105): Pfam Name: Pfam Description:  Mitochondrial ribosomal protein L51 / S25 / CI-B8 domain
  misc_feature (14)..(132): NCBI GI NO: 15231727 NR Description: putative protein; protein id: At3g59650
  misc_feature (14)..(131): NCBI GI NO: 26006491 NR Description: Unknown protein
  misc_feature (19)..(127): NCBI GI NO: 40739113 NR Description: hypothetical protein AN6904.2
  misc_feature (23)..(127): NCBI GI NO: 19112489 NR Description: hypothetical protein [Schizosaccharomyces pombe]
  misc_feature (21)..(132): NCBI GI NO: 17505717 NR Description: NADH-ubiquinone oxidoreductase B8
  misc_feature (21)..(132): NCBI GI NO: 39589613 NR Description: Hypothetical protein CBG12220
  misc_feature (19)..(127): NCBI GI NO: 6325356 NR Description: Mitochondrial Ribosome Protein, Large Subunit
  misc_feature (17)..(127): NCBI GI NO: 17647665 NR Description: mitochondrial ribosomal protein L-CI-B8 CG5479-PA
  misc_feature (1)..(127): NCBI GI NO: 13559406 NR Description: mitochondrial ribosomal protein bMRP36a
TSVRVLVSLTEIQMALRGVWQLKKLVVSYCNWGGSSRGIRAFMESELPALKEKNPQLEVITELSRGQHPYLKGIYRNRNERVVCVKNMDPEEVLLNATRLRNSLGRKVVKLRTRHVTKHPSVQGTWTTAVKF

SEQ ID NO: 3029 - protein, 119 aa, Arabidopsis thaliana
  peptide (1)..(119): Ceres Seq. ID no. 12384481
  misc_feature (2)..(92): Pfam Name: Pfam Description:  Mitochondrial ribosomal protein L51 / S25 / CI-B8 domain
  misc_feature (1)..(119): NCBI GI NO: 15231727 NR Description: putative protein; protein id: At3g59650
  misc_feature (1)..(118): NCBI GI NO: 26006491 NR Description: Unknown protein
  misc_feature (6)..(114): NCBI GI NO: 40739113 NR Description: hypothetical protein AN6904.2
  misc_feature (10)..(114): NCBI GI NO: 19112489 NR Description: hypothetical protein [Schizosaccharomyces pombe]
  misc_feature (8)..(119): NCBI GI NO: 17505717 NR Description: NADH-ubiquinone oxidoreductase B8
  misc_feature (8)..(119): NCBI GI NO: 39589613 NR Description: Hypothetical protein CBG12220
  misc_feature (6)..(114): NCBI GI NO: 6325356 NR Description: Mitochondrial Ribosome Protein, Large Subunit
  misc_feature (4)..(114): NCBI GI NO: 17647665 NR Description: mitochondrial ribosomal protein L-CI-B8 CG5479-PA
  misc_feature (1)..(114): NCBI GI NO: 13559406 NR Description: mitochondrial ribosomal protein bMRP36a
MALRGVWQLKKLVVSYCNWGGSSRGIRAFMESELPALKEKNPQLEVITELSRGQHPYLKGIYRNRNERVVCVKNMDPEEVLLNATRLRNSLGRKVVKLRTRHVTKHPSVQGTWTTAVKF

SEQ ID NO: 3030 - protein, 90 aa, Arabidopsis thaliana
  peptide (1)..(90): Ceres Seq. ID no. 12384482
  misc_feature (1)..(63): Pfam Name: Pfam Description:  Mitochondrial ribosomal protein L51 / S25 / CI-B8 domain
  misc_feature (1)..(90): NCBI GI NO: 15231727 NR Description: putative protein; protein id: At3g59650
  misc_feature (1)..(89): NCBI GI NO: 26006491 NR Description: Unknown protein
  misc_feature (1)..(85): NCBI GI NO: 40739113 NR Description: hypothetical protein AN6904.2
  misc_feature (1)..(85): NCBI GI NO: 19112489 NR Description: hypothetical protein [Schizosaccharomyces pombe]
  misc_feature (1)..(90): NCBI GI NO: 17505717 NR Description: NADH-ubiquinone oxidoreductase B8
  misc_feature (1)..(90): NCBI GI NO: 39589613 NR Description: Hypothetical protein CBG12220
  misc_feature (1)..(85): NCBI GI NO: 6325356 NR Description: Mitochondrial Ribosome Protein, Large Subunit
  misc_feature (1)..(85): NCBI GI NO: 17647665 NR Description: mitochondrial ribosomal protein L-CI-B8 CG5479-PA
  misc_feature (1)..(85): NCBI GI NO: 13559406 NR Description: mitochondrial ribosomal protein bMRP36a
MESELPALKEKNPQLEVITELSRGQHPYLKGIYRNRNERVVCVKNMDPEEVLLNATRLRNSLGRKVVKLRTRHVTKHPSVQGTWTTAVKF

SEQ ID NO: 3031 - DNA, 1035 bp, Arabidopsis thaliana
  misc_feature (1)..(1035): Ceres Seq. ID no. 13488831
gcttgaaaatgaaatctggtttaaatagtttctctgtttggtttttctgttttaattaatttacgggcaatggaagcattgagagcgtcctacggcgactcttcatcggattccgataccgatgatctttctccggcgagtcccgttactgcaaattctggagagaaagattcgatttccttgcctcctccaccgcttgcgcttctcgattccattgtatccacaggttcactggatttcttctcaacagagcctggagttcgtgtaagaaactttcctcatgtcgatggaaattacgctttgcacgtttacgtacctgtttgtatacctccactgccaaagaaggagattgtatgttttttaaagaaggttgcatcagttgttcctcatcttcatttggtagaggctgatgtgccactcagcattctatgcaaggatgatcagaagtttgagcgtgccttggggagagagttccacataagcttaggaagaaacgttccactacgtgttcatcagattaactcggtgatttctatgcttcggcaaaagcttcagttgcagaagagatacttgatagatttcaataagtgggaagtctttgtgaatgatgaccatactcgctctttcctttctttggaaatcactacttcaggactatccgagataagtaagcaaattgatgctgttaatgaagtttacaagctccacaatctgccggagttctacaaggatccgcggccgcatatatccttggtctgggcgttgggtgatattagaacttccctaaagggagctgttgacgtggaacttaggaagcttagagcaggtggttgtgtgcagaatcgtatcttcacctctaagttttgtgggatcgagtgtaagataggaaacaaaacacacaaaatatgtaaactcccagatgaataagaaaatctcaaatttctgtgtttgcagaccaatcaggtatgcatttgtaacgacatagaaggatgagttgatctgtgttcttgggtattccataatatatgtctcttc

SEQ ID NO: 3032 - protein, 285 aa, Arabidopsis thaliana
  peptide (1)..(285): Ceres Seq. ID no. 13488832
  misc_feature (1)..(285): NCBI GI NO: 18423246 NR Description: expressed protein [Arabidopsis thaliana]
  misc_feature (117)..(275): NCBI GI NO: 13325194 NR Description: hypothetical protein FLJ13154 [Homo sapiens]
  misc_feature (8)..(83): NCBI GI NO: 13325194 NR Description: hypothetical protein FLJ13154 [Homo sapiens]
  misc_feature (117)..(275): NCBI GI NO: 13375797 NR Description: hypothetical protein FLJ13154 [Homo sapiens]
  misc_feature (8)..(83): NCBI GI NO: 13375797 NR Description: hypothetical protein FLJ13154 [Homo sapiens]
  misc_feature (131)..(275): NCBI GI NO: 19527176 NR Description: expressed sequence AA960436 [Mus musculus]
  misc_feature (8)..(112): NCBI GI NO: 19527176 NR Description: expressed sequence AA960436 [Mus musculus]
  misc_feature (117)..(248): NCBI GI NO: 34851290 NR Description: similar to expressed sequence AA960436
  misc_feature (40)..(83): NCBI GI NO: 34851290 NR Description: similar to expressed sequence AA960436
  misc_feature (134)..(276): NCBI GI NO: 27694652 NR Description: Similar to expressed sequence AA960436
MEALRASYGDSSSDSDTDDLSPASPVTANSGEKDSISLPPPPLALLDSIVSTGSLDFFSTEPGVRVRNFPHVDGNYALHVYVPVCIPPLPKKEIVCFLKKVASVVPHLHLVEADVPLSILCKDDQKFERALGREFHISLGRNVPLRVHQINSVISMLRQKLQLQKRYLIDFNKWEVFVNDDHTRSFLSLEITTSGLSEISKQIDAVNEVYKLHNLPEFYKDPRPHISLVWALGDIRTSLKGAVDVELRKLRAGGCVQNRIFTSKFCGIECKIGNKTHKICKLPDE

SEQ ID NO: 3033 - DNA, 1889 bp, Arabidopsis thaliana
  misc_feature (1)..(1889): Ceres Seq. ID no. 13491619
gatatgtgtgatatctctttgtcccccatctattaatctcctcctccgcatcgtcgccgtgcacttccccacctcttccggcggatatgatgagcattgtatcaagtcatcatcactgtcaacaatctgttatacacgaacgtagcggtataggaacaatatctaaggtttcttgttcgagatattgcggtccgtgtttctctggacgactggctttctctcatagcctctgcttgaagactacttatgggaaaactgataggagaaagttttcaagaatttgcagtattgtggatgatgaggggaatctagataattcggatgacgaggaaaaggaatcactcgatgataaaactaaaagggtatgtatgagaaatctataagctttgtaaactccggccattttttgctgtcctctaaggtgaagtcatgacttgacctttaagaactgagacttggtttccctgtgctttatacactagaattatattaaacagtcaatgtggttttaatccttgttgtacatgaaagcctcaaactctctagttcgtgagattacttagaatgttgatctactcctgcttgatcctggaaaaagtgcgtaactaatttgatttcttgagtccttttgatgtctaaatgtttgtccatctctgtcatggcttagtgacacagcaagtaaacaagcgttttgtttaaatttattggttgcttgatatcatctaatcatttagaattactttttttttctttttctttagcaagcgaatgatatgaatcgggctaatcttgaaagaatggttgggtcagatgattctgcatttaacggcttagatcttgcaaccctcatcagacagaagtatggaaaatcttatgatgttcaactcatcaagaaggtatgcccttctgtattcaagtgtgtttgtgattctgtatcgtagaaagaagttaagacctccaatcatcttcatttcattgcatgaatacagaatcagcttttacgaaattcagttgatcattttccttttcattttgagatttttggtgtgagctttattttatcaatgtggaaagatttgtcgctttagaagctaaaaatataaatcatagttcttagatgtgattaatgtaggagttcatggggaagaatcttcttgcaatgaatgtcatgtggaagtacagagaacaggtaagagaatcctttgctgtatacttgatcacagaagcctaatgatatgatagttcaattgattttagtgtacttgtttggactttagataattatgatcttcgttttccatatcattcagatttggtatgagaatctttgccacatagaaagatgaagtgtatatccatattttgttggtatagttcttgcttttgcaagtcaatccttgtaagctaattcacctttatatatttcttgcttcttcttcaacgcctagaggtcttttcctctaaccgaagaagaatatatacttagacttgacgatgtagccaacatgttgaaatgctggggagcagtctcacatatccgtagcagcctagcaaagtcgaaggagcgacctcggatagggaaggctgtcagcattttcatagacatggattcgacagggggaagagcaaatgaatggatttacaagtaaaaatcgaccggtttgcagctgctaaaccaagaaatcaaaaggttttgtctctacgtttatcgtcatcaattcattttgaaggctcttcagtgatggttgcctgcagaaaccgaggtttttgctatatttgatgtccaaatcaggtagtatatatgtacatgtgtgtattaagtagacacaaatctttacttgaactctctgtgtaaaatatctccatgtgttgaaattcaatcatctttg

SEQ ID NO: 3034 - protein, 98 aa, Arabidopsis thaliana
  peptide (1)..(98): Ceres Seq. ID no. 13491620
  misc_feature (1)..(92): NCBI GI NO: 11994202 NR Description: dbj|BAA18864
  misc_feature (1)..(92): NCBI GI NO: 18402409 NR Description: expressed protein [Arabidopsis thaliana]
MMSIVSSHHHCQQSVIHERSGIGTISKVSCSRYCGPCFSGRLAFSHSLCLKTTYGKTDRRKFSRICSIVDDEGNLDNSDDEEKESLDDKTKRVCMRNL

SEQ ID NO: 3035 - protein, 97 aa, Arabidopsis thaliana
  peptide (1)..(97): Ceres Seq. ID no. 13491621
  misc_feature (1)..(91): NCBI GI NO: 11994202 NR Description: dbj|BAA18864
  misc_feature (1)..(91): NCBI GI NO: 18402409 NR Description: expressed protein [Arabidopsis thaliana]
MSIVSSHHHCQQSVIHERSGIGTISKVSCSRYCGPCFSGRLAFSHSLCLKTTYGKTDRRKFSRICSIVDDEGNLDNSDDEEKESLDDKTKRVCMRNL

SEQ ID NO: 3036 - protein, 62 aa, Arabidopsis thaliana
  peptide (1)..(62): Ceres Seq. ID no. 13491622
MENLMMFNSSRRYALLYSSVFVILYRRKKLRPPIIFISLHEYRISFYEIQLIIFLFILRFLV

SEQ ID NO: 3037 - DNA, 2238 bp, Arabidopsis thaliana
  misc_feature (1)..(2238): Ceres Seq. ID no. 12326863
atccactttttgtggctgcttactgttttcctcgaaagttccatttttttcttttgctctgcaaacgaaaaagaaccataaatttttctcatatttaaagctctctctttctctcacaactgtgttcacatgaactttctcaccgctttcttctcttcattgaacaaaaaaaaaagctcttaacttttttttcttctttaggtaaaatttgacaaaagctctcaactttcaaactctgtttcttcatcatcatcatcatcaccatggacgccctgcttcaagtttcagttgatgggtttagatttgagaacggatctggatcttgctgcaaacccagaaacaatctcgaatctgggaacaatctcttccctgatttccacgagtctcagaatcagtcttcaccaaacgattcacctccaacggtgtgtttggataactctcctgttctgaagtacatcaatgatatgttgatggacgaagaagacttcgtaggtatatctcgtgacgatttagctttacaagccgctgagagatccttctacgagataattcaacagcaatctccagaatctgatcagaacactagctcctcctccgatcaaaactccggtgaccaagatttctgttttcccagcacaacaacagattcatcagcgttggtttcgagcggagaatcacagagaaagtaccgtcatcggaatgatgaagaagatgatcttgagaacaatcggagaaacaaacaaccagcgatatttgtctcggagatggaagagttagcagtgaagttagaacatgtgttgttggtatgcaaaacgaaccaagaagaagaagaagaaagaacagtaataacgaaacagagtactccaaacagagcaggaagagcaaaaggttcatcgaacaaatcaaagacgcacaaaactaataccgttgatctacgaagtctcttgacgcaatgtgctcaagctgtagcgagctttgaccagagaagagctacagataaactcaaggagataagagcacactcttctagcaatggagatggaacacaaagactagctttttactttgcagaggcgcttgaggcacgtatcactggaaacatctcaccgcctgtttctaatccgtttccttcaagcacgacatcgatggtggacattttgaaagcgtacaagctgtttgttcatacttgtcccatctatgtaactgattacttcgctgcgaacaaatcgatttacgaacttgctatgaaagcaactaagcttcacatagttgattttggagttctctacggctttcaatggccttgtttgttacgagctctgtctaaacgaccgggcggaccaccaatgcttcgggtgactggaatcgagctgccacaagcgggttttcgtccttcagaccgcgttgaagagactggtcgaagactgaaaaggttctgcgatcagtttaatgttccttttgagttcaacttcatagccaaaaaatgggaaaccatcactcttgatgaacttatgatcaatccaggagagacaacggtcgtcaactgcattcatcggttacaatacactcctgatgaaactgtgtcattagactctccaagagacacggttctgaagctattcagagatatcaatcctgacctctttgtgtttgcagagattaacggaatgtacaactctcctttcttcatgacgaggttccgagaagcgctttttcattactcttcactctttgacatgtttgacaccacaatacacgcagaggatgagtacaaaaacaggtcactgttggagagagagttacttgtgagagacgcgatgagcgtgatttcctgcgagggtgcagagcggtttgcgaggcctgaaacctacaagcaatggcgagttaggattttgagagccgggtttaagccagcaactattagcaaacagatcatgaaggaggctaaggaaattgtgaggaaacgttaccatagagattttgtgatcgatagcgataacaattggatgcttcaaggatggaaaggaagagtcatctatgctttttcttgctggaaacctgctgagaagttcacaaacaataatttaaacatctgaaaaatgttacttctcaattacatcatttttgtttcccaatggttttgtagaatatgtttgatcccgtgagtggatgcaactcttttttcctgcaagtacatattgtattcaaatccttgtggaaatgataaattgtttaatc

SEQ ID NO: 3038 - protein, 610 aa, Arabidopsis thaliana
  peptide (1)..(610): Ceres Seq. ID no. 12326864
  misc_feature (198)..(505): Pfam Name: Pfam Description:  GRAS family transcription factor
  misc_feature (104)..(602): NCBI GI NO: 15232593 NR Description: scarecrow-like protein; protein id: At3g46600
  misc_feature (104)..(602): NCBI GI NO: 21593017 NR Description: scarecrow-like protein [Arabidopsis thaliana]
  misc_feature (136)..(599): NCBI GI NO: 32813435 NR Description: SCARECROW-like protein [Lilium longiflorum]
  misc_feature (61)..(599): NCBI GI NO: 38346720 NR Description: OSJNBa0086O06.18
  misc_feature (145)..(602): NCBI GI NO: 15224338 NR Description: putative SCARECROW gene regulator
  misc_feature (32)..(132): NCBI GI NO: 15224338 NR Description: putative SCARECROW gene regulator
  misc_feature (141)..(600): NCBI GI NO: 15222433 NR Description: transcription factor scarecrow-like 14, putative
  misc_feature (23)..(599): NCBI GI NO: 34908186 NR Description: P0406G08.7
  misc_feature (141)..(596): NCBI GI NO: 8778540 NR Description: F22G5.9 [Arabidopsis thaliana]
  misc_feature (406)..(610): NCBI GI NO: 11358823 NR Description: scarecrow-like protein 11
MDALLQVSVDGFRFENGSGSCCKPRNNLESGNNLFPDFHESQNQSSPNDSPPTVCLDNSPVLKYINDMLMDEEDFVGISRDDLALQAAERSFYEIIQQQSPESDQNTSSSSDQNSGDQDFCFPSTTTDSSALVSSGESQRKYRHRNDEEDDLENNRRNKQPAIFVSEMEELAVKLEHVLLVCKTNQEEEEERTVITKQSTPNRAGRAKGSSNKSKTHKTNTVDLRSLLTQCAQAVASFDQRRATDKLKEIRAHSSSNGDGTQRLAFYFAEALEARITGNISPPVSNPFPSSTTSMVDILKAYKLFVHTCPIYVTDYFAANKSIYELAMKATKLHIVDFGVLYGFQWPCLLRALSKRPGGPPMLRVTGIELPQAGFRPSDRVEETGRRLKRFCDQFNVPFEFNFIAKKWETITLDELMINPGETTVVNCIHRLQYTPDETVSLDSPRDTVLKLFRDINPDLFVFAEINGMYNSPFFMTRFREALFHYSSLFDMFDTTIHAEDEYKNRSLLERELLVRDAMSVISCEGAERFARPETYKQWRVRILRAGFKPATISKQIMKEAKEIVRKRYHRDFVIDSDNNWMLQGWKGRVIYAFSCWKPAEKFTNNNLNI

SEQ ID NO: 3039 - protein, 543 aa, Arabidopsis thaliana
  peptide (1)..(543): Ceres Seq. ID no. 12326865
  misc_feature (131)..(438): Pfam Name: Pfam Description:  GRAS family transcription factor
  misc_feature (37)..(535): NCBI GI NO: 15232593 NR Description: scarecrow-like protein; protein id: At3g46600
  misc_feature (37)..(535): NCBI GI NO: 21593017 NR Description: scarecrow-like protein [Arabidopsis thaliana]
  misc_feature (69)..(532): NCBI GI NO: 32813435 NR Description: SCARECROW-like protein [Lilium longiflorum]
  misc_feature (1)..(532): NCBI GI NO: 38346720 NR Description: OSJNBa0086O06.18
  misc_feature (78)..(535): NCBI GI NO: 15224338 NR Description: putative SCARECROW gene regulator
  misc_feature (1)..(65): NCBI GI NO: 15224338 NR Description: putative SCARECROW gene regulator
  misc_feature (74)..(533): NCBI GI NO: 15222433 NR Description: transcription factor scarecrow-like 14, putative
  misc_feature (1)..(532): NCBI GI NO: 34908186 NR Description: P0406G08.7
  misc_feature (74)..(529): NCBI GI NO: 8778540 NR Description: F22G5.9 [Arabidopsis thaliana]
  misc_feature (339)..(543): NCBI GI NO: 11358823 NR Description: scarecrow-like protein 11
MLMDEEDFVGISRDDLALQAAERSFYEIIQQQSPESDQNTSSSSDQNSGDQDFCFPSTTTDSSALVSSGESQRKYRHRNDEEDDLENNRRNKQPAIFVSEMEELAVKLEHVLLVCKTNQEEEEERTVITKQSTPNRAGRAKGSSNKSKTHKTNTVDLRSLLTQCAQAVASFDQRRATDKLKEIRAHSSSNGDGTQRLAFYFAEALEARITGNISPPVSNPFPSSTTSMVDILKAYKLFVHTCPIYVTDYFAANKSIYELAMKATKLHIVDFGVLYGFQWPCLLRALSKRPGGPPMLRVTGIELPQAGFRPSDRVEETGRRLKRFCDQFNVPFEFNFIAKKWETITLDELMINPGETTVVNCIHRLQYTPDETVSLDSPRDTVLKLFRDINPDLFVFAEINGMYNSPFFMTRFREALFHYSSLFDMFDTTIHAEDEYKNRSLLERELLVRDAMSVISCEGAERFARPETYKQWRVRILRAGFKPATISKQIMKEAKEIVRKRYHRDFVIDSDNNWMLQGWKGRVIYAFSCWKPAEKFTNNNLNI

SEQ ID NO: 3040 - protein, 541 aa, Arabidopsis thaliana
  peptide (1)..(541): Ceres Seq. ID no. 12326866
  misc_feature (129)..(436): Pfam Name: Pfam Description:  GRAS family transcription factor
  misc_feature (35)..(533): NCBI GI NO: 15232593 NR Description: scarecrow-like protein; protein id: At3g46600
  misc_feature (35)..(533): NCBI GI NO: 21593017 NR Description: scarecrow-like protein [Arabidopsis thaliana]
  misc_feature (67)..(530): NCBI GI NO: 32813435 NR Description: SCARECROW-like protein [Lilium longiflorum]
  misc_feature (1)..(530): NCBI GI NO: 38346720 NR Description: OSJNBa0086O06.18
  misc_feature (76)..(533): NCBI GI NO: 15224338 NR Description: putative SCARECROW gene regulator
  misc_feature (1)..(63): NCBI GI NO: 15224338 NR Description: putative SCARECROW gene regulator
  misc_feature (72)..(531): NCBI GI NO: 15222433 NR Description: transcription factor scarecrow-like 14, putative
  misc_feature (1)..(530): NCBI GI NO: 34908186 NR Description: P0406G08.7
  misc_feature (72)..(527): NCBI GI NO: 8778540 NR Description: F22G5.9 [Arabidopsis thaliana]
  misc_feature (337)..(541): NCBI GI NO: 11358823 NR Description: scarecrow-like protein 11
MDEEDFVGISRDDLALQAAERSFYEIIQQQSPESDQNTSSSSDQNSGDQDFCFPSTTTDSSALVSSGESQRKYRHRNDEEDDLENNRRNKQPAIFVSEMEELAVKLEHVLLVCKTNQEEEEERTVITKQSTPNRAGRAKGSSNKSKTHKTNTVDLRSLLTQCAQAVASFDQRRATDKLKEIRAHSSSNGDGTQRLAFYFAEALEARITGNISPPVSNPFPSSTTSMVDILKAYKLFVHTCPIYVTDYFAANKSIYELAMKATKLHIVDFGVLYGFQWPCLLRALSKRPGGPPMLRVTGIELPQAGFRPSDRVEETGRRLKRFCDQFNVPFEFNFIAKKWETITLDELMINPGETTVVNCIHRLQYTPDETVSLDSPRDTVLKLFRDINPDLFVFAEINGMYNSPFFMTRFREALFHYSSLFDMFDTTIHAEDEYKNRSLLERELLVRDAMSVISCEGAERFARPETYKQWRVRILRAGFKPATISKQIMKEAKEIVRKRYHRDFVIDSDNNWMLQGWKGRVIYAFSCWKPAEKFTNNNLNI

SEQ ID NO: 3041 - DNA, 1612 bp, Arabidopsis thaliana
  misc_feature (1)..(1612): Ceres Seq. ID no. 12329884
acgccgtgtcgtttctcatctcgccggtcaacttttgagagagagaagaagaaaaatgcatttgagtgagaatgaaggtgtcgaaggtaacaccttcgtggtcactggaggtcttggcttcgtcggtgcagctctctgcttagagctcgttcgtcgtggtgctcgccaagttcgctcttttgacctccgtcactcttctccttggtccgatgatctcaaaaacagtggcgttcgctgcattcaaggtgatgtgactaagaaacaagatgtggataacgctttagatggagcagactgtgttttgcatcttgcttcttatggtatgtctgggaaggagatgcttcggtttggtcgttgtgatgaggttaacatcaacgggacttgtaatgtcttggaagctgcgtttaaacatgagattacaagaattgtgtatgttagcacttacaatgttgtgtttggtggtaaagagattctcaatggtaatgaaggtttgccttatttccctcttgatgatcatgttgatgcatatagtcgaactaaatcgattgcagaacagttggttctcaagagtaatggtcgaccttttaagaatggaggcaaacggatgtatacatgtgcgattcgtccagcggctatatatggacctggcgaagataggcatcttcctaggattgttactctaacaaagttgggtttggctctcttcaagatcggtgaaccgagtgtcaaatcagactggatttatgtcgaaaaccttgtcctagcaatcatcttggcaagtatgggactcttggatgacattcctggcagagaaggacaacctgttgctgctggtcaaccatattttgtctctgacggttacccggtgaatacctttgagtttctgcgtcctttactaaaaagtttagactatgacctgcccaagtgtacaatctctgtaccttttgcgctgtccttgggtaagatcttccaaggtttctacactgtgctatatccatggctatcaaagagctggttaccacagccccttgttcttcctgctgaagtctacaaggtcggtgttacccattatttctcatatcttaaagccaaggaggagcttggatatgttccattcaagagctccaaggaaggtatggctgcaactatctcatactggcaggaaaggaagcggagatctttagacggtccaaccatgttcacttggatagctgttacaataggaatgtctgctctttttgctgccggatggttacccgacataggacctgtgcctttcttaagagccatacacctcttctttttccggacaatcacgattgtaaaggctgtcttcattgtagcagtggtactacatgttgcagaaggaatctatgcgtggtttctggctaaacgagtcgacccaggaaatgcaatggggtggttcttgcaaaccagcgctctcgggtttttctcaatgcggtttttattgaagagagcgaaagagcaccagatttaaacccagccttgttttgatgttgtaatcaaaaaaagttttacatgacttgaatgttttcaagattgaaaaacacaaaataaaagatctacattaatcaggatattccaatttctg

SEQ ID NO: 3042 - protein, 498 aa, Arabidopsis thaliana
  peptide (1)..(498): Ceres Seq. ID no. 12329885
  misc_feature (27)..(390): Pfam Name: Pfam Description:  3-beta hydroxysteroid dehydrogenase/ isomerase family
  misc_feature (19)..(498): NCBI GI NO: 15226138 NR Description: putative steroid dehydrogenase
  misc_feature (33)..(402): NCBI GI NO: 21553311 NR Description: NAD(P) dependent steroid dehydrogenase-like
  misc_feature (31)..(418): NCBI GI NO: 21311981 NR Description: RIKEN cDNA 4632417N05 [Mus musculus]
  misc_feature (31)..(288): NCBI GI NO: 34851797 NR Description: similar to RIKEN cDNA 4632417N05
  misc_feature (33)..(393): NCBI GI NO: 18401656 NR Description: 3-beta-hydroxysteroid dehydrogenase, putative
  misc_feature (33)..(393): NCBI GI NO: 30694041 NR Description: 3-beta hydroxysteroid dehydrogenase/ isomerase family
  misc_feature (33)..(393): NCBI GI NO: 21553411 NR Description: 3-beta-hydroxysteroid dehydrogenase, putative
  misc_feature (33)..(386): NCBI GI NO: 15608246 NR Description: hypothetical protein Rv1106c
  misc_feature (33)..(398): NCBI GI NO: 15225272 NR Description: 3-beta-hydroxysteroid dehydrogenase
  misc_feature (33)..(312): NCBI GI NO: 477637 NR Description: cholesterol dehydrogenase (EC 1
RRVVSHLAGQLLRERRRKMHLSENEGVEGNTFVVTGGLGFVGAALCLELVRRGARQVRSFDLRHSSPWSDDLKNSGVRCIQGDVTKKQDVDNALDGADCVLHLASYGMSGKEMLRFGRCDEVNINGTCNVLEAAFKHEITRIVYVSTYNVVFGGKEILNGNEGLPYFPLDDHVDAYSRTKSIAEQLVLKSNGRPFKNGGKRMYTCAIRPAAIYGPGEDRHLPRIVTLTKLGLALFKIGEPSVKSDWIYVENLVLAIILASMGLLDDIPGREGQPVAAGQPYFVSDGYPVNTFEFLRPLLKSLDYDLPKCTISVPFALSLGKIFQGFYTVLYPWLSKSWLPQPLVLPAEVYKVGVTHYFSYLKAKEELGYVPFKSSKEGMAATISYWQERKRRSLDGPTMFTWIAVTIGMSALFAAGWLPDIGPVPFLRAIHLFFFRTITIVKAVFIVAVVLHVAEGIYAWFLAKRVDPGNAMGWFLQTSALGFFSMRFLLKRAKEHQI

SEQ ID NO: 3043 - protein, 480 aa, Arabidopsis thaliana
  peptide (1)..(480): Ceres Seq. ID no. 12329886
  misc_feature (9)..(372): Pfam Name: Pfam Description:  3-beta hydroxysteroid dehydrogenase/ isomerase family
  misc_feature (1)..(480): NCBI GI NO: 15226138 NR Description: putative steroid dehydrogenase
  misc_feature (15)..(384): NCBI GI NO: 21553311 NR Description: NAD(P) dependent steroid dehydrogenase-like
  misc_feature (13)..(400): NCBI GI NO: 21311981 NR Description: RIKEN cDNA 4632417N05 [Mus musculus]
  misc_feature (13)..(270): NCBI GI NO: 34851797 NR Description: similar to RIKEN cDNA 4632417N05
  misc_feature (15)..(375): NCBI GI NO: 18401656 NR Description: 3-beta-hydroxysteroid dehydrogenase, putative
  misc_feature (15)..(375): NCBI GI NO: 30694041 NR Description: 3-beta hydroxysteroid dehydrogenase/ isomerase family
  misc_feature (15)..(375): NCBI GI NO: 21553411 NR Description: 3-beta-hydroxysteroid dehydrogenase, putative
  misc_feature (15)..(368): NCBI GI NO: 15608246 NR Description: hypothetical protein Rv1106c
  misc_feature (15)..(380): NCBI GI NO: 15225272 NR Description: 3-beta-hydroxysteroid dehydrogenase
  misc_feature (15)..(294): NCBI GI NO: 477637 NR Description: cholesterol dehydrogenase (EC 1
MHLSENEGVEGNTFVVTGGLGFVGAALCLELVRRGARQVRSFDLRHSSPWSDDLKNSGVRCIQGDVTKKQDVDNALDGADCVLHLASYGMSGKEMLRFGRCDEVNINGTCNVLEAAFKHEITRIVYVSTYNVVFGGKEILNGNEGLPYFPLDDHVDAYSRTKSIAEQLVLKSNGRPFKNGGKRMYTCAIRPAAIYGPGEDRHLPRIVTLTKLGLALFKIGEPSVKSDWIYVENLVLAIILASMGLLDDIPGREGQPVAAGQPYFVSDGYPVNTFEFLRPLLKSLDYDLPKCTISVPFALSLGKIFQGFYTVLYPWLSKSWLPQPLVLPAEVYKVGVTHYFSYLKAKEELGYVPFKSSKEGMAATISYWQERKRRSLDGPTMFTWIAVTIGMSALFAAGWLPDIGPVPFLRAIHLFFFRTITIVKAVFIVAVVLHVAEGIYAWFLAKRVDPGNAMGWFLQTSALGFFSMRFLLKRAKEHQI

SEQ ID NO: 3044 - protein, 391 aa, Arabidopsis thaliana
  peptide (1)..(391): Ceres Seq. ID no. 12329887
  misc_feature (1)..(283): Pfam Name: Pfam Description:  3-beta hydroxysteroid dehydrogenase/ isomerase family
  misc_feature (1)..(391): NCBI GI NO: 15226138 NR Description: putative steroid dehydrogenase
  misc_feature (1)..(295): NCBI GI NO: 21553311 NR Description: NAD(P) dependent steroid dehydrogenase-like
  misc_feature (1)..(311): NCBI GI NO: 21311981 NR Description: RIKEN cDNA 4632417N05 [Mus musculus]
  misc_feature (1)..(181): NCBI GI NO: 34851797 NR Description: similar to RIKEN cDNA 4632417N05
  misc_feature (1)..(286): NCBI GI NO: 18401656 NR Description: 3-beta-hydroxysteroid dehydrogenase, putative
  misc_feature (1)..(286): NCBI GI NO: 30694041 NR Description: 3-beta hydroxysteroid dehydrogenase/ isomerase family
  misc_feature (1)..(286): NCBI GI NO: 21553411 NR Description: 3-beta-hydroxysteroid dehydrogenase, putative
  misc_feature (1)..(279): NCBI GI NO: 15608246 NR Description: hypothetical protein Rv1106c
  misc_feature (1)..(291): NCBI GI NO: 15225272 NR Description: 3-beta-hydroxysteroid dehydrogenase
  misc_feature (1)..(205): NCBI GI NO: 477637 NR Description: cholesterol dehydrogenase (EC 1
MSGKEMLRFGRCDEVNINGTCNVLEAAFKHEITRIVYVSTYNVVFGGKEILNGNEGLPYFPLDDHVDAYSRTKSIAEQLVLKSNGRPFKNGGKRMYTCAIRPAAIYGPGEDRHLPRIVTLTKLGLALFKIGEPSVKSDWIYVENLVLAIILASMGLLDDIPGREGQPVAAGQPYFVSDGYPVNTFEFLRPLLKSLDYDLPKCTISVPFALSLGKIFQGFYTVLYPWLSKSWLPQPLVLPAEVYKVGVTHYFSYLKAKEELGYVPFKSSKEGMAATISYWQERKRRSLDGPTMFTWIAVTIGMSALFAAGWLPDIGPVPFLRAIHLFFFRTITIVKAVFIVAVVLHVAEGIYAWFLAKRVDPGNAMGWFLQTSALGFFSMRFLLKRAKEHQI

SEQ ID NO: 3045 - DNA, 713 bp, Arabidopsis thaliana
  misc_feature (1)..(713): Ceres Seq. ID no. 12384460
  misc_feature (109)..(109): n is a, c, t, g, unknown, or other
aacgagtactttgtcacggacgacaacgtaggaatgctcaagttggccaaggaagctaactccatcttgtttgattaccggattccgccgatgggatgtgccggcgcantgcgaccgacagtccaatccaaatgaacggtcttccgatcagcatttacgcaccggagacagtcgggtgcgttgtggttgacgggaaaggacattgtgccgccgggacatccacgggtggtttaatgaacaagatgatgggaaggattggtgactcgccgctgataggagccgggacgtatgcgtcggagttttgtggtgtgtcgtgtaccggagaaggagaagccattataagagcaaccctagctcgtgatgtgtcagctgttatggagtataaaggacttaacctccaagaagcggttgattacgtcatcaagcatcgacttgacgaagggttcgctggactcattgctgtctcgaataaaggagaggtggtttgtggttttaactctaatgggatgttcaggggatgtgcaactgaggatggattcatggaggttgctatttgggagtgagaaatatttttagattaagaaaatgtcttactagtatttaatcagtcatcgctctattaatttggttattcattatcataaagctggagtagtaaatttagttctgtcgttatcaccagtcctatattgatttgtgtttaatgcggttcc

SEQ ID NO: 3046 - protein, 155 aa, Arabidopsis thaliana
  peptide (1)..(155): Ceres Seq. ID no. 12384461
  misc_feature (1)..(155): Pfam Name: Pfam Description:  Asparaginase
  misc_feature (1)..(155): NCBI GI NO: 18401029 NR Description: putative L-asparaginase; protein id: At3g16150
  misc_feature (1)..(155): NCBI GI NO: 26451560 NR Description: putative L-asparaginase [Arabidopsis thaliana]
  misc_feature (1)..(155): NCBI GI NO: 23428804 NR Description: L-asparaginase [Glycine max]
  misc_feature (1)..(155): NCBI GI NO: 29420787 NR Description: L-asparaginase [Glycine max]
  misc_feature (13)..(155): NCBI GI NO: 10241428 NR Description: putative l-asparaginase
  misc_feature (1)..(155): NCBI GI NO: 11066973 NR Description: asparaginase [Hordeum vulgare]
  misc_feature (25)..(154): NCBI GI NO: 1076292 NR Description: asparaginase (EC 3.5.1.1) - Arabidopsis thaliana
  misc_feature (25)..(154): NCBI GI NO: 15241528 NR Description: asparaginase; protein id: At5g08100
  misc_feature (25)..(154): NCBI GI NO: 231574 NR Description: L-ASPARAGINASE (L-ASPARAGINE AMIDOHYDROLASE)
  misc_feature (25)..(154): NCBI GI NO: 6685231 NR Description: L-asparaginase (L-asparagine amidohydrolase)
  misc_feature (5)..(5): Xaa is any aa, unknown or other
MCRRXATDSPIQMNGLPISIYAPETVGCVVVDGKGHCAAGTSTGGLMNKMMGRIGDSPLIGAGTYASEFCGVSCTGEGEAIIRATLARDVSAVMEYKGLNLQEAVDYVIKHRLDEGFAGLIAVSNKGEVVCGFNSNGMFRGCATEDGFMEVAIWE

SEQ ID NO: 3047 - protein, 143 aa, Arabidopsis thaliana
  peptide (1)..(143): Ceres Seq. ID no. 12384462
  misc_feature (1)..(143): Pfam Name: Pfam Description:  Asparaginase
  misc_feature (1)..(143): NCBI GI NO: 18401029 NR Description: putative L-asparaginase; protein id: At3g16150
  misc_feature (1)..(143): NCBI GI NO: 26451560 NR Description: putative L-asparaginase [Arabidopsis thaliana]
  misc_feature (1)..(143): NCBI GI NO: 23428804 NR Description: L-asparaginase [Glycine max]
  misc_feature (1)..(143): NCBI GI NO: 29420787 NR Description: L-asparaginase [Glycine max]
  misc_feature (1)..(143): NCBI GI NO: 10241428 NR Description: putative l-asparaginase
  misc_feature (1)..(143): NCBI GI NO: 11066973 NR Description: asparaginase [Hordeum vulgare]
  misc_feature (13)..(142): NCBI GI NO: 1076292 NR Description: asparaginase (EC 3.5.1.1) - Arabidopsis thaliana
  misc_feature (13)..(142): NCBI GI NO: 15241528 NR Description: asparaginase; protein id: At5g08100
  misc_feature (13)..(142): NCBI GI NO: 231574 NR Description: L-ASPARAGINASE (L-ASPARAGINE AMIDOHYDROLASE)
  misc_feature (13)..(142): NCBI GI NO: 6685231 NR Description: L-asparaginase (L-asparagine amidohydrolase)
MNGLPISIYAPETVGCVVVDGKGHCAAGTSTGGLMNKMMGRIGDSPLIGAGTYASEFCGVSCTGEGEAIIRATLARDVSAVMEYKGLNLQEAVDYVIKHRLDEGFAGLIAVSNKGEVVCGFNSNGMFRGCATEDGFMEVAIWE

SEQ ID NO: 3048 - protein, 109 aa, Arabidopsis thaliana
  peptide (1)..(109): Ceres Seq. ID no. 12384463
  misc_feature (1)..(109): Pfam Name: Pfam Description:  Asparaginase
  misc_feature (1)..(109): NCBI GI NO: 18401029 NR Description: putative L-asparaginase; protein id: At3g16150
  misc_feature (1)..(109): NCBI GI NO: 26451560 NR Description: putative L-asparaginase [Arabidopsis thaliana]
  misc_feature (1)..(109): NCBI GI NO: 23428804 NR Description: L-asparaginase [Glycine max]
  misc_feature (1)..(109): NCBI GI NO: 29420787 NR Description: L-asparaginase [Glycine max]
  misc_feature (1)..(109): NCBI GI NO: 10241428 NR Description: putative l-asparaginase
  misc_feature (1)..(109): NCBI GI NO: 11066973 NR Description: asparaginase [Hordeum vulgare]
  misc_feature (1)..(108): NCBI GI NO: 1076292 NR Description: asparaginase (EC 3.5.1.1) - Arabidopsis thaliana
  misc_feature (1)..(108): NCBI GI NO: 15241528 NR Description: asparaginase; protein id: At5g08100
  misc_feature (1)..(108): NCBI GI NO: 231574 NR Description: L-ASPARAGINASE (L-ASPARAGINE AMIDOHYDROLASE)
  misc_feature (1)..(108): NCBI GI NO: 6685231 NR Description: L-asparaginase (L-asparagine amidohydrolase)
MNKMMGRIGDSPLIGAGTYASEFCGVSCTGEGEAIIRATLARDVSAVMEYKGLNLQEAVDYVIKHRLDEGFAGLIAVSNKGEVVCGFNSNGMFRGCATEDGFMEVAIWE

SEQ ID NO: 3049 - DNA, 907 bp, Arabidopsis thaliana
  misc_feature (1)..(907): Ceres Seq. ID no. 13646188
agaaattaaacaagtgtatctatatcgtatatatggactgcttacagatggtgttcaagttatttccaaactggaaacgtgaggcagaagttaaaaagctcgttgcaggttacaaggttcatggcgatcctttctccaccaacacaaggcgtgtcctcgctgttctccatgagaaaagactctcttacgagcctattaccgtcaaattgcaaaccggtgaacacaaaaccgaacctttcctctctctcaacccatttggtcaagtccctgtttttgaggatggaagtgttaagctgtatgaatcccgagccatcacacaatacatcgcatatgttcatagctcaagaggcacacagcttctgaatcttagaagtcacgagacaatggcaactctaacaatgtggatggaaatcgaagctcatcagtttgatccacccgcatcgaaactcacttgggaacaagtcattaagcctatctacggtctagagactgaccaaacaatcgtcaaagagaacgaggctattctagagaaagttctaaatatctacgagaaacgactcgaagaatctagattcttggcttgtaatagctttactttggttgatcttcatcacctaccaaacatacaataccttttgggaactccaacgaagaaattgttcgaaaaaagatctaaagtgcgtaagtgggtggatgagattacgagtagagaggcttggaaaatggcatgtgatcaagagaaatcttggtttaataagccaaggaactaactgaaagcagaagtaatctttacgtgtgaatgtgtgtgtatgtgtatgttgagtttgggtctttgtttgtaagcttgtgcgtgttgtttgttgccttgcgaatcttattttatgtttggttaatatatgtttcatgc

SEQ ID NO: 3050 - protein, 255 aa, Arabidopsis thaliana
  peptide (1)..(255): Ceres Seq. ID no. 13646189
  misc_feature (11)..(255): NCBI GI NO: 30678437 NR Description: glutathione transferase, putative
  misc_feature (11)..(255): NCBI GI NO: 18379034 NR Description: glutathione transferase, putative
  misc_feature (16)..(255): NCBI GI NO: 25287129 NR Description: hypothetical protein F22D16
  misc_feature (37)..(255): NCBI GI NO: 15218641 NR Description: glutathione transferase, putative
  misc_feature (37)..(255): NCBI GI NO: 25518742 NR Description: hypothetical protein F22D16
  misc_feature (34)..(240): NCBI GI NO: 15218639 NR Description: glutathione transferase, putative
  misc_feature (34)..(240): NCBI GI NO: 17377644 NR Description: Glutathione S-transferase 11 (GST class-phi)
  misc_feature (34)..(238): NCBI GI NO: 15227063 NR Description: glutathione transferase, putative
  misc_feature (34)..(236): NCBI GI NO: 15218640 NR Description: glutathione transferase, putative
  misc_feature (34)..(238): NCBI GI NO: 31790097 NR Description: glutathione S-transferase 3 [Brassica juncea]
KLNKCIYIVYMDCLQMVFKLFPNWKREAEVKKLVAGYKVHGDPFSTNTRRVLAVLHEKRLSYEPITVKLQTGEHKTEPFLSLNPFGQVPVFEDGSVKLYESRAITQYIAYVHSSRGTQLLNLRSHETMATLTMWMEIEAHQFDPPASKLTWEQVIKPIYGLETDQTIVKENEAILEKVLNIYEKRLEESRFLACNSFTLVDLHHLPNIQYLLGTPTKKLFEKRSKVRKWVDEITSREAWKMACDQEKSWFNKPRN

SEQ ID NO: 3051 - protein, 245 aa, Arabidopsis thaliana
  peptide (1)..(245): Ceres Seq. ID no. 13646190
  misc_feature (1)..(245): NCBI GI NO: 30678437 NR Description: glutathione transferase, putative
  misc_feature (1)..(245): NCBI GI NO: 18379034 NR Description: glutathione transferase, putative
  misc_feature (6)..(245): NCBI GI NO: 25287129 NR Description: hypothetical protein F22D16
  misc_feature (27)..(245): NCBI GI NO: 15218641 NR Description: glutathione transferase, putative
  misc_feature (27)..(245): NCBI GI NO: 25518742 NR Description: hypothetical protein F22D16
  misc_feature (24)..(230): NCBI GI NO: 15218639 NR Description: glutathione transferase, putative
  misc_feature (24)..(230): NCBI GI NO: 17377644 NR Description: Glutathione S-transferase 11 (GST class-phi)
  misc_feature (24)..(228): NCBI GI NO: 15227063 NR Description: glutathione transferase, putative
  misc_feature (24)..(226): NCBI GI NO: 15218640 NR Description: glutathione transferase, putative
  misc_feature (24)..(228): NCBI GI NO: 31790097 NR Description: glutathione S-transferase 3 [Brassica juncea]
MDCLQMVFKLFPNWKREAEVKKLVAGYKVHGDPFSTNTRRVLAVLHEKRLSYEPITVKLQTGEHKTEPFLSLNPFGQVPVFEDGSVKLYESRAITQYIAYVHSSRGTQLLNLRSHETMATLTMWMEIEAHQFDPPASKLTWEQVIKPIYGLETDQTIVKENEAILEKVLNIYEKRLEESRFLACNSFTLVDLHHLPNIQYLLGTPTKKLFEKRSKVRKWVDEITSREAWKMACDQEKSWFNKPRN

SEQ ID NO: 3052 - protein, 240 aa, Arabidopsis thaliana
  peptide (1)..(240): Ceres Seq. ID no. 13646191
  misc_feature (1)..(240): NCBI GI NO: 30678437 NR Description: glutathione transferase, putative
  misc_feature (1)..(240): NCBI GI NO: 18379034 NR Description: glutathione transferase, putative
  misc_feature (1)..(240): NCBI GI NO: 25287129 NR Description: hypothetical protein F22D16
  misc_feature (22)..(240): NCBI GI NO: 15218641 NR Description: glutathione transferase, putative
  misc_feature (22)..(240): NCBI GI NO: 25518742 NR Description: hypothetical protein F22D16
  misc_feature (19)..(225): NCBI GI NO: 15218639 NR Description: glutathione transferase, putative
  misc_feature (19)..(225): NCBI GI NO: 17377644 NR Description: Glutathione S-transferase 11 (GST class-phi)
  misc_feature (19)..(223): NCBI GI NO: 15227063 NR Description: glutathione transferase, putative
  misc_feature (19)..(221): NCBI GI NO: 15218640 NR Description: glutathione transferase, putative
  misc_feature (19)..(223): NCBI GI NO: 31790097 NR Description: glutathione S-transferase 3 [Brassica juncea]
MVFKLFPNWKREAEVKKLVAGYKVHGDPFSTNTRRVLAVLHEKRLSYEPITVKLQTGEHKTEPFLSLNPFGQVPVFEDGSVKLYESRAITQYIAYVHSSRGTQLLNLRSHETMATLTMWMEIEAHQFDPPASKLTWEQVIKPIYGLETDQTIVKENEAILEKVLNIYEKRLEESRFLACNSFTLVDLHHLPNIQYLLGTPTKKLFEKRSKVRKWVDEITSREAWKMACDQEKSWFNKPRN

SEQ ID NO: 3053 - DNA, 972 bp, Arabidopsis thaliana
  misc_feature (1)..(972): Ceres Seq. ID no. 12330362
aaaaaacggattcttgtgatattgagcgtcgtcttctcttccttagccaaagccagatctgcttctttttcgctgcgtcgtcgagaggtctctctttgaggaagctaattccttcttcttcttcaccatccgtttcaagaataacaatggaaggaagcggtggtgacagtggttcgatggctacgcctgtacaaaagaaagtacatgaggcatggagggtttaccaatattatctggacaagactacacctcattcaactaacaggtggatcggaacacttgttgtctttcttatctactgtttgagggtttactctattcacggattctacatcatctcctatggtcttggaatctacctcctgaatctgcttatcgggtttttgtctcctcttgttgatcctgagctcgaggtatctgatggagctactctgcctactcgaggttctgatgagttcaagccatttatccgccgtctcccggagtttaaattctggtactccatgactaaggcattctgcatagcctttcttatgacattcttctcggtgtttgatgttcccgtcttctggcccatactgctttgctactgggtcgttctctttgtcctcaccatgagacgccaaatagcccacatgatcaagcacaagtacattcctttcagcatcggaaaacagaaatatagcggccggaaatcttctgcgaacagcggcggcggctctcgtgctgattgatttcaacttgcagccacattttctgcagaaaaagaatgaaaaaaagttgggttttcacgttggaacgttttgtagtgatgaattactagtattgttatgcttctacaatgaagaagaaggaaacagaaaagggtcattagtttttatgttgcaggaatattgttctttgttagttccctttaatccaagtacctctgctgtaaatataattcaattttatttcgaaacaaattcattc

SEQ ID NO: 3054 - protein, 243 aa, Arabidopsis thaliana
  peptide (1)..(243): Ceres Seq. ID no. 12330363
  misc_feature (50)..(230): Pfam Name: Pfam Description:  Rer1 family
  misc_feature (49)..(243): NCBI GI NO: 11281669 NR Description: endoplasmatic reticulum retrieval protein Rer1B
  misc_feature (49)..(243): NCBI GI NO: 15226596 NR Description: AtRer1B; protein id: At2g21600
  misc_feature (49)..(243): NCBI GI NO: 15234975 NR Description: AtRer1A; protein id: At4g39220
  misc_feature (29)..(226): NCBI GI NO: 34894094 NR Description: putative Rer1A protein (AtRer1A)
  misc_feature (35)..(231): NCBI GI NO: 18400234 NR Description: putative integral membrane protein
  misc_feature (37)..(166): NCBI GI NO: 35210534 NR Description: putative endoplasmatic reticulum retrieval protein Rer1B
  misc_feature (150)..(225): NCBI GI NO: 35210534 NR Description: putative endoplasmatic reticulum retrieval protein Rer1B
  misc_feature (35)..(231): NCBI GI NO: 30682033 NR Description: integral membrane protein -related
  misc_feature (35)..(225): NCBI GI NO: 7488292 NR Description: probable integral membrane protein At2g23310
  misc_feature (51)..(224): NCBI GI NO: 18398679 NR Description: putative integral membrane protein
KTDSCDIERRLLFLSQSQICFFFAASSRGLSLRKLIPSSSSPSVSRITMEGSGGDSGSMATPVQKKVHEAWRVYQYYLDKTTPHSTNRWIGTLVVFLIYCLRVYSIHGFYIISYGLGIYLLNLLIGFLSPLVDPELEVSDGATLPTRGSDEFKPFIRRLPEFKFWYSMTKAFCIAFLMTFFSVFDVPVFWPILLCYWVVLFVLTMRRQIAHMIKHKYIPFSIGKQKYSGRKSSANSGGGSRAD

SEQ ID NO: 3055 - protein, 195 aa, Arabidopsis thaliana
  peptide (1)..(195): Ceres Seq. ID no. 12330364
  misc_feature (2)..(182): Pfam Name: Pfam Description:  Rer1 family
  misc_feature (1)..(195): NCBI GI NO: 11281669 NR Description: endoplasmatic reticulum retrieval protein Rer1B
  misc_feature (1)..(195): NCBI GI NO: 15226596 NR Description: AtRer1B; protein id: At2g21600
  misc_feature (1)..(195): NCBI GI NO: 15234975 NR Description: AtRer1A; protein id: At4g39220
  misc_feature (1)..(178): NCBI GI NO: 34894094 NR Description: putative Rer1A protein (AtRer1A)
  misc_feature (1)..(183): NCBI GI NO: 18400234 NR Description: putative integral membrane protein
  misc_feature (1)..(118): NCBI GI NO: 35210534 NR Description: putative endoplasmatic reticulum retrieval protein Rer1B
  misc_feature (102)..(177): NCBI GI NO: 35210534 NR Description: putative endoplasmatic reticulum retrieval protein Rer1B
  misc_feature (1)..(183): NCBI GI NO: 30682033 NR Description: integral membrane protein -related
  misc_feature (1)..(177): NCBI GI NO: 7488292 NR Description: probable integral membrane protein At2g23310
  misc_feature (3)..(176): NCBI GI NO: 18398679 NR Description: putative integral membrane protein
MEGSGGDSGSMATPVQKKVHEAWRVYQYYLDKTTPHSTNRWIGTLVVFLIYCLRVYSIHGFYIISYGLGIYLLNLLIGFLSPLVDPELEVSDGATLPTRGSDEFKPFIRRLPEFKFWYSMTKAFCIAFLMTFFSVFDVPVFWPILLCYWVVLFVLTMRRQIAHMIKHKYIPFSIGKQKYSGRKSSANSGGGSRAD

SEQ ID NO: 3056 - protein, 185 aa, Arabidopsis thaliana
  peptide (1)..(185): Ceres Seq. ID no. 12330365
  misc_feature (1)..(172): Pfam Name: Pfam Description:  Rer1 family
  misc_feature (1)..(185): NCBI GI NO: 11281669 NR Description: endoplasmatic reticulum retrieval protein Rer1B
  misc_feature (1)..(185): NCBI GI NO: 15226596 NR Description: AtRer1B; protein id: At2g21600
  misc_feature (1)..(185): NCBI GI NO: 15234975 NR Description: AtRer1A; protein id: At4g39220
  misc_feature (1)..(168): NCBI GI NO: 34894094 NR Description: putative Rer1A protein (AtRer1A)
  misc_feature (1)..(173): NCBI GI NO: 18400234 NR Description: putative integral membrane protein
  misc_feature (1)..(108): NCBI GI NO: 35210534 NR Description: putative endoplasmatic reticulum retrieval protein Rer1B
  misc_feature (92)..(167): NCBI GI NO: 35210534 NR Description: putative endoplasmatic reticulum retrieval protein Rer1B
  misc_feature (1)..(173): NCBI GI NO: 30682033 NR Description: integral membrane protein -related
  misc_feature (1)..(167): NCBI GI NO: 7488292 NR Description: probable integral membrane protein At2g23310
  misc_feature (1)..(166): NCBI GI NO: 18398679 NR Description: putative integral membrane protein
MATPVQKKVHEAWRVYQYYLDKTTPHSTNRWIGTLVVFLIYCLRVYSIHGFYIISYGLGIYLLNLLIGFLSPLVDPELEVSDGATLPTRGSDEFKPFIRRLPEFKFWYSMTKAFCIAFLMTFFSVFDVPVFWPILLCYWVVLFVLTMRRQIAHMIKHKYIPFSIGKQKYSGRKSSANSGGGSRAD

SEQ ID NO: 3057 - DNA, 1842 bp, Arabidopsis thaliana; identical to SEQ ID NO: 2497
  misc_feature (1)..(1842): Ceres Seq. ID no. 13509651

SEQ ID NO: 3058 - protein, 497 aa, Arabidopsis thaliana; identical to SEQ ID NO: 2498
  peptide (1)..(497): Ceres Seq. ID no. 13509652
  misc_feature (1)..(497): NCBI GI NO: 25372816 NR Description: F23A5.27 [imported] - Arabidopsis thaliana
  misc_feature (1)..(497): NCBI GI NO: 15220866 NR Description: myrosinase precursor -related
  misc_feature (3)..(497): NCBI GI NO: 30684673 NR Description: expressed protein [Arabidopsis thaliana]
  misc_feature (1)..(497): NCBI GI NO: 38175489 NR Description: putative myrosinase precursor
  misc_feature (125)..(497): NCBI GI NO: 18394314 NR Description: expressed protein [Arabidopsis thaliana]
  misc_feature (125)..(497): NCBI GI NO: 21618002 NR Description: unknown [Arabidopsis thaliana]
  misc_feature (234)..(488): NCBI GI NO: 14517360 NR Description: At1g80910/F23A5_21 [Arabidopsis thaliana]
  misc_feature (3)..(312): NCBI GI NO: 18394314 NR Description: expressed protein [Arabidopsis thaliana]
  misc_feature (192)..(497): NCBI GI NO: 18266049 NR Description: myrosinase precursor [Brassica oleracea]
  misc_feature (3)..(312): NCBI GI NO: 21618002 NR Description: unknown [Arabidopsis thaliana]

SEQ ID NO: 3059 - protein, 495 aa, Arabidopsis thaliana; identical to SEQ ID NO: 2499
  peptide (1)..(495): Ceres Seq. ID no. 13509653
  misc_feature (1)..(495): NCBI GI NO: 25372816 NR Description: F23A5.27 [imported] - Arabidopsis thaliana
  misc_feature (1)..(495): NCBI GI NO: 15220866 NR Description: myrosinase precursor -related
  misc_feature (1)..(495): NCBI GI NO: 30684673 NR Description: expressed protein [Arabidopsis thaliana]
  misc_feature (1)..(495): NCBI GI NO: 38175489 NR Description: putative myrosinase precursor
  misc_feature (123)..(495): NCBI GI NO: 18394314 NR Description: expressed protein [Arabidopsis thaliana]
  misc_feature (123)..(495): NCBI GI NO: 21618002 NR Description: unknown [Arabidopsis thaliana]
  misc_feature (232)..(486): NCBI GI NO: 14517360 NR Description: At1g80910/F23A5_21 [Arabidopsis thaliana]
  misc_feature (1)..(310): NCBI GI NO: 18394314 NR Description: expressed protein [Arabidopsis thaliana]
  misc_feature (190)..(495): NCBI GI NO: 18266049 NR Description: myrosinase precursor [Brassica oleracea]
  misc_feature (1)..(310): NCBI GI NO: 21618002 NR Description: unknown [Arabidopsis thaliana]

SEQ ID NO: 3060 - protein, 492 aa, Arabidopsis thaliana; identical to SEQ ID NO: 2500
  peptide (1)..(492): Ceres Seq. ID no. 13509654
  misc_feature (1)..(492): NCBI GI NO: 25372816 NR Description: F23A5.27 [imported] - Arabidopsis thaliana
  misc_feature (1)..(492): NCBI GI NO: 15220866 NR Description: myrosinase precursor -related
  misc_feature (1)..(492): NCBI GI NO: 30684673 NR Description: expressed protein [Arabidopsis thaliana]
  misc_feature (1)..(492): NCBI GI NO: 38175489 NR Description: putative myrosinase precursor
  misc_feature (120)..(492): NCBI GI NO: 18394314 NR Description: expressed protein [Arabidopsis thaliana]
  misc_feature (120)..(492): NCBI GI NO: 21618002 NR Description: unknown [Arabidopsis thaliana]
  misc_feature (229)..(483): NCBI GI NO: 14517360 NR Description: At1g80910/F23A5_21 [Arabidopsis thaliana]
  misc_feature (1)..(307): NCBI GI NO: 18394314 NR Description: expressed protein [Arabidopsis thaliana]
  misc_feature (187)..(492): NCBI GI NO: 18266049 NR Description: myrosinase precursor [Brassica oleracea]
  misc_feature (1)..(307): NCBI GI NO: 21618002 NR Description: unknown [Arabidopsis thaliana]

SEQ ID NO: 3061 - DNA, 883 bp, Arabidopsis thaliana
  misc_feature (1)..(883): Ceres Seq. ID no. 12560092
agaaccctttcttctctctctctctctccctaaaatcaatctatcttttttttaaccattgcgtttctttttttccctttccgagcagatctgagccgaaggttaactacatgaccggcgctgagaacggcgtgagaatgacgtcaccagagacgtcttcaacatcttccctcgccaccacaagtgtccacgtaagcgctctcgacggactcgtgaacgtgaactctctcttcaccatcgccgtcttcgttggtctttccttagcgactccaggacaacacagcctcgaacaacgatccagctgcgacgcaagtgctgacgtcgccaagaagctactggtcttcgaagtcgtctccttcagcttcttcctcttctcctctcttgtagctcagggtcttaagcttgccttaaaccttcttaatagcaaagacgtcaacgagattttcagagctcacatcaatatcaaggttttgagatggggaatgatggcttctgctgtcggatctgtaatgggctgtctcttcttgatgctctctatggttaatgtgattcagatccgtcttggtttgctctcttgcggcagcaaatcggcggctcaagctgttgcaacgctcgtcactctggtttcctctgctctgctgatttacatctctaccgccatttacgctttctggcattgatgctatgtcaaaattggataatgtccatggctttgttttgattagccaatgtgtaatttcatcatcaatgccttccaatctagttttttgtttttttgtttcggagaatgaagaatcaatcacaagatacagaacattggattatgagaatttgatgttaagcttttatgaacagaaatgaagcattatgtttgttgtttggt

SEQ ID NO: 3062 - protein, 225 aa, Arabidopsis thaliana
  peptide (1)..(225): Ceres Seq. ID no. 12560093
  misc_feature (37)..(225): NCBI GI NO: 18397969 NR Description: expressed protein; protein id: At3g07510
  misc_feature (46)..(225): NCBI GI NO: 6041846 NR Description: unknown protein [Arabidopsis thaliana]
  misc_feature (39)..(225): NCBI GI NO: 37531676 NR Description: hypothetical protein
  misc_feature (41)..(223): NCBI GI NO: 15226312 NR Description: hypothetical protein; protein id: At2g01580.1
  misc_feature (59)..(223): NCBI GI NO: 15239293 NR Description: putative protein; protein id: At5g05950
  misc_feature (60)..(223): NCBI GI NO: 34395171 NR Description: unknown protein
  misc_feature (60)..(223): NCBI GI NO: 34900646 NR Description: hypothetical protein~similar to Arabidopsis thalianachromosome5
  misc_feature (62)..(143): NCBI GI NO: 38345578 NR Description: OSJNBa0027H06.14
  misc_feature (156)..(225): NCBI GI NO: 38345578 NR Description: OSJNBa0027H06.14
  misc_feature (62)..(223): NCBI GI NO: 15232676 NR Description: putative protein; protein id: At3g46890.1
NPFFSLSLSLKSIYLFFNHCVSFFPFPSRSEPKVNYMTGAENGVRMTSPETSSTSSLATTSVHVSALDGLVNVNSLFTIAVFVGLSLATPGQHSLEQRSSCDASADVAKKLLVFEVVSFSFFLFSSLVAQGLKLALNLLNSKDVNEIFRAHINIKVLRWGMMASAVGSVMGCLFLMLSMVNVIQIRLGLLSCGSKSAAQAVATLVTLVSSALLIYISTAIYAFWH

SEQ ID NO: 3063 - protein, 189 aa, Arabidopsis thaliana; identical to SEQ ID NO: 2176
  peptide (1)..(189): Ceres Seq. ID no. 12560094
  misc_feature (1)..(189): NCBI GI NO: 18397969 NR Description: expressed protein; protein id: At3g07510
  misc_feature (10)..(189): NCBI GI NO: 6041846 NR Description: unknown protein [Arabidopsis thaliana]
  misc_feature (3)..(189): NCBI GI NO: 37531676 NR Description: hypothetical protein
  misc_feature (5)..(187): NCBI GI NO: 15226312 NR Description: hypothetical protein; protein id: At2g01580.1
  misc_feature (23)..(187): NCBI GI NO: 15239293 NR Description: putative protein; protein id: At5g05950
  misc_feature (24)..(187): NCBI GI NO: 34395171 NR Description: unknown protein
  misc_feature (24)..(187): NCBI GI NO: 34900646 NR Description: hypothetical protein~similar to Arabidopsis thalianachromosome5
  misc_feature (26)..(107): NCBI GI NO: 38345578 NR Description: OSJNBa0027H06.14
  misc_feature (120)..(189): NCBI GI NO: 38345578 NR Description: OSJNBa0027H06.14
  misc_feature (26)..(187): NCBI GI NO: 15232676 NR Description: putative protein; protein id: At3g46890.1

SEQ ID NO: 3064 - protein, 180 aa, Arabidopsis thaliana; identical to SEQ ID NO: 2177
  peptide (1)..(180): Ceres Seq. ID no. 12560095
  misc_feature (1)..(180): NCBI GI NO: 18397969 NR Description: expressed protein; protein id: At3g07510
  misc_feature (1)..(180): NCBI GI NO: 6041846 NR Description: unknown protein [Arabidopsis thaliana]
  misc_feature (1)..(180): NCBI GI NO: 37531676 NR Description: hypothetical protein
  misc_feature (1)..(178): NCBI GI NO: 15226312 NR Description: hypothetical protein; protein id: At2g01580.1
  misc_feature (14)..(178): NCBI GI NO: 15239293 NR Description: putative protein; protein id: At5g05950
  misc_feature (15)..(178): NCBI GI NO: 34395171 NR Description: unknown protein
  misc_feature (15)..(178): NCBI GI NO: 34900646 NR Description: hypothetical protein~similar to Arabidopsis thalianachromosome5
  misc_feature (17)..(98): NCBI GI NO: 38345578 NR Description: OSJNBa0027H06.14
  misc_feature (111)..(180): NCBI GI NO: 38345578 NR Description: OSJNBa0027H06.14
  misc_feature (17)..(178): NCBI GI NO: 15232676 NR Description: putative protein; protein id: At3g46890.1

SEQ ID NO: 3065 - DNA, 613 bp, Arabidopsis thaliana
  misc_feature (1)..(613): Ceres Seq. ID no. 12602584
atctctttcctcaatcggagtgagcgcaaaaaatcaaaaattcgccgagagcacaaaccctaatggcttctctctcaatggcttccgttaacgttagcttctgtcatcctttacgctcttcttctccaaaggtctcacttcgcagttccgttcatttcgcgacgagtctttcctcaagtcactccatttctgggcttcgcgctgttttgcctctgaagatttctacagttgcttcccccaattctcaaaagcttcattcttttaccgttttcgctcataagggctacaagatgaagacccacaaggcctcagcgaagcggttcagagtgacgggtagagggaagattgtgaggaggagatctggaaagcagcatttgttagctaagaagaacaacaagaggaaattacgtctatcgaaaatgacggaagtgaaccggagcgactatgacaacgtgatcggagctctgccctacttgaaagtcaatcgaaaggcgacttaagcagagcaggcttgatccttttcttacctgcaattctcattttgtaatctaaagttgtggtaatatccttttgtattgtgatataatttggtcaatgagttgatttttgtttc

SEQ ID NO: 3066 - protein, 145 aa, Arabidopsis thaliana
  peptide (1)..(145): Ceres Seq. ID no. 12602585
  misc_feature (77)..(135): Pfam Name: Pfam Description:  Ribosomal protein L35
  misc_feature (1)..(145): NCBI GI NO: 30682291 NR Description: chloroplast ribosomal protein L35 -related
  misc_feature (6)..(145): NCBI GI NO: 7572943 NR Description: ribosomal protein L35 [Arabidopsis thaliana]
  misc_feature (1)..(120): NCBI GI NO: 25295676 NR Description: probable chloroplast ribosomal protein L35
  misc_feature (2)..(143): NCBI GI NO: 132918 NR Description: 50S RIBOSOMAL PROTEIN L35, CHLOROPLAST PRECURSOR
  misc_feature (47)..(144): NCBI GI NO: 28411202 NR Description: putative plastid ribosomal protein L35 [Zea mays]
  misc_feature (47)..(144): NCBI GI NO: 28411216 NR Description: putative plastid ribosomal protein L35 [Zea mays]
  misc_feature (73)..(144): NCBI GI NO: 28411206 NR Description: putative plastid ribosomal protein L35 [Zea mays]
  misc_feature (73)..(144): NCBI GI NO: 28411209 NR Description: putative plastid ribosomal protein L35 [Zea mays]
  misc_feature (73)..(144): NCBI GI NO: 28411204 NR Description: putative plastid ribosomal protein L35 [Zea mays]
  misc_feature (76)..(138): NCBI GI NO: 17230919 NR Description: 50S ribosomal protein L35 [Nostoc sp. PCC 7120]
MASLSMASVNVSFCHPLRSSSPKVSLRSSVHFATSLSSSHSISGLRAVLPLKISTVASPNSQKLHSFTVFAHKGYKMKTHKASAKRFRVTGRGKIVRRRSGKQHLLAKKNNKRKLRLSKMTEVNRSDYDNVIGALPYLKVNRKAT

SEQ ID NO: 3067 - protein, 140 aa, Arabidopsis thaliana
  peptide (1)..(140): Ceres Seq. ID no. 12602586
  misc_feature (72)..(130): Pfam Name: Pfam Description:  Ribosomal protein L35
  misc_feature (1)..(140): NCBI GI NO: 30682291 NR Description: chloroplast ribosomal protein L35 -related
  misc_feature (1)..(140): NCBI GI NO: 7572943 NR Description: ribosomal protein L35 [Arabidopsis thaliana]
  misc_feature (1)..(115): NCBI GI NO: 25295676 NR Description: probable chloroplast ribosomal protein L35
  misc_feature (1)..(138): NCBI GI NO: 132918 NR Description: 50S RIBOSOMAL PROTEIN L35, CHLOROPLAST PRECURSOR
  misc_feature (42)..(139): NCBI GI NO: 28411202 NR Description: putative plastid ribosomal protein L35 [Zea mays]
  misc_feature (42)..(139): NCBI GI NO: 28411216 NR Description: putative plastid ribosomal protein L35 [Zea mays]
  misc_feature (68)..(139): NCBI GI NO: 28411206 NR Description: putative plastid ribosomal protein L35 [Zea mays]
  misc_feature (68)..(139): NCBI GI NO: 28411209 NR Description: putative plastid ribosomal protein L35 [Zea mays]
  misc_feature (68)..(139): NCBI GI NO: 28411204 NR Description: putative plastid ribosomal protein L35 [Zea mays]
  misc_feature (71)..(133): NCBI GI NO: 17230919 NR Description: 50S ribosomal protein L35 [Nostoc sp. PCC 7120]
MASVNVSFCHPLRSSSPKVSLRSSVHFATSLSSSHSISGLRAVLPLKISTVASPNSQKLHSFTVFAHKGYKMKTHKASAKRFRVTGRGKIVRRRSGKQHLLAKKNNKRKLRLSKMTEVNRSDYDNVIGALPYLKVNRKAT

SEQ ID NO: 3068 - DNA, 933 bp, Arabidopsis thaliana
  misc_feature (1)..(933): Ceres Seq. ID no. 12601209
aaatctctctgtgtgatcccacttgtcatcctcctccacaacataaagcttgagaccataaccctttagcgttttcggctaaagctttcgctgactactacaacaatggcgtcctcatccctttcccctgctactcagcttggttctagcagaagtgctttgatggcgatgtcaagtgggttgtttgtgaagccaacgaagatgaatcatcaaatggttagaaaagagaagattggattgagaatttcttgtcaagcgtcgagtattccagcagacagagttccagatatggaaaagaggaagactttgaatcttcttcttcttggggctctttctctacctactggctacatgcttgtcccttacgctaccttctttgttcctcctggaaccggaggtggaggtggtggtactccagccaaggatgcccttggaaacgatgtagttgcagcggaatggcttaagactcatggtcccggtgaccgaaccttgacccaaggattaaagggagatccgacttacctagttgtagagaacgacaagactctagcgacatacggtatcaacgcagtgtgcactcatcttggatgtgttgtgccatggaacaaagctgagaacaagtttctatgtccttgccatggatcccaatacaacgcccaaggaagagtcgttagaggtccagccccattgtcgctagcgttggctcacgcggatatagatgaagctgggaaggttctttttgttccatgggtggaaactgacttcaggactggtgatgctccatggtggtcttaagactcttcaacaagaaaaagagaaagatttggtctttttgtgtaagacttgtttgaatgttcttataatgtataagctacatttcatcgcaattactctgtgaattcttgcctcttatatgaaatattatgttcattc

SEQ ID NO: 3069 - protein, 229 aa, Arabidopsis thaliana
  peptide (1)..(229): Ceres Seq. ID no. 12601210
  misc_feature (113)..(205): Pfam Name: Pfam Description:  Rieske [2Fe-2S] domain
  misc_feature (1)..(229): NCBI GI NO: 15236275 NR Description: putative component of cytochrome B6-F complex
  misc_feature (1)..(229): NCBI GI NO: 9843639 NR Description: Rieske FeS protein [Arabidopsis thaliana]
  misc_feature (20)..(229): NCBI GI NO: 30679426 NR Description: Rieske FeS protein
  misc_feature (1)..(229): NCBI GI NO: 401249 NR Description: Cytochrome B6-F complex iron-sulfur subunit 2
  misc_feature (1)..(229): NCBI GI NO: 401247 NR Description: Cytochrome B6-F complex iron-sulfur subunit 1
  misc_feature (1)..(229): NCBI GI NO: 19999 NR Description: Rieske Fe/S protein of cytochrome b6/f complex
  misc_feature (1)..(229): NCBI GI NO: 136712 NR Description: Cytochrome B6-F complex iron-sulfur subunit
  misc_feature (1)..(229): NCBI GI NO: 136707 NR Description: Cytochrome B6-F complex iron-sulfur subunit
  misc_feature (1)..(229): NCBI GI NO: 2921504 NR Description: cytochrome B6-F complex iron-sulfur subunit precursor
  misc_feature (1)..(229): NCBI GI NO: 3885886 NR Description: Rieske Fe-S precursor protein [Oryza sativa]
MASSSLSPATQLGSSRSALMAMSSGLFVKPTKMNHQMVRKEKIGLRISCQASSIPADRVPDMEKRKTLNLLLLGALSLPTGYMLVPYATFFVPPGTGGGGGGTPAKDALGNDVVAAEWLKTHGPGDRTLTQGLKGDPTYLVVENDKTLATYGINAVCTHLGCVVPWNKAENKFLCPCHGSQYNAQGRVVRGPAPLSLALAHADIDEAGKVLFVPWVETDFRTGDAPWWS

SEQ ID NO: 3070 - protein, 210 aa, Arabidopsis thaliana
  peptide (1)..(210): Ceres Seq. ID no. 12601211
  misc_feature (94)..(186): Pfam Name: Pfam Description:  Rieske [2Fe-2S] domain
  misc_feature (1)..(210): NCBI GI NO: 15236275 NR Description: putative component of cytochrome B6-F complex
  misc_feature (1)..(210): NCBI GI NO: 9843639 NR Description: Rieske FeS protein [Arabidopsis thaliana]
  misc_feature (1)..(210): NCBI GI NO: 30679426 NR Description: Rieske FeS protein
  misc_feature (1)..(210): NCBI GI NO: 401249 NR Description: Cytochrome B6-F complex iron-sulfur subunit 2
  misc_feature (1)..(210): NCBI GI NO: 401247 NR Description: Cytochrome B6-F complex iron-sulfur subunit 1
  misc_feature (1)..(210): NCBI GI NO: 19999 NR Description: Rieske Fe/S protein of cytochrome b6/f complex
  misc_feature (1)..(210): NCBI GI NO: 136712 NR Description: Cytochrome B6-F complex iron-sulfur subunit
  misc_feature (1)..(210): NCBI GI NO: 136707 NR Description: Cytochrome B6-F complex iron-sulfur subunit
  misc_feature (1)..(210): NCBI GI NO: 2921504 NR Description: cytochrome B6-F complex iron-sulfur subunit precursor
  misc_feature (1)..(210): NCBI GI NO: 3885886 NR Description: Rieske Fe-S precursor protein [Oryza sativa]
MAMSSGLFVKPTKMNHQMVRKEKIGLRISCQASSIPADRVPDMEKRKTLNLLLLGALSLPTGYMLVPYATFFVPPGTGGGGGGTPAKDALGNDVVAAEWLKTHGPGDRTLTQGLKGDPTYLVVENDKTLATYGINAVCTHLGCVVPWNKAENKFLCPCHGSQYNAQGRVVRGPAPLSLALAHADIDEAGKVLFVPWVETDFRTGDAPWWS

SEQ ID NO: 3071 - protein, 208 aa, Arabidopsis thaliana
  peptide (1)..(208): Ceres Seq. ID no. 12601212
  misc_feature (92)..(184): Pfam Name: Pfam Description:  Rieske [2Fe-2S] domain
  misc_feature (1)..(208): NCBI GI NO: 15236275 NR Description: putative component of cytochrome B6-F complex
  misc_feature (1)..(208): NCBI GI NO: 9843639 NR Description: Rieske FeS protein [Arabidopsis thaliana]
  misc_feature (1)..(208): NCBI GI NO: 30679426 NR Description: Rieske FeS protein
  misc_feature (1)..(208): NCBI GI NO: 401249 NR Description: Cytochrome B6-F complex iron-sulfur subunit 2
  misc_feature (1)..(208): NCBI GI NO: 401247 NR Description: Cytochrome B6-F complex iron-sulfur subunit 1
  misc_feature (1)..(208): NCBI GI NO: 19999 NR Description: Rieske Fe/S protein of cytochrome b6/f complex
  misc_feature (1)..(208): NCBI GI NO: 136712 NR Description: Cytochrome B6-F complex iron-sulfur subunit
  misc_feature (1)..(208): NCBI GI NO: 136707 NR Description: Cytochrome B6-F complex iron-sulfur subunit
  misc_feature (1)..(208): NCBI GI NO: 2921504 NR Description: cytochrome B6-F complex iron-sulfur subunit precursor
  misc_feature (1)..(208): NCBI GI NO: 3885886 NR Description: Rieske Fe-S precursor protein [Oryza sativa]
MSSGLFVKPTKMNHQMVRKEKIGLRISCQASSIPADRVPDMEKRKTLNLLLLGALSLPTGYMLVPYATFFVPPGTGGGGGGTPAKDALGNDVVAAEWLKTHGPGDRTLTQGLKGDPTYLVVENDKTLATYGINAVCTHLGCVVPWNKAENKFLCPCHGSQYNAQGRVVRGPAPLSLALAHADIDEAGKVLFVPWVETDFRTGDAPWWS

SEQ ID NO: 3072 - DNA, 2235 bp, Arabidopsis thaliana
  misc_feature (1)..(2235): Ceres Seq. ID no. 12466389
atggtggatccctttttctcgtgcttcgagctccaataaacttttcttacatttttaatccatttttacgttgatatttttttataaaatttccaccaccttacaaaagattttagctttttgtgttactaattaaaatcagaacaaaagttgcaagtctttcatctctatgcacaaatggcgaaagagaacagtagtcatagccttgcagaagcaaagagaaagagactcacttggattctttgtgtaagtggactttgcatattgtcttatgttcttggatcttggcaaaccaacactgtcccaacttcttcctctgaggcttactcaagaatgggatgtgatgaaacatcaacaaccactcgggctcagactactcagactcaaacaaatccttcttctgacgatacttcttcctctttgtcttcctcagaaccagttgagttagatttcgaaagccatcacaaactcgagctgaagattacgaatcaaaccgtaaagtactttgagccatgtgacatgtctttgagtgagtacactccatgtgaagatcgagagagaggaagaagatttgataggaacatgatgaagtacagagagagacattgtccttctaaagatgagcttctttattgtctgattcctcctccaccaaactacaagattccattcaagtggcctcaaagtagagattatgcttggtacgacaacattccacacaaggagcttagtattgagaaagctatccagaactggattcaagtagaaggggaaagattcaggttccctggtggtggcacaatgtttccacgtggagctgatgcttacattgatgatattgctagactcattcctcttactgatggagccattagaacagctattgatacaggatgtggtgtggcgagttttggtgcatacttgttgaagagggatattgtggctatgtcatttgctccaagggacactcatgaagctcaagttcaatttgcgttggaacgtggagttcctgcgattatcgggattatgggatcaagaaggcttccttatccagctagagcttttgatcttgctcactgttctcgttgtttgattccttggtttcaaaatgatggtttgtacttgaccgaagtggaccgggttttaagaccgggcggttattggatcctttcgggtccaccgatcaactggaagaaatactggaaaggctgggaaagatcacaagaggatttgaagcaagagcaagattctatagaagatgcagcaagaagtctttgttggaagaaagttacagaaaagggtgatttatcaatttggcaaaagcctatcaatcacgttgagtgtaacaaactcaaacgagttcacaaaactcctcctctatgcagtaaatcagatttacccgattttgcttggtacaaagatttggaatcttgtgtaacaccattaccagaagcaaacagttcagacgaattcgcaggcggtgcattggaggattggccaaaccgagcttttgcggtgccacctaggataatcgggggaaccattccggacattaatgctgagaaattcagagaagacaatgaagtgtggaaggagagaatatcatattacaaacagataatgccagagctttcaagaggaagatttaggaacataatggacatgaatgcatacttgggaggatttgctgcggcaatgatgaaatatccatcttgggttatgaatgtggttcctgtggatgctgagaagcaaacgttaggggttatctttgaacgaggatttatagggacttatcaagattggtgtgaaggattctctacgtatccgagaacttatgatttgattcatgctggtggattgttcagcatttatgagaacaggtgtgatgttacattaatactacttgagatggatagaattttgagaccagaaggaaccgtggtgtttagagacactgtggaaatgttgacgaagatacaaagcataaccaatggaatgaggtggaagagtcggattttggatcatgagagaggtccttttaatcctgagaagatccttctcgctgtaaaatcctattggaccggtccttcttcttagctagttctagctttcttggaactctctactctaatctttttcttatcttgtgtgtctcatctttgttttatttttaattgtttgttttaaaagatttctatgattatataagaaaatacagggaggatcaacatcttc

SEQ ID NO: 3073 - protein, 639 aa, Arabidopsis thaliana
  peptide (1)..(639): Ceres Seq. ID no. 12466390
  misc_feature (119)..(631): Pfam Name: Pfam Description:  Putative methyltransferase
  misc_feature (68)..(638): NCBI GI NO: 15235080 NR Description: putative protein; protein id: At4g10440.1
  misc_feature (1)..(99): NCBI GI NO: 15235080 NR Description: putative protein; protein id: At4g10440.1
  misc_feature (1)..(639): NCBI GI NO: 37535962 NR Description: unknown protein
  misc_feature (1)..(636): NCBI GI NO: 24413975 NR Description: hypothetical protein~similar to Oryza sativa chromosome 10
  misc_feature (89)..(638): NCBI GI NO: 15225560 NR Description: hypothetical protein; protein id: At2g45750.1
  misc_feature (87)..(638): NCBI GI NO: 15236921 NR Description: hypothetical protein; protein id: At4g00750.1
  misc_feature (78)..(639): NCBI GI NO: 18396075 NR Description: expressed protein; protein id: At1g26850
  misc_feature (90)..(634): NCBI GI NO: 18071395 NR Description: hypothetical protein [Oryza sativa]
  misc_feature (90)..(639): NCBI GI NO: 6752888 NR Description: unknown [Malus x domestica]
  misc_feature (24)..(635): NCBI GI NO: 34898042 NR Description: OSJNBa0038F22.19
MAKENSSHSLAEAKRKRLTWILCVSGLCILSYVLGSWQTNTVPTSSSEAYSRMGCDETSTTTRAQTTQTQTNPSSDDTSSSLSSSEPVELDFESHHKLELKITNQTVKYFEPCDMSLSEYTPCEDRERGRRFDRNMMKYRERHCPSKDELLYCLIPPPPNYKIPFKWPQSRDYAWYDNIPHKELSIEKAIQNWIQVEGERFRFPGGGTMFPRGADAYIDDIARLIPLTDGAIRTAIDTGCGVASFGAYLLKRDIVAMSFAPRDTHEAQVQFALERGVPAIIGIMGSRRLPYPARAFDLAHCSRCLIPWFQNDGLYLTEVDRVLRPGGYWILSGPPINWKKYWKGWERSQEDLKQEQDSIEDAARSLCWKKVTEKGDLSIWQKPINHVECNKLKRVHKTPPLCSKSDLPDFAWYKDLESCVTPLPEANSSDEFAGGALEDWPNRAFAVPPRIIGGTIPDINAEKFREDNEVWKERISYYKQIMPELSRGRFRNIMDMNAYLGGFAAAMMKYPSWVMNVVPVDAEKQTLGVIFERGFIGTYQDWCEGFSTYPRTYDLIHAGGLFSIYENRCDVTLILLEMDRILRPEGTVVFRDTVEMLTKIQSITNGMRWKSRILDHERGPFNPEKILLAVKSYWTGPSS

SEQ ID NO: 3074 - protein, 587 aa, Arabidopsis thaliana
  peptide (1)..(587): Ceres Seq. ID no. 12466391
  misc_feature (67)..(579): Pfam Name: Pfam Description:  Putative methyltransferase
  misc_feature (16)..(586): NCBI GI NO: 15235080 NR Description: putative protein; protein id: At4g10440.1
  misc_feature (1)..(47): NCBI GI NO: 15235080 NR Description: putative protein; protein id: At4g10440.1
  misc_feature (1)..(587): NCBI GI NO: 37535962 NR Description: unknown protein
  misc_feature (1)..(584): NCBI GI NO: 24413975 NR Description: hypothetical protein~similar to Oryza sativa chromosome 10
  misc_feature (37)..(586): NCBI GI NO: 15225560 NR Description: hypothetical protein; protein id: At2g45750.1
  misc_feature (35)..(586): NCBI GI NO: 15236921 NR Description: hypothetical protein; protein id: At4g00750.1
  misc_feature (26)..(587): NCBI GI NO: 18396075 NR Description: expressed protein; protein id: At1g26850
  misc_feature (38)..(582): NCBI GI NO: 18071395 NR Description: hypothetical protein [Oryza sativa]
  misc_feature (38)..(587): NCBI GI NO: 6752888 NR Description: unknown [Malus x domestica]
  misc_feature (1)..(583): NCBI GI NO: 34898042 NR Description: OSJNBa0038F22.19
MGCDETSTTTRAQTTQTQTNPSSDDTSSSLSSSEPVELDFESHHKLELKITNQTVKYFEPCDMSLSEYTPCEDRERGRRFDRNMMKYRERHCPSKDELLYCLIPPPPNYKIPFKWPQSRDYAWYDNIPHKELSIEKAIQNWIQVEGERFRFPGGGTMFPRGADAYIDDIARLIPLTDGAIRTAIDTGCGVASFGAYLLKRDIVAMSFAPRDTHEAQVQFALERGVPAIIGIMGSRRLPYPARAFDLAHCSRCLIPWFQNDGLYLTEVDRVLRPGGYWILSGPPINWKKYWKGWERSQEDLKQEQDSIEDAARSLCWKKVTEKGDLSIWQKPINHVECNKLKRVHKTPPLCSKSDLPDFAWYKDLESCVTPLPEANSSDEFAGGALEDWPNRAFAVPPRIIGGTIPDINAEKFREDNEVWKERISYYKQIMPELSRGRFRNIMDMNAYLGGFAAAMMKYPSWVMNVVPVDAEKQTLGVIFERGFIGTYQDWCEGFSTYPRTYDLIHAGGLFSIYENRCDVTLILLEMDRILRPEGTVVFRDTVEMLTKIQSITNGMRWKSRILDHERGPFNPEKILLAVKSYWTGPSS

SEQ ID NO: 3075 - protein, 525 aa, Arabidopsis thaliana
  peptide (1)..(525): Ceres Seq. ID no. 12466392
  misc_feature (5)..(517): Pfam Name: Pfam Description:  Putative methyltransferase
  misc_feature (1)..(524): NCBI GI NO: 15235080 NR Description: putative protein; protein id: At4g10440.1
  misc_feature (1)..(525): NCBI GI NO: 37535962 NR Description: unknown protein
  misc_feature (1)..(522): NCBI GI NO: 24413975 NR Description: hypothetical protein~similar to Oryza sativa chromosome 10
  misc_feature (1)..(524): NCBI GI NO: 15225560 NR Description: hypothetical protein; protein id: At2g45750.1
  misc_feature (1)..(524): NCBI GI NO: 15236921 NR Description: hypothetical protein; protein id: At4g00750.1
  misc_feature (1)..(525): NCBI GI NO: 18396075 NR Description: expressed protein; protein id: At1g26850
  misc_feature (1)..(520): NCBI GI NO: 18071395 NR Description: hypothetical protein [Oryza sativa]
  misc_feature (1)..(525): NCBI GI NO: 6752888 NR Description: unknown [Malus x domestica]
  misc_feature (1)..(521): NCBI GI NO: 34898042 NR Description: OSJNBa0038F22.19
  misc_feature (1)..(520): NCBI GI NO: 22328758 NR Description: putative protein; protein id: At4g18030
MSLSEYTPCEDRERGRRFDRNMMKYRERHCPSKDELLYCLIPPPPNYKIPFKWPQSRDYAWYDNIPHKELSIEKAIQNWIQVEGERFRFPGGGTMFPRGADAYIDDIARLIPLTDGAIRTAIDTGCGVASFGAYLLKRDIVAMSFAPRDTHEAQVQFALERGVPAIIGIMGSRRLPYPARAFDLAHCSRCLIPWFQNDGLYLTEVDRVLRPGGYWILSGPPINWKKYWKGWERSQEDLKQEQDSIEDAARSLCWKKVTEKGDLSIWQKPINHVECNKLKRVHKTPPLCSKSDLPDFAWYKDLESCVTPLPEANSSDEFAGGALEDWPNRAFAVPPRIIGGTIPDINAEKFREDNEVWKERISYYKQIMPELSRGRFRNIMDMNAYLGGFAAAMMKYPSWVMNVVPVDAEKQTLGVIFERGFIGTYQDWCEGFSTYPRTYDLIHAGGLFSIYENRCDVTLILLEMDRILRPEGTVVFRDTVEMLTKIQSITNGMRWKSRILDHERGPFNPEKILLAVKSYWTGPSS

SEQ ID NO: 3076 - DNA, 940 bp, Arabidopsis thaliana
  misc_feature (1)..(940): Ceres Seq. ID no. 12327548
gttgtattcagtcacgtgaagaagctatccaggtgatgaaagacgttctcatgatgagaaaagagacgcgagagaagcaagaagacttccttaacacgcttctagaagaactggagaaagacggtagctttttcgaccaaggatcggctataaatctcatcttccttctggcgtttgccttgagagaaggtacctctagttgtactgctttggccgtgaagttcatatccaaagacccgaaagtgcttgcagagctcaagcgtgagcataaggcaattgtagacaacagaaaagataaggaagctggagttagctgggaagaatatagacacaacatgactttcaccaacatggttagcaatgaggtgcttcgcctagcaaacacgacccctttgttgtttcgaaaggcggtgcaagatgttgagatcaaaggatatacaattccggctggttggattgtggcggttgcaccttcagcggttcattttgatcctgcaatctatgagaacccatttgagtttaatccatggagatgggaggggaaagaaatgatttggggatctaaaacgttcatggcgtttggatatggagttagactttgtgtaggtgcagagttttcgcggcttcaaatggcaatcttcctccatcatcttgtggcatattacgatttctcaatggtccaagactccgagatcattcgttcaccattccatcaatacaccaaggatctgcttataaacatctctcagtctcctaccaagtgaaccatgcatgcagtttccaaatcttaataatcagatcattatatgcaataatctcatttcctgcttccgcaaaatctctggagtctttttatatgtaatatgcgatctctataatttttaaaaagtatctatcttgtcaaatgagttaaactttgtttatatatgtcttgaatctg

SEQ ID NO: 3077 - protein, 253 aa, Arabidopsis thaliana
  peptide (1)..(253): Ceres Seq. ID no. 12327549
  misc_feature (2)..(253): NCBI GI NO: 15218388 NR Description: cytochrome P450, putative; protein id: At1g78490
  misc_feature (2)..(144): NCBI GI NO: 25282639 NR Description: hypothetical protein T30F21.17
  misc_feature (176)..(253): NCBI GI NO: 25282639 NR Description: hypothetical protein T30F21.17
  misc_feature (4)..(250): NCBI GI NO: 22530982 NR Description: cytochrome P450-like protein
  misc_feature (4)..(250): NCBI GI NO: 30695347 NR Description: cytochrome p450 family [Arabidopsis thaliana]
  misc_feature (4)..(250): NCBI GI NO: 30695352 NR Description: cytochrome p450 family [Arabidopsis thaliana]
  misc_feature (2)..(251): NCBI GI NO: 15222806 NR Description: cytochrome P450, putative; protein id: At1g55940.1
  misc_feature (2)..(144): NCBI GI NO: 8778326 NR Description: F14J16.21 [Arabidopsis thaliana]
  misc_feature (128)..(251): NCBI GI NO: 8778326 NR Description: F14J16.21 [Arabidopsis thaliana]
  misc_feature (7)..(119): NCBI GI NO: 15230572 NR Description: cytochrome P450 - like protein
CIQSREEAIQVMKDVLMMRKETREKQEDFLNTLLEELEKDGSFFDQGSAINLIFLLAFALREGTSSCTALAVKFISKDPKVLAELKREHKAIVDNRKDKEAGVSWEEYRHNMTFTNMVSNEVLRLANTTPLLFRKAVQDVEIKGYTIPAGWIVAVAPSAVHFDPAIYENPFEFNPWRWEGKEMIWGSKTFMAFGYGVRLCVGAEFSRLQMAIFLHHLVAYYDFSMVQDSEIIRSPFHQYTKDLLINISQSPTK

SEQ ID NO: 3078 - protein, 242 aa, Arabidopsis thaliana
  peptide (1)..(242): Ceres Seq. ID no. 12327550
  misc_feature (1)..(242): NCBI GI NO: 15218388 NR Description: cytochrome P450, putative; protein id: At1g78490
  misc_feature (1)..(133): NCBI GI NO: 25282639 NR Description: hypothetical protein T30F21.17
  misc_feature (165)..(242): NCBI GI NO: 25282639 NR Description: hypothetical protein T30F21.17
  misc_feature (1)..(239): NCBI GI NO: 22530982 NR Description: cytochrome P450-like protein
  misc_feature (1)..(239): NCBI GI NO: 30695347 NR Description: cytochrome p450 family [Arabidopsis thaliana]
  misc_feature (1)..(239): NCBI GI NO: 30695352 NR Description: cytochrome p450 family [Arabidopsis thaliana]
  misc_feature (1)..(240): NCBI GI NO: 15222806 NR Description: cytochrome P450, putative; protein id: At1g55940.1
  misc_feature (1)..(133): NCBI GI NO: 8778326 NR Description: F14J16.21 [Arabidopsis thaliana]
  misc_feature (117)..(240): NCBI GI NO: 8778326 NR Description: F14J16.21 [Arabidopsis thaliana]
  misc_feature (1)..(108): NCBI GI NO: 15230572 NR Description: cytochrome P450 - like protein
MKDVLMMRKETREKQEDFLNTLLEELEKDGSFFDQGSAINLIFLLAFALREGTSSCTALAVKFISKDPKVLAELKREHKAIVDNRKDKEAGVSWEEYRHNMTFTNMVSNEVLRLANTTPLLFRKAVQDVEIKGYTIPAGWIVAVAPSAVHFDPAIYENPFEFNPWRWEGKEMIWGSKTFMAFGYGVRLCVGAEFSRLQMAIFLHHLVAYYDFSMVQDSEIIRSPFHQYTKDLLINISQSPTK

SEQ ID NO: 3079 - protein, 237 aa, Arabidopsis thaliana
  peptide (1)..(237): Ceres Seq. ID no. 12327551
  misc_feature (1)..(237): NCBI GI NO: 15218388 NR Description: cytochrome P450, putative; protein id: At1g78490
  misc_feature (1)..(128): NCBI GI NO: 25282639 NR Description: hypothetical protein T30F21.17
  misc_feature (160)..(237): NCBI GI NO: 25282639 NR Description: hypothetical protein T30F21.17
  misc_feature (1)..(234): NCBI GI NO: 22530982 NR Description: cytochrome P450-like protein
  misc_feature (1)..(234): NCBI GI NO: 30695347 NR Description: cytochrome p450 family [Arabidopsis thaliana]
  misc_feature (1)..(234): NCBI GI NO: 30695352 NR Description: cytochrome p450 family [Arabidopsis thaliana]
  misc_feature (1)..(235): NCBI GI NO: 15222806 NR Description: cytochrome P450, putative; protein id: At1g55940.1
  misc_feature (1)..(128): NCBI GI NO: 8778326 NR Description: F14J16.21 [Arabidopsis thaliana]
  misc_feature (112)..(235): NCBI GI NO: 8778326 NR Description: F14J16.21 [Arabidopsis thaliana]
  misc_feature (1)..(103): NCBI GI NO: 15230572 NR Description: cytochrome P450 - like protein
MMRKETREKQEDFLNTLLEELEKDGSFFDQGSAINLIFLLAFALREGTSSCTALAVKFISKDPKVLAELKREHKAIVDNRKDKEAGVSWEEYRHNMTFTNMVSNEVLRLANTTPLLFRKAVQDVEIKGYTIPAGWIVAVAPSAVHFDPAIYENPFEFNPWRWEGKEMIWGSKTFMAFGYGVRLCVGAEFSRLQMAIFLHHLVAYYDFSMVQDSEIIRSPFHQYTKDLLINISQSPTK

SEQ ID NO: 3080 - DNA, 973 bp, Arabidopsis thaliana
  misc_feature (1)..(973): Ceres Seq. ID no. 13592713
atcgaaaaataattctccgtcgagatcgcttctctccccgttgccgtccgtccccaccgctgagtgatagatcgaaacagagaaacacacacggcgaagaagatttcaccatattttgtctaagtggattctgttgagagagagagatggctatgtctcaggtggtgaacacgtacccgctttcgaactacagcttcggaactaaggaacccaagctggaaaaggacacctccgtcgccgaccggctcgctcgtatgaaaatcaactatatgaaagagggcatgaggactagcgttgaagggattctactggtgcaagaacacaaccatcctcatatacttctgctacaaattggtaacacattctgcaaacttccaggtggacgcctgaagcctggtgaaaatgaagctgatggtctgaaaagaaagctgaccagtaaacttggaggcaattcggctgctcttgtacctgactggacggtaggagaatgtgttgcgacatggtggcgtccaaactttgaaaccatgatgtacccgtattgccctcctcacatcacgaaaccaaaggaatgcaagagactctacattgttcacttgtctgagaaagagtactttgctgtgcccaaaaatttgaagctcttggccgtccctttgttcgaactctatgacaatgttcagagatatggaccggttatatcaaccattccgcagcagctatccagattccatttcaacatgattagttcgtgatttcgactcggtgtgttcaagaacaaggaacctatcagatgggtaagttacttaggtacggtagagagctgtagctaccggattagagatggggttttccaatgatgcgagttgggttttttgcattatagacttgttggcttttatgtagaaccggttcaaagtgtcagcacaaaaaacaaagattattgtatctcatttttaaaagcatttgtcattgtttg

SEQ ID NO: 3081 - protein, 200 aa, Arabidopsis thaliana
  peptide (1)..(200): Ceres Seq. ID no. 13592714
  misc_feature (47)..(173): Pfam Name: Pfam Description:  NUDIX domain
  misc_feature (1)..(200): NCBI GI NO: 30686923 NR Description: expressed protein [Arabidopsis thaliana]
  misc_feature (1)..(144): NCBI GI NO: 7486820 NR Description: hypothetical protein M7J2
  misc_feature (2)..(144): NCBI GI NO: 25354611 NR Description: hypothetical protein AT4g25550
  misc_feature (1)..(195): NCBI GI NO: 5901926 NR Description: cleavage and polyadenylation specific factor 5
  misc_feature (1)..(195): NCBI GI NO: 13386106 NR Description: cleavage and polyadenylation specific factor 5
  misc_feature (2)..(195): NCBI GI NO: 24370468 NR Description: putative pre-mrna cleavage factor [Brugia malayi]
  misc_feature (6)..(198): NCBI GI NO: 18417474 NR Description: mRNA cleavage factor subunit - like protein
  misc_feature (4)..(195): NCBI GI NO: 17507315 NR Description: Cleavage polyadenylation specific factor 5 subunit
  misc_feature (4)..(195): NCBI GI NO: 39595588 NR Description: Hypothetical protein CBG12500
  misc_feature (87)..(177): NCBI GI NO: 7486820 NR Description: hypothetical protein M7J2
MAMSQVVNTYPLSNYSFGTKEPKLEKDTSVADRLARMKINYMKEGMRTSVEGILLVQEHNHPHILLLQIGNTFCKLPGGRLKPGENEADGLKRKLTSKLGGNSAALVPDWTVGECVATWWRPNFETMMYPYCPPHITKPKECKRLYIVHLSEKEYFAVPKNLKLLAVPLFELYDNVQRYGPVISTIPQQLSRFHFNMISS

SEQ ID NO: 3082 - protein, 198 aa, Arabidopsis thaliana
  peptide (1)..(198): Ceres Seq. ID no. 13592715
  misc_feature (45)..(171): Pfam Name: Pfam Description:  NUDIX domain
  misc_feature (1)..(198): NCBI GI NO: 30686923 NR Description: expressed protein [Arabidopsis thaliana]
  misc_feature (1)..(142): NCBI GI NO: 7486820 NR Description: hypothetical protein M7J2
  misc_feature (1)..(142): NCBI GI NO: 25354611 NR Description: hypothetical protein AT4g25550
  misc_feature (1)..(193): NCBI GI NO: 5901926 NR Description: cleavage and polyadenylation specific factor 5
  misc_feature (1)..(193): NCBI GI NO: 13386106 NR Description: cleavage and polyadenylation specific factor 5
  misc_feature (1)..(193): NCBI GI NO: 24370468 NR Description: putative pre-mrna cleavage factor [Brugia malayi]
  misc_feature (4)..(196): NCBI GI NO: 18417474 NR Description: mRNA cleavage factor subunit - like protein
  misc_feature (2)..(193): NCBI GI NO: 17507315 NR Description: Cleavage polyadenylation specific factor 5 subunit
  misc_feature (2)..(193): NCBI GI NO: 39595588 NR Description: Hypothetical protein CBG12500
  misc_feature (85)..(175): NCBI GI NO: 7486820 NR Description: hypothetical protein M7J2
MSQVVNTYPLSNYSFGTKEPKLEKDTSVADRLARMKINYMKEGMRTSVEGILLVQEHNHPHILLLQIGNTFCKLPGGRLKPGENEADGLKRKLTSKLGGNSAALVPDWTVGECVATWWRPNFETMMYPYCPPHITKPKECKRLYIVHLSEKEYFAVPKNLKLLAVPLFELYDNVQRYGPVISTIPQQLSRFHFNMISS

SEQ ID NO: 3083 - protein, 164 aa, Arabidopsis thaliana
  peptide (1)..(164): Ceres Seq. ID no. 13592716
  misc_feature (11)..(137): Pfam Name: Pfam Description:  NUDIX domain
  misc_feature (1)..(164): NCBI GI NO: 30686923 NR Description: expressed protein [Arabidopsis thaliana]
  misc_feature (1)..(108): NCBI GI NO: 7486820 NR Description: hypothetical protein M7J2
  misc_feature (1)..(108): NCBI GI NO: 25354611 NR Description: hypothetical protein AT4g25550
  misc_feature (1)..(159): NCBI GI NO: 5901926 NR Description: cleavage and polyadenylation specific factor 5
  misc_feature (1)..(159): NCBI GI NO: 13386106 NR Description: cleavage and polyadenylation specific factor 5
  misc_feature (1)..(159): NCBI GI NO: 24370468 NR Description: putative pre-mrna cleavage factor [Brugia malayi]
  misc_feature (1)..(162): NCBI GI NO: 18417474 NR Description: mRNA cleavage factor subunit - like protein
  misc_feature (1)..(159): NCBI GI NO: 17507315 NR Description: Cleavage polyadenylation specific factor 5 subunit
  misc_feature (1)..(159): NCBI GI NO: 39595588 NR Description: Hypothetical protein CBG12500
  misc_feature (51)..(141): NCBI GI NO: 7486820 NR Description: hypothetical protein M7J2
MKINYMKEGMRTSVEGILLVQEHNHPHILLLQIGNTFCKLPGGRLKPGENEADGLKRKLTSKLGGNSAALVPDWTVGECVATWWRPNFETMMYPYCPPHITKPKECKRLYIVHLSEKEYFAVPKNLKLLAVPLFELYDNVQRYGPVISTIPQQLSRFHFNMISS

SEQ ID NO: 3084 - DNA, 1065 bp, Arabidopsis thaliana
  misc_feature (1)..(1065): Ceres Seq. ID no. 13487967
agaagaaatctttcagatttgcgcatatcgacaattttccgagcggccagtttacgtattttgtttgtagttaacgtgtttcaaggactttgacaatggctgaggaagcgcataaggtaacattgaatgtctatgatttaagccaaggcttggcacgccagctctcacaatcactcctgggaaaggttattgaaggtgtatggcatacaggaatagttgtctatgggaatgagtacttttttggaggagggatacaacatttaccagttggaagaactccatatggaacaccaattcgaacgatagagttgggtctatcacatgtgcctaaagatgtattcgagatgtacttggaagaaatcagtcctcgttacactgctgaatcctacaatttacttactcacaactgcaacaacttcagcaacgaggtcgctcagtttttggtgggtaaagggattcctgactacattctccagcttcctaatgatgttctaaacagtcccatgggtggtcttataatgcctatgttgcaaggcctcgaaacaactctaaaggctggtgctgttcctcaagttccacagtttaggccacagccacaaccttttggagcttttagtaaagatgatggcccacaaattgtgatagctcctaagctcgaggcagcagaaacctcaactgcaactgagaaagtgccacctgttattcaaccatcagctagtaaagagaaggtcaaggacgacccgttgggtgatgctagggccaagattcaggaagagattacaagcgaatttgcagctctaatggcacaaggcacattacgagcaagtgaagcagctgctatggcgacaaaaagagtcatgcaaaagtacggacatctcaatgtaaacgcttagtgcaataacagagagatgaaacattttatttttactgtcttgaaactaagtccagaatcttgaacgatttcattacactattgccttcagctgtattatgttcaacgatctacaaattaattatcataaaagaggaaaagagcagtaaacaagagaaaaaaaaaaagatttt

SEQ ID NO: 3085 - protein, 265 aa, Arabidopsis thaliana
  peptide (1)..(265): Ceres Seq. ID no. 13487968
  misc_feature (6)..(129): Pfam Name: DUF862 Pfam Description: Eukaryotic protein of unknown function
  misc_feature (1)..(265): NCBI GI NO: 15231383 NR Description: expressed protein [Arabidopsis thaliana]
  misc_feature (1)..(254): NCBI GI NO: 37535296 NR Description: unknown protein
  misc_feature (5)..(151): NCBI GI NO: 28277916 NR Description: Similar to DNA segment
  misc_feature (7)..(169): NCBI GI NO: 29246854 NR Description: GLP_191_9337_10773 [Giardia lamblia ATCC 50803]
  misc_feature (8)..(157): NCBI GI NO: 37589651 NR Description: Unknown (protein for MGC:73066) [Danio rerio]
  misc_feature (6)..(156): NCBI GI NO: 14779199 NR Description: similar to DNA segment
  misc_feature (1)..(149): NCBI GI NO: 34867307 NR Description: similar to D15Wsu75e protein [Rattus norvegicus]
  misc_feature (6)..(149): NCBI GI NO: 20162548 NR Description: D15Wsu75e protein [Mus musculus]
  misc_feature (8)..(175): NCBI GI NO: 40738408 NR Description: hypothetical protein AN6915.2
  misc_feature (8)..(155): NCBI GI NO: 23508869 NR Description: hypothetical protein [Plasmodium falciparum 3D7]
MAEEAHKVTLNVYDLSQGLARQLSQSLLGKVIEGVWHTGIVVYGNEYFFGGGIQHLPVGRTPYGTPIRTIELGLSHVPKDVFEMYLEEISPRYTAESYNLLTHNCNNFSNEVAQFLVGKGIPDYILQLPNDVLNSPMGGLIMPMLQGLETTLKAGAVPQVPQFRPQPQPFGAFSKDDGPQIVIAPKLEAAETSTATEKVPPVIQPSASKEKVKDDPLGDARAKIQEEITSEFAALMAQGTLRASEAAAMATKRVMQKYGHLNVNA

SEQ ID NO: 3086 - protein, 182 aa, Arabidopsis thaliana
  peptide (1)..(182): Ceres Seq. ID no. 13487969
  misc_feature (1)..(182): NCBI GI NO: 15231383 NR Description: expressed protein [Arabidopsis thaliana]
  misc_feature (1)..(171): NCBI GI NO: 37535296 NR Description: unknown protein
  misc_feature (1)..(68): NCBI GI NO: 28277916 NR Description: Similar to DNA segment
  misc_feature (1)..(86): NCBI GI NO: 29246854 NR Description: GLP_191_9337_10773 [Giardia lamblia ATCC 50803]
  misc_feature (1)..(74): NCBI GI NO: 37589651 NR Description: Unknown (protein for MGC:73066) [Danio rerio]
  misc_feature (1)..(73): NCBI GI NO: 14779199 NR Description: similar to DNA segment
  misc_feature (1)..(66): NCBI GI NO: 34867307 NR Description: similar to D15Wsu75e protein [Rattus norvegicus]
  misc_feature (1)..(66): NCBI GI NO: 20162548 NR Description: D15Wsu75e protein [Mus musculus]
  misc_feature (1)..(92): NCBI GI NO: 40738408 NR Description: hypothetical protein AN6915.2
  misc_feature (1)..(72): NCBI GI NO: 23508869 NR Description: hypothetical protein [Plasmodium falciparum 3D7]
MYLEEISPRYTAESYNLLTHNCNNFSNEVAQFLVGKGIPDYILQLPNDVLNSPMGGLIMPMLQGLETTLKAGAVPQVPQFRPQPQPFGAFSKDDGPQIVIAPKLEAAETSTATEKVPPVIQPSASKEKVKDDPLGDARAKIQEEITSEFAALMAQGTLRASEAAAMATKRVMQKYGHLNVNA

SEQ ID NO: 3087 - DNA, 1632 bp, Arabidopsis thaliana
  misc_feature (1)..(1632): Ceres Seq. ID no. 12385819
tcttctctctacacacacacacacacacacacacacaaaatggattcttcgaatgttgaagaaaacctaaacccagaaacaaaatccgcagaagaacaaaacccacttgccattttccattcttctctaccaatcgcatctctttctctgaccttgttcccatcctcgactcaatttctcaaattgtttgctcatcatccaaacaaggttaagatccctacgcaggcttcttctctcactcatctctctctttcttctgtctctccttttccttcttccagaatctctttcaaatccaccatcgctgctaaccctcttcaatcccctctctccatcgtccctcgtcgtcccgttgatccttcctccgccgccgctctccgccgtgctgctgtcgtctggttccgcaatgacctccgtgtccacgacaacgagtgtctcaactccgccaacgacgagtgcgtctccgttttgcccgtttactgcttcgaccctagagattacggcaagtcctcttccggcttcgacaaaacggggccttttcgtgcccagtttctgattgagtccgtttcggagctccggaagaatctccaagccagagggtcgaatctagttgtccgtgtcgggaaacctgaagctgttttggtggaattggctaaggagattggagctgacgcggtttatgctcacagagaagtgtctcacgacgaggttaaagcggaagggaagatagagaccgcgatgaaggaggaaggcgttgaagtcaagtatttctggggaagcactctctatcatttggatgatttgcccttcaaaattgaagacttgccgtcaaattacggagctttcaaggataaagtccagaaattggagattaggaagactatcgcagcgcttgatcaattgaaaagcttgccctctcgaggagacgttgagcttggcgatattccttctctcctggatcttggcattagccccactcctaggactagccaggaggggaaaccgacaatggttggaggagagacagaggcgttgactagactaaagagctttgccgcggattgtcaggctcggttgagcaagggaaaccagaaaggaggcaacaacagtgtctttggtgcaaacttctcttgcaagatatcaccttggttagccatgggaagcatctctcctcgttccatgttcgatgagctgaagaaaacaatctccgcatcaaccacctccacaactccaaggaacggaccgggagatacaggactcaactggttaatgtatgagttgctatggagggatttcttcaggtttataaccaagaaatacagctcagcgaagacgcaggtcgaggctggtccggctacagcctgtaccggtgcctttgcttaaacatttgaaaactttcaggtgaccggaaaagttagaagcgacctgtttctttgccctactctggtgtatggtgattaatttgctatccggacaggactttactgctctcttttgaaacttgagtgtcaggagaataaaatctaagcttctttttttggctcaatcaagttgtccgttccctgttctaaacatttcggatactcattccataaaaagtctctacaatttgagacgctctcctttgtggtc

SEQ ID NO: 3088 - protein, 460 aa, Arabidopsis thaliana
  peptide (1)..(460): Ceres Seq. ID no. 12385820
  misc_feature (128)..(305): Pfam Name: Pfam Description:  DNA photolyase
  misc_feature (14)..(460): NCBI GI NO: 15226633 NR Description: photolyase/blue-light receptor
  misc_feature (14)..(460): NCBI GI NO: 21592984 NR Description: photolyase/blue-light receptor PHR2
  misc_feature (131)..(442): NCBI GI NO: 23040111 NR Description: hypothetical protein
  misc_feature (128)..(440): NCBI GI NO: 37520404 NR Description: probable bacterial cryptochrome
  misc_feature (120)..(451): NCBI GI NO: 22327046 NR Description: DNA photolyase - like protein
  misc_feature (120)..(451): NCBI GI NO: 28971609 NR Description: cryptochrome dash [Arabidopsis thaliana]
  misc_feature (131)..(442): NCBI GI NO: 28374085 NR Description: Chain A
  misc_feature (128)..(440): NCBI GI NO: 23135973 NR Description: hypothetical protein [Cytophaga hutchinsonii]
  misc_feature (159)..(442): NCBI GI NO: 16330358 NR Description: DNA photolyase [Synechocystis sp. PCC 6803]
  misc_feature (118)..(433): NCBI GI NO: 18400841 NR Description: 6-4 photolyase (UVR3); protein id: At3g15620
SSLYTHTHTHTHKMDSSNVEENLNPETKSAEEQNPLAIFHSSLPIASLSLTLFPSSTQFLKLFAHHPNKVKIPTQASSLTHLSLSSVSPFPSSRISFKSTIAANPLQSPLSIVPRRPVDPSSAAALRRAAVVWFRNDLRVHDNECLNSANDECVSVLPVYCFDPRDYGKSSSGFDKTGPFRAQFLIESVSELRKNLQARGSNLVVRVGKPEAVLVELAKEIGADAVYAHREVSHDEVKAEGKIETAMKEEGVEVKYFWGSTLYHLDDLPFKIEDLPSNYGAFKDKVQKLEIRKTIAALDQLKSLPSRGDVELGDIPSLLDLGISPTPRTSQEGKPTMVGGETEALTRLKSFAADCQARLSKGNQKGGNNSVFGANFSCKISPWLAMGSISPRSMFDELKKTISASTTSTTPRNGPGDTGLNWLMYELLWRDFFRFITKKYSSAKTQVEAGPATACTGAFA

SEQ ID NO: 3089 - protein, 447 aa, Arabidopsis thaliana
  peptide (1)..(447): Ceres Seq. ID no. 12385821
  misc_feature (115)..(292): Pfam Name: Pfam Description:  DNA photolyase
  misc_feature (1)..(447): NCBI GI NO: 15226633 NR Description: photolyase/blue-light receptor
  misc_feature (1)..(447): NCBI GI NO: 21592984 NR Description: photolyase/blue-light receptor PHR2
  misc_feature (118)..(429): NCBI GI NO: 23040111 NR Description: hypothetical protein
  misc_feature (115)..(427): NCBI GI NO: 37520404 NR Description: probable bacterial cryptochrome
  misc_feature (107)..(438): NCBI GI NO: 22327046 NR Description: DNA photolyase - like protein
  misc_feature (107)..(438): NCBI GI NO: 28971609 NR Description: cryptochrome dash [Arabidopsis thaliana]
  misc_feature (118)..(429): NCBI GI NO: 28374085 NR Description: Chain A
  misc_feature (115)..(427): NCBI GI NO: 23135973 NR Description: hypothetical protein [Cytophaga hutchinsonii]
  misc_feature (146)..(429): NCBI GI NO: 16330358 NR Description: DNA photolyase [Synechocystis sp. PCC 6803]
  misc_feature (105)..(420): NCBI GI NO: 18400841 NR Description: 6-4 photolyase (UVR3); protein id: At3g15620
MDSSNVEENLNPETKSAEEQNPLAIFHSSLPIASLSLTLFPSSTQFLKLFAHHPNKVKIPTQASSLTHLSLSSVSPFPSSRISFKSTIAANPLQSPLSIVPRRPVDPSSAAALRRAAVVWFRNDLRVHDNECLNSANDECVSVLPVYCFDPRDYGKSSSGFDKTGPFRAQFLIESVSELRKNLQARGSNLVVRVGKPEAVLVELAKEIGADAVYAHREVSHDEVKAEGKIETAMKEEGVEVKYFWGSTLYHLDDLPFKIEDLPSNYGAFKDKVQKLEIRKTIAALDQLKSLPSRGDVELGDIPSLLDLGISPTPRTSQEGKPTMVGGETEALTRLKSFAADCQARLSKGNQKGGNNSVFGANFSCKISPWLAMGSISPRSMFDELKKTISASTTSTTPRNGPGDTGLNWLMYELLWRDFFRFITKKYSSAKTQVEAGPATACTGAFA

SEQ ID NO: 3090 - DNA, 1439 bp, Arabidopsis thaliana
  misc_feature (1)..(1439): Ceres Seq. ID no. 13621928
gttaccaaacctaatttgaagtattaaagccgttcccctgactaaaaacctttgaacactccgatccaaaaaaaagaagagaaaaacctttgcatacagctaaaaacgatgtcgtctctctctcgctttctccttcgtggcaacttcagcttcagcacccacacgaatcgccgcttcttctccgccgttaccgctgctgcagccacaccctcgccacccaaaccgtccctcatcaccctcgtaaatgacgaacgcgaccccaaattcatcacggagaagttcaagaaagcctgccaagcagagtggttccggaagaatatagctgtctatgagagaaccgttcgccgtctcgccgcagccaagaagtttgagtgggtcgaggagatcctggaggagcagaacaagtatccaaacatgtcaaaggaaggattcgtggcgaggattatcaatctctatggacgagtcggtatgtttgagaatgcacagaaagtgttcgacgaaatgcctgagagaaactgcaagagaacagcgttgtctttcaacgcattactgaatgcctgtgtgaactccaagaagtttgatttggttgaaggtatcttcaaggagttgccaggtaagctctcgattgaaccagatgttgcatcttacaatactttgatcaagggattgtgtggaaagggttccttcactgaagctgttgcgttgattgatgagattgagaacaagggtttgaaacctgatcatatcaccttcaatatacttttacatgagtcgtatacaaaagggaagtttgaggaaggagaacagatatgggctagaatggtagagaagaatgttaagcgagacatccgtagttacaatgctcggttgttaggactagccatggagaataaatcagaagagatggttagtctctttgacaaacttaagggtaatgagctcaaacctgatgttttcacattcactgccatgattaaaggatttgtcagtgaaggaaaattagatgaagccataacgtggtacaaggaaatcgagaagaatggttgtcgcccgttgaaatttgtctttaactcattgcttcctgcaatatgtaaggcgggcgatttagagtctgcttatgagctctgcaaggaaatatttgctaagcgtctgctagtcgatgaggctgtcctgcaggaggtagttgatgcattggtgaaagggtccaagcaagacgaagctgaagagattgtcgagctagcaaagacgaatgactatttgcagtgcaagcttcgtctctttcccaaagagtagttaattggcaaggcttattgactagtttttaatttagtctgtgtttccctctttttaatgtcttgttgcaaactgcgagtgcggtgatttaataattgaactatctctatctgtagtgtgtttgtgttgctttcaattctcaaagt

SEQ ID NO: 3091 - protein, 394 aa, Arabidopsis thaliana
  peptide (1)..(394): Ceres Seq. ID no. 13621929
  misc_feature (283)..(317): Pfam Name: Pfam Description:  PPR repeat
  misc_feature (1)..(394): NCBI GI NO: 18399887 NR Description: pentatricopeptide (PPR) repeat-containing protein
  misc_feature (1)..(394): NCBI GI NO: 21617993 NR Description: unknown [Arabidopsis thaliana]
  misc_feature (1)..(394): NCBI GI NO: 15222796 NR Description: pentatricopeptide (PPR) repeat-containing protein
  misc_feature (46)..(385): NCBI GI NO: 15231160 NR Description: pentatricopeptide (PPR) repeat-containing protein
  misc_feature (48)..(383): NCBI GI NO: 34910148 NR Description: B1070A12.17
  misc_feature (1)..(379): NCBI GI NO: 25455786 NR Description: membrane-associated salt-inducible protein like
  misc_feature (21)..(379): NCBI GI NO: 15234493 NR Description: pentatricopeptide (PPR) repeat-containing protein
  misc_feature (1)..(379): NCBI GI NO: 18407365 NR Description: pentatricopeptide (PPR) repeat-containing protein
  misc_feature (1)..(379): NCBI GI NO: 21553755 NR Description: putative membrane-associated salt-inducible protein
  misc_feature (5)..(379): NCBI GI NO: 15221069 NR Description: pentatricopeptide (PPR) repeat-containing protein
MSSLSRFLLRGNFSFSTHTNRRFFSAVTAAAATPSPPKPSLITLVNDERDPKFITEKFKKACQAEWFRKNIAVYERTVRRLAAAKKFEWVEEILEEQNKYPNMSKEGFVARIINLYGRVGMFENAQKVFDEMPERNCKRTALSFNALLNACVNSKKFDLVEGIFKELPGKLSIEPDVASYNTLIKGLCGKGSFTEAVALIDEIENKGLKPDHITFNILLHESYTKGKFEEGEQIWARMVEKNVKRDIRSYNARLLGLAMENKSEEMVSLFDKLKGNELKPDVFTFTAMIKGFVSEGKLDEAITWYKEIEKNGCRPLKFVFNSLLPAICKAGDLESAYELCKEIFAKRLLVDEAVLQEVVDALVKGSKQDEAEEIVELAKTNDYLQCKLRLFPKE

SEQ ID NO: 3092 - protein, 292 aa, Arabidopsis thaliana
  peptide (1)..(292): Ceres Seq. ID no. 13621930
  misc_feature (181)..(215): Pfam Name: Pfam Description:  PPR repeat
  misc_feature (1)..(292): NCBI GI NO: 18399887 NR Description: pentatricopeptide (PPR) repeat-containing protein
  misc_feature (1)..(292): NCBI GI NO: 21617993 NR Description: unknown [Arabidopsis thaliana]
  misc_feature (1)..(292): NCBI GI NO: 15222796 NR Description: pentatricopeptide (PPR) repeat-containing protein
  misc_feature (1)..(283): NCBI GI NO: 15231160 NR Description: pentatricopeptide (PPR) repeat-containing protein
  misc_feature (1)..(281): NCBI GI NO: 34910148 NR Description: B1070A12.17
  misc_feature (1)..(277): NCBI GI NO: 25455786 NR Description: membrane-associated salt-inducible protein like
  misc_feature (1)..(277): NCBI GI NO: 15234493 NR Description: pentatricopeptide (PPR) repeat-containing protein
  misc_feature (1)..(277): NCBI GI NO: 18407365 NR Description: pentatricopeptide (PPR) repeat-containing protein
  misc_feature (1)..(277): NCBI GI NO: 21553755 NR Description: putative membrane-associated salt-inducible protein
  misc_feature (1)..(277): NCBI GI NO: 15221069 NR Description: pentatricopeptide (PPR) repeat-containing protein
MSKEGFVARIINLYGRVGMFENAQKVFDEMPERNCKRTALSFNALLNACVNSKKFDLVEGIFKELPGKLSIEPDVASYNTLIKGLCGKGSFTEAVALIDEIENKGLKPDHITFNILLHESYTKGKFEEGEQIWARMVEKNVKRDIRSYNARLLGLAMENKSEEMVSLFDKLKGNELKPDVFTFTAMIKGFVSEGKLDEAITWYKEIEKNGCRPLKFVFNSLLPAICKAGDLESAYELCKEIFAKRLLVDEAVLQEVVDALVKGSKQDEAEEIVELAKTNDYLQCKLRLFPKE

SEQ ID NO: 3093 - protein, 274 aa, Arabidopsis thaliana
  peptide (1)..(274): Ceres Seq. ID no. 13621931
  misc_feature (163)..(197): Pfam Name: Pfam Description:  PPR repeat
  misc_feature (1)..(274): NCBI GI NO: 18399887 NR Description: pentatricopeptide (PPR) repeat-containing protein
  misc_feature (1)..(274): NCBI GI NO: 21617993 NR Description: unknown [Arabidopsis thaliana]
  misc_feature (1)..(274): NCBI GI NO: 15222796 NR Description: pentatricopeptide (PPR) repeat-containing protein
  misc_feature (1)..(265): NCBI GI NO: 15231160 NR Description: pentatricopeptide (PPR) repeat-containing protein
  misc_feature (1)..(263): NCBI GI NO: 34910148 NR Description: B1070A12.17
  misc_feature (1)..(259): NCBI GI NO: 25455786 NR Description: membrane-associated salt-inducible protein like
  misc_feature (1)..(259): NCBI GI NO: 15234493 NR Description: pentatricopeptide (PPR) repeat-containing protein
  misc_feature (1)..(259): NCBI GI NO: 18407365 NR Description: pentatricopeptide (PPR) repeat-containing protein
  misc_feature (1)..(259): NCBI GI NO: 21553755 NR Description: putative membrane-associated salt-inducible protein
  misc_feature (1)..(259): NCBI GI NO: 15221069 NR Description: pentatricopeptide (PPR) repeat-containing protein
MFENAQKVFDEMPERNCKRTALSFNALLNACVNSKKFDLVEGIFKELPGKLSIEPDVASYNTLIKGLCGKGSFTEAVALIDEIENKGLKPDHITFNILLHESYTKGKFEEGEQIWARMVEKNVKRDIRSYNARLLGLAMENKSEEMVSLFDKLKGNELKPDVFTFTAMIKGFVSEGKLDEAITWYKEIEKNGCRPLKFVFNSLLPAICKAGDLESAYELCKEIFAKRLLVDEAVLQEVVDALVKGSKQDEAEEIVELAKTNDYLQCKLRLFPKE

SEQ ID NO: 3094 - DNA, 940 bp, Arabidopsis thaliana
  misc_feature (1)..(940): Ceres Seq. ID no. 12327087
aaaaaacattactcccgaagaagcccaaattgacgacaggcgttagtggcgattggcgatggcagctcctgcggtggaggcaaccgtcgcaagtgctctccgctctgtgattcttagagctcgtaaggcggcggagcaagtaggaagagatcccgagcgggtcagggtccttccagtctccaagactaaacccgtctcacttatccgccaaatctacgacgcaggtcaccgttgcttcggcgagaattacgttcaagaaatcatcgataaagctccacagcttccggaagatatagagtggcatttcgtggggcatttacagagcaacaaagccaaaacgctattgactggagtcccaaatttggcaatggttcatggtgtggatggagaaaaggtagcaaatcatctagatcgagctgtttcaaatcttgggagacatccactaaaggttttggtccaagtgaacacaagcggagaagtttctaaatctggaatcgaaccttctagcgttgtagagctagcaagacatgtgaaacatcactgtccaaatctggtattctccggattaatgactattgggatgcctgattatacgtctaccccagagaacttcaggacactttcaaactgtagagctgatgtatgcaaggcacttggaatggctgaggatcaatttgaactgtccatgggcatgtctggtgacttcgagctagcgattgagatgggaagcaccaatgtgagggttggttccaccattttcggaccaagagagtaccccaagaaaacaacttagctactatgctcaaacacttgttgtaaaattcatgtataatgttattttgtcgattattttaaacaattttattcttcattgataaacttaggtgtattcacaaagttactttatagaaaattagaaatcaatacattgttaagggcc

SEQ ID NO: 3095 - protein, 244 aa, Arabidopsis thaliana
  peptide (1)..(244): Ceres Seq. ID no. 12327088
  misc_feature (9)..(239): Pfam Name: Pfam Description:  Alanine racemase, N-terminal domain
  misc_feature (1)..(244): NCBI GI NO: 14030629 NR Description: AT4g26860/F10M23_200 [Arabidopsis thaliana]
  misc_feature (1)..(244): NCBI GI NO: 18416879 NR Description: putative Proline synthetase associated protein
  misc_feature (1)..(186): NCBI GI NO: 7445224 NR Description: hypothetical protein F10M23
  misc_feature (192)..(244): NCBI GI NO: 7445224 NR Description: hypothetical protein F10M23
  misc_feature (1)..(242): NCBI GI NO: 30682530 NR Description: Proline synthetase associated protein -related
  misc_feature (1)..(242): NCBI GI NO: 18391333 NR Description: putative Proline synthetase associated protein
  misc_feature (25)..(242): NCBI GI NO: 11359716 NR Description: conserved hypothetical protein
  misc_feature (1)..(244): NCBI GI NO: 6005842 NR Description: proline synthetase co-transcribed homolog
  misc_feature (7)..(242): NCBI GI NO: 16930823 NR Description: proline synthetase co-transcribed [Mus musculus]
  misc_feature (96)..(220): NCBI GI NO: 19386824 NR Description: B1147A04.19
MAAPAVEATVASALRSVILRARKAAEQVGRDPERVRVLPVSKTKPVSLIRQIYDAGHRCFGENYVQEIIDKAPQLPEDIEWHFVGHLQSNKAKTLLTGVPNLAMVHGVDGEKVANHLDRAVSNLGRHPLKVLVQVNTSGEVSKSGIEPSSVVELARHVKHHCPNLVFSGLMTIGMPDYTSTPENFRTLSNCRADVCKALGMAEDQFELSMGMSGDFELAIEMGSTNVRVGSTIFGPREYPKKTT

SEQ ID NO: 3096 - protein, 141 aa, Arabidopsis thaliana
  peptide (1)..(141): Ceres Seq. ID no. 12327089
  misc_feature (1)..(136): Pfam Name: Pfam Description:  Alanine racemase, N-terminal domain
  misc_feature (1)..(141): NCBI GI NO: 14030629 NR Description: AT4g26860/F10M23_200 [Arabidopsis thaliana]
  misc_feature (1)..(141): NCBI GI NO: 18416879 NR Description: putative Proline synthetase associated protein
  misc_feature (1)..(83): NCBI GI NO: 7445224 NR Description: hypothetical protein F10M23
  misc_feature (89)..(141): NCBI GI NO: 7445224 NR Description: hypothetical protein F10M23
  misc_feature (1)..(139): NCBI GI NO: 30682530 NR Description: Proline synthetase associated protein -related
  misc_feature (1)..(139): NCBI GI NO: 18391333 NR Description: putative Proline synthetase associated protein
  misc_feature (1)..(139): NCBI GI NO: 11359716 NR Description: conserved hypothetical protein
  misc_feature (1)..(141): NCBI GI NO: 6005842 NR Description: proline synthetase co-transcribed homolog
  misc_feature (1)..(139): NCBI GI NO: 16930823 NR Description: proline synthetase co-transcribed [Mus musculus]
  misc_feature (1)..(117): NCBI GI NO: 19386824 NR Description: B1147A04.19
MVHGVDGEKVANHLDRAVSNLGRHPLKVLVQVNTSGEVSKSGIEPSSVVELARHVKHHCPNLVFSGLMTIGMPDYTSTPENFRTLSNCRADVCKALGMAEDQFELSMGMSGDFELAIEMGSTNVRVGSTIFGPREYPKKTT

SEQ ID NO: 3097 - DNA, 987 bp, Arabidopsis thaliana
  misc_feature (1)..(987): Ceres Seq. ID no. 12326871
aaaagaagacttttgtaaggaaataaacacacaactaaagagatgtcgtcaaccttgagcaacgaagagtcaggactcggtgattcaaatcgttcgacggaagtagatagcggcgacggaggaaacttcacggcttacgagtctcgattccagtcgcagcggtttgactcttccttctctaattttgactcccaaccggagaaagagtcagacttaccaggcggcgattcatctcctcgacccgaaactcaatctccgccgtcgataaatagtttcgatgatacaaacggttcgatcttgccgccaccatcggccatggagaaagaggaaggtttcgctcttagagagtggcgaaggctaaatgctctgagattggaagagaaagaaaaggaagagaaagaaatggttcaacaaattctagaagcagcagagcaatataaggctgagttctatagcaagcgtaacgttactattgaaaacaacaagaaactaaaccgcgagaaagagaagttttttttggagaatcaagaaaagttttacgctgaagctgacaaaaacaattggaaggcgattgcagaactcattcctcgtgaagtgccagttatagagaatagagggaacaagaagaaaacagcaaccataactgtaatccagggaccaaagccagggaagcccactgatctgtctcgtatgcgtcaagtgctcacgaaactcaagcacaatccgccaactcatatgaagccaaaactgccctcaccatctggagctgacccgaatgtgagtgtgagtgaacaggtcacagttacagagaagttgtagttgtgtatgtgacaagttaacttcttcttgattgatgttaaaccgtctttactttgttagcttccctcatgttcagtctcgactattgtttgttttgatttcgtctttggtcttaccattgttggtttcccacacagttttctactttgatgtatatataatatattc

SEQ ID NO: 3098 - protein, 258 aa, Arabidopsis thaliana
  peptide (1)..(258): Ceres Seq. ID no. 12326872
  misc_feature (95)..(228): Pfam Name: Pfam Description:  Clathrin light chain
  misc_feature (36)..(258): NCBI GI NO: 18409442 NR Description: putative protein; protein id: At3g51890
  misc_feature (36)..(258): NCBI GI NO: 11291712 NR Description: hypothetical protein
  misc_feature (92)..(258): NCBI GI NO: 21617999 NR Description: unknown [Arabidopsis thaliana]
  misc_feature (28)..(250): NCBI GI NO: 18405251 NR Description: expressed protein; protein id: At2g40060
  misc_feature (28)..(250): NCBI GI NO: 21593842 NR Description: unknown [Arabidopsis thaliana]
  misc_feature (18)..(243): NCBI GI NO: 18399468 NR Description: expressed protein; protein id: At2g20760
  misc_feature (18)..(243): NCBI GI NO: 21536711 NR Description: unknown [Arabidopsis thaliana]
  misc_feature (22)..(243): NCBI GI NO: 32487391 NR Description: OSJNBb0017I01.5
MSSTLSNEESGLGDSNRSTEVDSGDGGNFTAYESRFQSQRFDSSFSNFDSQPEKESDLPGGDSSPRPETQSPPSINSFDDTNGSILPPPSAMEKEEGFALREWRRLNALRLEEKEKEEKEMVQQILEAAEQYKAEFYSKRNVTIENNKKLNREKEKFFLENQEKFYAEADKNNWKAIAELIPREVPVIENRGNKKKTATITVIQGPKPGKPTDLSRMRQVLTKLKHNPPTHMKPKLPSPSGADPNVSVSEQVTVTEKL

SEQ ID NO: 3099 - protein, 167 aa, Arabidopsis thaliana
  peptide (1)..(167): Ceres Seq. ID no. 12326873
  misc_feature (4)..(137): Pfam Name: Pfam Description:  Clathrin light chain
  misc_feature (1)..(167): NCBI GI NO: 18409442 NR Description: putative protein; protein id: At3g51890
  misc_feature (1)..(167): NCBI GI NO: 11291712 NR Description: hypothetical protein
  misc_feature (1)..(167): NCBI GI NO: 21617999 NR Description: unknown [Arabidopsis thaliana]
  misc_feature (1)..(159): NCBI GI NO: 18405251 NR Description: expressed protein; protein id: At2g40060
  misc_feature (1)..(159): NCBI GI NO: 21593842 NR Description: unknown [Arabidopsis thaliana]
  misc_feature (1)..(152): NCBI GI NO: 18399468 NR Description: expressed protein; protein id: At2g20760
  misc_feature (1)..(152): NCBI GI NO: 21536711 NR Description: unknown [Arabidopsis thaliana]
  misc_feature (1)..(152): NCBI GI NO: 32487391 NR Description: OSJNBb0017I01.5
MEKEEGFALREWRRLNALRLEEKEKEEKEMVQQILEAAEQYKAEFYSKRNVTIENNKKLNREKEKFFLENQEKFYAEADKNNWKAIAELIPREVPVIENRGNKKKTATITVIQGPKPGKPTDLSRMRQVLTKLKHNPPTHMKPKLPSPSGADPNVSVSEQVTVTEKL

SEQ ID NO: 3100 - protein, 138 aa, Arabidopsis thaliana
  peptide (1)..(138): Ceres Seq. ID no. 12326874
  misc_feature (1)..(108): Pfam Name: Pfam Description:  Clathrin light chain
  misc_feature (1)..(138): NCBI GI NO: 18409442 NR Description: putative protein; protein id: At3g51890
  misc_feature (1)..(138): NCBI GI NO: 11291712 NR Description: hypothetical protein
  misc_feature (1)..(138): NCBI GI NO: 21617999 NR Description: unknown [Arabidopsis thaliana]
  misc_feature (1)..(130): NCBI GI NO: 18405251 NR Description: expressed protein; protein id: At2g40060
  misc_feature (1)..(130): NCBI GI NO: 21593842 NR Description: unknown [Arabidopsis thaliana]
  misc_feature (1)..(123): NCBI GI NO: 18399468 NR Description: expressed protein; protein id: At2g20760
  misc_feature (1)..(123): NCBI GI NO: 21536711 NR Description: unknown [Arabidopsis thaliana]
  misc_feature (1)..(123): NCBI GI NO: 32487391 NR Description: OSJNBb0017I01.5
MVQQILEAAEQYKAEFYSKRNVTIENNKKLNREKEKFFLENQEKFYAEADKNNWKAIAELIPREVPVIENRGNKKKTATITVIQGPKPGKPTDLSRMRQVLTKLKHNPPTHMKPKLPSPSGADPNVSVSEQVTVTEKL

SEQ ID NO: 3101 - DNA, 1356 bp, Arabidopsis thaliana
  misc_feature (1)..(1356): Ceres Seq. ID no. 13504985
atattgttttgagccatggaaactcttttccacactcttcttagattattactattcgtagccatctctcatactctgtcccctctcgccggttctttccggatttctaatgactttccggcggttttcaacttcggagactctaactctgacaccggagaacttagctcgggtcttggattccttccacaaccttcctatgaaataaccttctttagatctccaacttccggaagattctgcaatggacgtcttatcgtcgattttctaatggaagcaattgatcgaccatatttgaggccttatttagattcgataagtcgacaaacttaccgaagaggctgcaattttgctgcggctgcgtcaacgattcagaaggcaaatgctgcatcctatagcccctttggttttggtgttcaagtctctcaattcatcacctttaagtccaaagtccttcaattgatacaacaagatgaagagctccaaagatacttaccgtccgaatatttttttagtaatggattgtatatgtttgatatcggacaaaatgatattgccggagcattttacaccaagacagtagatcaagttcttgctctggttcctataatcttagatatatttcaagatggaataaagagattatatgcagagggggcaagaaactattggatacacaacacaggaccacttgggtgtttagcacaagttgtgtcaatttttggggaagacaaatcaaagcttgatgagtttggttgtgtcagtgaccataaccaagctgctaagcttttcaatttgcagcttcatggtcttttcaaaaaactccctcaacaatatcccaattcccgtttcacatacgtagatatcttctctatcaaatccgacctcatcctgaatcattccaaatatggttttgatcattcgataatggtatgttgtggaaccggaggaccaccactgaactacgatgatcaggttggttgcggtaagacagcaagatcaaatggtacgatcataaccgccaaaccttgttatgatagttccaaatatgttaactgggacggcattcattacactgaagctgcaaatcggtttgttgcactacacattctcaccggtaaatactctgagacggcgtcatctttgaatctttagcaatgtaacaaagaaagttacattatcactttctttatggattacatatatatttagttgtatgttaactggtttatttatgattatatgaataatttccataaacttaactgtttcatttccaaaaaaaggcattttccaattttctttcacaaagatagatgctttgtcacaataaaatgaatctttcaaatttcctgc

SEQ ID NO: 3102 - protein, 379 aa, Arabidopsis thaliana
  peptide (1)..(379): Ceres Seq. ID no. 13504986
  misc_feature (37)..(365): Pfam Name: Pfam Description:  GDSL-like Lipase/Acylhydrolase
  misc_feature (1)..(379): NCBI GI NO: 15229919 NR Description: GDSL-motif lipase/hydrolase protein
  misc_feature (1)..(379): NCBI GI NO: 21553789 NR Description: putative nodulin [Arabidopsis thaliana]
  misc_feature (25)..(379): NCBI GI NO: 23397291 NR Description: putative nodulin [Arabidopsis thaliana]
  misc_feature (9)..(372): NCBI GI NO: 25405771 NR Description: hypothetical protein T22H22.20
  misc_feature (8)..(372): NCBI GI NO: 18405064 NR Description: GDSL-motif lipase/hydrolase protein
  misc_feature (13)..(372): NCBI GI NO: 21537184 NR Description: early nodule-specific protein, putative
  misc_feature (6)..(371): NCBI GI NO: 15217506 NR Description: GDSL-motif lipase/hydrolase protein
  misc_feature (35)..(372): NCBI GI NO: 15223585 NR Description: GDSL-motif lipase/hydrolase protein
  misc_feature (8)..(368): NCBI GI NO: 15220550 NR Description: GDSL-motif lipase/hydrolase protein
  misc_feature (34)..(372): NCBI GI NO: 33147016 NR Description: putative early nodulin 8 precursor
METLFHTLLRLLLFVAISHTLSPLAGSFRISNDFPAVFNFGDSNSDTGELSSGLGFLPQPSYEITFFRSPTSGRFCNGRLIVDFLMEAIDRPYLRPYLDSISRQTYRRGCNFAAAASTIQKANAASYSPFGFGVQVSQFITFKSKVLQLIQQDEELQRYLPSEYFFSNGLYMFDIGQNDIAGAFYTKTVDQVLALVPIILDIFQDGIKRLYAEGARNYWIHNTGPLGCLAQVVSIFGEDKSKLDEFGCVSDHNQAAKLFNLQLHGLFKKLPQQYPNSRFTYVDIFSIKSDLILNHSKYGFDHSIMVCCGTGGPPLNYDDQVGCGKTARSNGTIITAKPCYDSSKYVNWDGIHYTEAANRFVALHILTGKYSETASSLNL

SEQ ID NO: 3103 - protein, 294 aa, Arabidopsis thaliana
  peptide (1)..(294): Ceres Seq. ID no. 13504987
  misc_feature (1)..(280): Pfam Name: Pfam Description:  GDSL-like Lipase/Acylhydrolase
  misc_feature (1)..(294): NCBI GI NO: 15229919 NR Description: GDSL-motif lipase/hydrolase protein
  misc_feature (1)..(294): NCBI GI NO: 21553789 NR Description: putative nodulin [Arabidopsis thaliana]
  misc_feature (1)..(294): NCBI GI NO: 23397291 NR Description: putative nodulin [Arabidopsis thaliana]
  misc_feature (1)..(287): NCBI GI NO: 25405771 NR Description: hypothetical protein T22H22.20
  misc_feature (1)..(287): NCBI GI NO: 18405064 NR Description: GDSL-motif lipase/hydrolase protein
  misc_feature (1)..(287): NCBI GI NO: 21537184 NR Description: early nodule-specific protein, putative
  misc_feature (1)..(286): NCBI GI NO: 15217506 NR Description: GDSL-motif lipase/hydrolase protein
  misc_feature (1)..(287): NCBI GI NO: 15223585 NR Description: GDSL-motif lipase/hydrolase protein
  misc_feature (1)..(283): NCBI GI NO: 15220550 NR Description: GDSL-motif lipase/hydrolase protein
  misc_feature (1)..(287): NCBI GI NO: 33147016 NR Description: putative early nodulin 8 precursor
MEAIDRPYLRPYLDSISRQTYRRGCNFAAAASTIQKANAASYSPFGFGVQVSQFITFKSKVLQLIQQDEELQRYLPSEYFFSNGLYMFDIGQNDIAGAFYTKTVDQVLALVPIILDIFQDGIKRLYAEGARNYWIHNTGPLGCLAQVVSIFGEDKSKLDEFGCVSDHNQAAKLFNLQLHGLFKKLPQQYPNSRFTYVDIFSIKSDLILNHSKYGFDHSIMVCCGTGGPPLNYDDQVGCGKTARSNGTIITAKPCYDSSKYVNWDGIHYTEAANRFVALHILTGKYSETASSLNL

SEQ ID NO: 3104 - protein, 208 aa, Arabidopsis thaliana
  peptide (1)..(208): Ceres Seq. ID no. 13504988
  misc_feature (1)..(194): Pfam Name: Pfam Description:  GDSL-like Lipase/Acylhydrolase
  misc_feature (1)..(208): NCBI GI NO: 15229919 NR Description: GDSL-motif lipase/hydrolase protein
  misc_feature (1)..(208): NCBI GI NO: 21553789 NR Description: putative nodulin [Arabidopsis thaliana]
  misc_feature (1)..(208): NCBI GI NO: 23397291 NR Description: putative nodulin [Arabidopsis thaliana]
  misc_feature (1)..(201): NCBI GI NO: 25405771 NR Description: hypothetical protein T22H22.20
  misc_feature (1)..(201): NCBI GI NO: 18405064 NR Description: GDSL-motif lipase/hydrolase protein
  misc_feature (1)..(201): NCBI GI NO: 21537184 NR Description: early nodule-specific protein, putative
  misc_feature (1)..(200): NCBI GI NO: 15217506 NR Description: GDSL-motif lipase/hydrolase protein
  misc_feature (1)..(201): NCBI GI NO: 15223585 NR Description: GDSL-motif lipase/hydrolase protein
  misc_feature (1)..(197): NCBI GI NO: 15220550 NR Description: GDSL-motif lipase/hydrolase protein
  misc_feature (1)..(201): NCBI GI NO: 33147016 NR Description: putative early nodulin 8 precursor
MFDIGQNDIAGAFYTKTVDQVLALVPIILDIFQDGIKRLYAEGARNYWIHNTGPLGCLAQVVSIFGEDKSKLDEFGCVSDHNQAAKLFNLQLHGLFKKLPQQYPNSRFTYVDIFSIKSDLILNHSKYGFDHSIMVCCGTGGPPLNYDDQVGCGKTARSNGTIITAKPCYDSSKYVNWDGIHYTEAANRFVALHILTGKYSETASSLNL

SEQ ID NO: 3105 - DNA, 1171 bp, Arabidopsis thaliana
  misc_feature (1)..(1171): Ceres Seq. ID no. 12327829
aaacgaataaagaagtaactgtgaaagagcgaagaagagtcacacaaaaaaaacaatggcggaatcttcagagcctccggttgttctccttcaccgaccaccgtctctaactttcatggacgagattctgactcgtgaattccgtactctcatcaccgacacttcatcatcggaatcactcccgagcttcctcccccgtcacgcctcctccgccagagccttcgttatcaccggcagacttccggtaaccgaagaactcctttctcatctcccttctctccagatactcgtctgcactagcgtcggcatcgatcacatcgatctcgccgcatgcaagcgtcgcggcatcgttatcaccaacgctggcaacgcgttttccgatgacgttgctgattgtgccgtcggtttgcttattagtgttctccgtcgtattcctgcagccgatcgttacgtccgggctggtaattgggcgaaatttggggattttcaattagggtccaaggtaagtgggaagagagttgggatagttggattggggagcattggatcatttgttgctaaaagacttgaatcatttggctgtgttatctcttacaattcaaggagtcagaaacagagtagtccataccggttttactctgacattctctcgttagcagagaacaacgatgtacttgtcctctgctgctctttgacagacgaaacgcaccatattgtgaatagagaagtgatggagttgcttggtaaggatggggttgtgatcaatgtgggacgaggaaagttgattgatgagaaggagatggtcaagtgtttggttgacggtgtgattggtggtgctggtttagatgtgtttgagaatgaaccggcagttcctcaggagttgtttggtttggataatgtagtgttgtctcctcattttgctgtggctacaccagggtctttggacaatgttgcacagattgctttagctaacttgaaggcgtttttctcgaaccggcctttgctttctccggttcaattggattgagagagcgcccggtttgatcaggtagctaaattagttaagctattgtttattataatcaataattcaaaaagaaagtgtaatgaatatttgaatgtaccctgacattctctcccaaagaagaagaattaatgacgcatattattt

SEQ ID NO: 3106 - protein, 323 aa, Arabidopsis thaliana
  peptide (1)..(323): Ceres Seq. ID no. 12327830
  misc_feature (17)..(105): Pfam Name: Pfam Description:  D-isomer specific 2-hydroxyacid dehydrogenase
  misc_feature (1)..(323): NCBI GI NO: 15222015 NR Description: hypothetical protein; protein id: At1g12550.1
  misc_feature (8)..(322): NCBI GI NO: 38345308 NR Description: OSJNBb0085F13.13
  misc_feature (1)..(320): NCBI GI NO: 7485630 NR Description: probable glycerate dehydrogenase
  misc_feature (4)..(322): NCBI GI NO: 38345306 NR Description: OSJNBb0085F13.6
  misc_feature (2)..(320): NCBI GI NO: 32488421 NR Description: OSJNBb0085F13.11
  misc_feature (5)..(321): NCBI GI NO: 32488422 NR Description: OSJNBb0085F13.12
  misc_feature (10)..(320): NCBI GI NO: 34904262 NR Description: putative Caulobacter crescentus D-isomer specific 2-hydroxyacid dehydrogenases family
  misc_feature (10)..(320): NCBI GI NO: 15220005 NR Description: putative D-isomer specific 2-hydroxyacid dehydrogenase
  misc_feature (1)..(320): NCBI GI NO: 21636166 NR Description: unknown [Aegilops tauschii]
  misc_feature (16)..(320): NCBI GI NO: 15890302 NR Description: AGR_L_379p [Agrobacterium tumefaciens]
MAESSEPPVVLLHRPPSLTFMDEILTREFRTLITDTSSSESLPSFLPRHASSARAFVITGRLPVTEELLSHLPSLQILVCTSVGIDHIDLAACKRRGIVITNAGNAFSDDVADCAVGLLISVLRRIPAADRYVRAGNWAKFGDFQLGSKVSGKRVGIVGLGSIGSFVAKRLESFGCVISYNSRSQKQSSPYRFYSDILSLAENNDVLVLCCSLTDETHHIVNREVMELLGKDGVVINVGRGKLIDEKEMVKCLVDGVIGGAGLDVFENEPAVPQELFGLDNVVLSPHFAVATPGSLDNVAQIALANLKAFFSNRPLLSPVQLD

SEQ ID NO: 3107 - protein, 303 aa, Arabidopsis thaliana
  peptide (1)..(303): Ceres Seq. ID no. 12327831
  misc_feature (1)..(85): Pfam Name: Pfam Description:  D-isomer specific 2-hydroxyacid dehydrogenase
  misc_feature (1)..(303): NCBI GI NO: 15222015 NR Description: hypothetical protein; protein id: At1g12550.1
  misc_feature (1)..(302): NCBI GI NO: 38345308 NR Description: OSJNBb0085F13.13
  misc_feature (1)..(300): NCBI GI NO: 7485630 NR Description: probable glycerate dehydrogenase
  misc_feature (1)..(302): NCBI GI NO: 38345306 NR Description: OSJNBb0085F13.6
  misc_feature (1)..(300): NCBI GI NO: 32488421 NR Description: OSJNBb0085F13.11
  misc_feature (1)..(301): NCBI GI NO: 32488422 NR Description: OSJNBb0085F13.12
  misc_feature (1)..(300): NCBI GI NO: 34904262 NR Description: putative Caulobacter crescentus D-isomer specific 2-hydroxyacid dehydrogenases family
  misc_feature (1)..(300): NCBI GI NO: 15220005 NR Description: putative D-isomer specific 2-hydroxyacid dehydrogenase
  misc_feature (1)..(300): NCBI GI NO: 21636166 NR Description: unknown [Aegilops tauschii]
  misc_feature (1)..(300): NCBI GI NO: 15890302 NR Description: AGR_L_379p [Agrobacterium tumefaciens]
MDEILTREFRTLITDTSSSESLPSFLPRHASSARAFVITGRLPVTEELLSHLPSLQILVCTSVGIDHIDLAACKRRGIVITNAGNAFSDDVADCAVGLLISVLRRIPAADRYVRAGNWAKFGDFQLGSKVSGKRVGIVGLGSIGSFVAKRLESFGCVISYNSRSQKQSSPYRFYSDILSLAENNDVLVLCCSLTDETHHIVNREVMELLGKDGVVINVGRGKLIDEKEMVKCLVDGVIGGAGLDVFENEPAVPQELFGLDNVVLSPHFAVATPGSLDNVAQIALANLKAFFSNRPLLSPVQLD

SEQ ID NO: 3108 - DNA, 1014 bp, Arabidopsis thaliana
  misc_feature (1)..(1014): Ceres Seq. ID no. 12329789
gtcactctccgttaattctaacggtcatgtcagacgccgtaaccaaaaccgtcgcccctctccgtcgtaaagctaatcctattaacggaaaacacactaacggcgtcaccatcgacggaatcttcgacgaccacaatcgccaaataggaccaataaatagccaaatggaagatattgctcagaaaactgatgacggtggaggaggagaatggacaagcaaagcgtcgtttatgacgtggacgatgcatgacataatttacgtggcgagacaccattggataccgtgtttattcgcggccggagttatgttttttacggttgtggagtacacgttccagatgactcctgcgagttctcagccgtttgatctaggatttgtggccacacgttatctgcataacatcttggcatcttcacccaatcttaacaccgttttagccgctttaaacacgattttggtagggatgcaaacaacgtatattggatgtacatgggcagtggaaggacgaccacgggcaaccatcgcggctttattcatgttcacttgtcgtggcattctcggctactctactcagctccctcgccctcaggaatttttaggatcaggagtagattatccggtcggaaacgtgtcgttcttcctcttctactcaggtcacgtcgccggatcgatgatcgcatcgttggacatgaagagaatgcagaggtttaggctggcgatgttttttgacattctcaatgtattgcaatccatcaggctgcttggtacgagaggacactacacgattgatattgcggttggagttggcgctgggattctctttgactcattggccgggaagtacaaagagatgagcaagagacatttacggaatactcgttgtagtttgatttcaaaagactctctagtcacttaaatctatttttttttccggcaaaataattgtatattacactaaatctatttcttcttaaaacgtttagaaacacatttagttgaagtttaatgatttc

SEQ ID NO: 3109 - protein, 304 aa, Arabidopsis thaliana
  peptide (1)..(304): Ceres Seq. ID no. 12329790
  misc_feature (9)..(304): NCBI GI NO: 15232701 NR Description: unknown protein; protein id: At3g15830.1
  misc_feature (9)..(303): NCBI GI NO: 18400910 NR Description: expressed protein; protein id: At3g15820
  misc_feature (55)..(303): NCBI GI NO: 13926235 NR Description: AT3g15820/MSJ11_22 [Arabidopsis thaliana]
HSPLILTVMSDAVTKTVAPLRRKANPINGKHTNGVTIDGIFDDHNRQIGPINSQMEDIAQKTDDGGGGEWTSKASFMTWTMHDIIYVARHHWIPCLFAAGVMFFTVVEYTFQMTPASSQPFDLGFVATRYLHNILASSPNLNTVLAALNTILVGMQTTYIGCTWAVEGRPRATIAALFMFTCRGILGYSTQLPRPQEFLGSGVDYPVGNVSFFLFYSGHVAGSMIASLDMKRMQRFRLAMFFDILNVLQSIRLLGTRGHYTIDIAVGVGAGILFDSLAGKYKEMSKRHLRNTRCSLISKDSLVT

SEQ ID NO: 3110 - protein, 296 aa, Arabidopsis thaliana
  peptide (1)..(296): Ceres Seq. ID no. 12329791
  misc_feature (1)..(296): NCBI GI NO: 15232701 NR Description: unknown protein; protein id: At3g15830.1
  misc_feature (1)..(295): NCBI GI NO: 18400910 NR Description: expressed protein; protein id: At3g15820
  misc_feature (47)..(295): NCBI GI NO: 13926235 NR Description: AT3g15820/MSJ11_22 [Arabidopsis thaliana]
MSDAVTKTVAPLRRKANPINGKHTNGVTIDGIFDDHNRQIGPINSQMEDIAQKTDDGGGGEWTSKASFMTWTMHDIIYVARHHWIPCLFAAGVMFFTVVEYTFQMTPASSQPFDLGFVATRYLHNILASSPNLNTVLAALNTILVGMQTTYIGCTWAVEGRPRATIAALFMFTCRGILGYSTQLPRPQEFLGSGVDYPVGNVSFFLFYSGHVAGSMIASLDMKRMQRFRLAMFFDILNVLQSIRLLGTRGHYTIDIAVGVGAGILFDSLAGKYKEMSKRHLRNTRCSLISKDSLVT

SEQ ID NO: 3111 - protein, 250 aa, Arabidopsis thaliana
  peptide (1)..(250): Ceres Seq. ID no. 12329792
  misc_feature (1)..(250): NCBI GI NO: 15232701 NR Description: unknown protein; protein id: At3g15830.1
  misc_feature (1)..(249): NCBI GI NO: 18400910 NR Description: expressed protein; protein id: At3g15820
  misc_feature (1)..(249): NCBI GI NO: 13926235 NR Description: AT3g15820/MSJ11_22 [Arabidopsis thaliana]
MEDIAQKTDDGGGGEWTSKASFMTWTMHDIIYVARHHWIPCLFAAGVMFFTVVEYTFQMTPASSQPFDLGFVATRYLHNILASSPNLNTVLAALNTILVGMQTTYIGCTWAVEGRPRATIAALFMFTCRGILGYSTQLPRPQEFLGSGVDYPVGNVSFFLFYSGHVAGSMIASLDMKRMQRFRLAMFFDILNVLQSIRLLGTRGHYTIDIAVGVGAGILFDSLAGKYKEMSKRHLRNTRCSLISKDSLVT

SEQ ID NO: 3112 - DNA, 1982 bp, Arabidopsis thaliana
  misc_feature (1)..(1982): Ceres Seq. ID no. 12331159
gatccttgtcacaaaatgtcgcgtaattcttctactgatttcagctcaatcgctcaaattcgagtttgcgtttagaaattgaagttgactcttctgttcttgaatctatctccgatcggtgaactatctctcagtaccaggagattgatcactccttcgacattgctctttgaattcgtcctcaagggtattaatgagctcgtagaagctaccagaaatggcgtccatgagctctggtgatgaaagccttcgactttgcatgtttgatttgaggagaggtcaaactgaaggacaagagttagagaaaattttgttcttttatcctgccgatttagacttctcgacgcagttatcagtgatcgggctcagtgaagggcttattacttttactagacttttctctccggaggcggcttgtgaagtgatcgaagcagaaagacattcccatgttttctatgaggctgaacctgatatctggatggttatggttgtggagaaaaataaggagacaggagcgatatggaggatcgatgcattaaggagggtgcttaaagaagtgcactcactctttgtgatgtttcacgggtcaattagggcattaatcgaaaaagaaccaacaggagggcttacccgatcactattgtacccgttcatcacagattatttaagcacatttcaaatatggtctctctcggaagactgctgctgtgaattttttgttgggaagaaacttcagctaccaactttccgtgaaactttgagagagcgtggaactgttcaaatgcttactttagcaagggacactgcagttgaagttcagtctcttgttcaagtactagattcatgtgctgggagcttacgatgtcactctatgatcttatttcaagatcttttggtttcaacaaccctctcagctgatgataccgtcgacttgtttacatttgcggtaatgaggttgacctcaaaagctttctcctctgatacgagttcttggtcatatctacgtaaagggcctggttcatctgaaatctcttctagatctaatctggcacccgttggctcaattgattccctacactcaagaaacggtaataacatgcatcatgttattaggccactacaaaatgataagtggacaaaagggaaagatgggtttctaataaccgatatttggggtcttgagactggcggctcccctgattctgccatccctacaatttggcttcagcagacacaagaaagaatgtatctccttgcctatcagcataaaagtctcaccttacttcttctgatgcctacaaatgccattgtcaatggagatttaagcatctcagccgtgaaacagcaagttattgaagatgcatcactgagaattttgaaaattgaagagaatatttcaagagggtggggcggtgagaatgcttaccatattaagggttaccgttacttagtagttgataatgacacgaaagtatccagatcttctccttcaggaaaagtaacaacacttgcaaaggagtctctacttgcactaaacaagcttagagaagaagtggattcagaaaaaagccgtgcaaaaggacaggagaaagacatggaaatatgcatcagagctaagaacaatgtgtgggtgatcgcccgtgtgaccagaggcaaagagctttacatggctttggagaaaggcagcgacactcttcttgataccacagacgctgttggaagattcagcaacaggtattgcagcggagcattcttgatggactaagttttcgtgttctttcttctggttttgggaagagggttcttctagtttcaagtacgaagtgaaaagctcagaagaagtaatgagcacttctctctcagccattaattttgttttgtgagaaattgcagagaggaaaacgattgtgttcttagttggcctgtagatatgtaacaatgatattccacgttggatcagtgcaaacaaatccttttttgtg

SEQ ID NO: 3113 - protein, 515 aa, Arabidopsis thaliana
  peptide (1)..(515): Ceres Seq. ID no. 12331160
  misc_feature (1)..(515): NCBI GI NO: 21618002 NR Description: unknown [Arabidopsis thaliana]
  misc_feature (1)..(515): NCBI GI NO: 18394314 NR Description: expressed protein; protein id: At1g16020
  misc_feature (1)..(515): NCBI GI NO: 30684673 NR Description: expressed protein [Arabidopsis thaliana]
  misc_feature (136)..(515): NCBI GI NO: 15220866 NR Description: myrosinase precursor, putative
  misc_feature (136)..(515): NCBI GI NO: 25372816 NR Description: F23A5.27 [imported] - Arabidopsis thaliana
  misc_feature (1)..(322): NCBI GI NO: 25372816 NR Description: F23A5.27 [imported] - Arabidopsis thaliana
  misc_feature (1)..(322): NCBI GI NO: 15220866 NR Description: myrosinase precursor, putative
  misc_feature (203)..(515): NCBI GI NO: 18266049 NR Description: myrosinase precursor [Brassica oleracea]
  misc_feature (161)..(515): NCBI GI NO: 38175489 NR Description: putative myrosinase precursor
  misc_feature (245)..(506): NCBI GI NO: 14517360 NR Description: At1g80910/F23A5_21 [Arabidopsis thaliana]
MASMSSGDESLRLCMFDLRRGQTEGQELEKILFFYPADLDFSTQLSVIGLSEGLITFTRLFSPEAACEVIEAERHSHVFYEAEPDIWMVMVVEKNKETGAIWRIDALRRVLKEVHSLFVMFHGSIRALIEKEPTGGLTRSLLYPFITDYLSTFQIWSLSEDCCCEFFVGKKLQLPTFRETLRERGTVQMLTLARDTAVEVQSLVQVLDSCAGSLRCHSMILFQDLLVSTTLSADDTVDLFTFAVMRLTSKAFSSDTSSWSYLRKGPGSSEISSRSNLAPVGSIDSLHSRNGNNMHHVIRPLQNDKWTKGKDGFLITDIWGLETGGSPDSAIPTIWLQQTQERMYLLAYQHKSLTLLLLMPTNAIVNGDLSISAVKQQVIEDASLRILKIEENISRGWGGENAYHIKGYRYLVVDNDTKVSRSSPSGKVTTLAKESLLALNKLREEVDSEKSRAKGQEKDMEICIRAKNNVWVIARVTRGKELYMALEKGSDTLLDTTDAVGRFSNRYCSGAFLMD

SEQ ID NO: 3114 - protein, 512 aa, Arabidopsis thaliana
  peptide (1)..(512): Ceres Seq. ID no. 12331161
  misc_feature (1)..(512): NCBI GI NO: 21618002 NR Description: unknown [Arabidopsis thaliana]
  misc_feature (1)..(512): NCBI GI NO: 18394314 NR Description: expressed protein; protein id: At1g16020
  misc_feature (1)..(512): NCBI GI NO: 30684673 NR Description: expressed protein [Arabidopsis thaliana]
  misc_feature (133)..(512): NCBI GI NO: 15220866 NR Description: myrosinase precursor, putative
  misc_feature (133)..(512): NCBI GI NO: 25372816 NR Description: F23A5.27 [imported] - Arabidopsis thaliana
  misc_feature (1)..(319): NCBI GI NO: 25372816 NR Description: F23A5.27 [imported] - Arabidopsis thaliana
  misc_feature (1)..(319): NCBI GI NO: 15220866 NR Description: myrosinase precursor, putative
  misc_feature (200)..(512): NCBI GI NO: 18266049 NR Description: myrosinase precursor [Brassica oleracea]
  misc_feature (158)..(512): NCBI GI NO: 38175489 NR Description: putative myrosinase precursor
  misc_feature (242)..(503): NCBI GI NO: 14517360 NR Description: At1g80910/F23A5_21 [Arabidopsis thaliana]
MSSGDESLRLCMFDLRRGQTEGQELEKILFFYPADLDFSTQLSVIGLSEGLITFTRLFSPEAACEVIEAERHSHVFYEAEPDIWMVMVVEKNKETGAIWRIDALRRVLKEVHSLFVMFHGSIRALIEKEPTGGLTRSLLYPFITDYLSTFQIWSLSEDCCCEFFVGKKLQLPTFRETLRERGTVQMLTLARDTAVEVQSLVQVLDSCAGSLRCHSMILFQDLLVSTTLSADDTVDLFTFAVMRLTSKAFSSDTSSWSYLRKGPGSSEISSRSNLAPVGSIDSLHSRNGNNMHHVIRPLQNDKWTKGKDGFLITDIWGLETGGSPDSAIPTIWLQQTQERMYLLAYQHKSLTLLLLMPTNAIVNGDLSISAVKQQVIEDASLRILKIEENISRGWGGENAYHIKGYRYLVVDNDTKVSRSSPSGKVTTLAKESLLALNKLREEVDSEKSRAKGQEKDMEICIRAKNNVWVIARVTRGKELYMALEKGSDTLLDTTDAVGRFSNRYCSGAFLMD

SEQ ID NO: 3115 - protein, 501 aa, Arabidopsis thaliana
  peptide (1)..(501): Ceres Seq. ID no. 12331162
  misc_feature (1)..(501): NCBI GI NO: 21618002 NR Description: unknown [Arabidopsis thaliana]
  misc_feature (1)..(501): NCBI GI NO: 18394314 NR Description: expressed protein; protein id: At1g16020
  misc_feature (1)..(501): NCBI GI NO: 30684673 NR Description: expressed protein [Arabidopsis thaliana]
  misc_feature (122)..(501): NCBI GI NO: 15220866 NR Description: myrosinase precursor, putative
  misc_feature (122)..(501): NCBI GI NO: 25372816 NR Description: F23A5.27 [imported] - Arabidopsis thaliana
  misc_feature (1)..(308): NCBI GI NO: 25372816 NR Description: F23A5.27 [imported] - Arabidopsis thaliana
  misc_feature (1)..(308): NCBI GI NO: 15220866 NR Description: myrosinase precursor, putative
  misc_feature (189)..(501): NCBI GI NO: 18266049 NR Description: myrosinase precursor [Brassica oleracea]
  misc_feature (147)..(501): NCBI GI NO: 38175489 NR Description: putative myrosinase precursor
  misc_feature (231)..(492): NCBI GI NO: 14517360 NR Description: At1g80910/F23A5_21 [Arabidopsis thaliana]
MFDLRRGQTEGQELEKILFFYPADLDFSTQLSVIGLSEGLITFTRLFSPEAACEVIEAERHSHVFYEAEPDIWMVMVVEKNKETGAIWRIDALRRVLKEVHSLFVMFHGSIRALIEKEPTGGLTRSLLYPFITDYLSTFQIWSLSEDCCCEFFVGKKLQLPTFRETLRERGTVQMLTLARDTAVEVQSLVQVLDSCAGSLRCHSMILFQDLLVSTTLSADDTVDLFTFAVMRLTSKAFSSDTSSWSYLRKGPGSSEISSRSNLAPVGSIDSLHSRNGNNMHHVIRPLQNDKWTKGKDGFLITDIWGLETGGSPDSAIPTIWLQQTQERMYLLAYQHKSLTLLLLMPTNAIVNGDLSISAVKQQVIEDASLRILKIEENISRGWGGENAYHIKGYRYLVVDNDTKVSRSSPSGKVTTLAKESLLALNKLREEVDSEKSRAKGQEKDMEICIRAKNNVWVIARVTRGKELYMALEKGSDTLLDTTDAVGRFSNRYCSGAFLMD

SEQ ID NO: 3116 - DNA, 1646 bp, Arabidopsis thaliana
  misc_feature (1)..(1646): Ceres Seq. ID no. 13574937
  misc_feature (1578)..(1578): n is a, c, t, g, unknown, or other
aacaatctactactactattatattttcttacacattttgcatcactctttttcaggatttttggttctcgagaaaaaagtgaagatttttgagattctctttcgatggattacgaacgaatcggaaagacccaggttactagtagcggcggcggattttctccggggaagttaaggagtatgcttcttctaggtgttgatagaaagaagaatgaagaagaagaatcaactcctacaatgagatctgggtctaatcaaattgatgaccctagggtttatgttgctagtggattagatgattgcaaagatgttgatgttgtgagtgagattactgattgttctacttcagggatagctagatcgattagtttgggtcttcaagagtattctgattatgataatgtgaatgagatcaagagtgtttctgcatcatctgtctttgagtttcaaaagactgagaaggaaaaagttaatcaaagaatgcctattagatcattctctaaaccagctccatctaaatgggatgatgctcagaaatggattgctagtcctacggctaaccgaccgaagactggacaggttcaggttccgggttcgaagaaagggcctagctttggtcgtcagtcttctatgaagattgttgaagttgctgaacatagagtggttgaagagcctgatacaaagagaatagatgtaagccaagtgaaaaaggatatgggaaacaagtttggtagctgggaagttgattcgtacactaccgtggattcatatgtcaaaccggttcttatggttgagaactctattgtagaatcagcaactgaagttaatctcagccgtcatgactcgtcagtcgcaactgcgtttgctcaaccgccttcaacggcaaggtctgtgtcaatgagagacatgggaactgaaatgactcctatagcgagccaagaaccttctagaaacgggacaccgattagggcaacaacgccaatacgaagtcctatatcttctgaaccttcaagtccaggcagacaagcatcagcttctcctatgagtaacaaggaactgtcagagaaagagcttcaaatgaaaactaggagagagataatggtgttgggtactcaacttggtaaatttaacattgctgcttgggctagcaaggaggatgaagataaagacgcatccacatcattaaagaccaaagcttctctacaaacttctaaaagtgtttctgaagctcgtgctacagcgtgggaggaagcggaaaaagctaagcacatggctaggttcagacgcgaagagatgaagattcaagcatgggagaatcatcagaaggcgaaatctgaagccgagatgaagaaaaccgaggttaaagttgagaggattaagggacgagcacaagaccggttgatgaagaaactcgctacaatcgagcgcaaagcagaggaaaagcgagcagcggctgaagcaaagaaggatcatcaggcagctaaaacagagaaacaagctgaacaaatccgaagaacaggcaaagtaccttcattgttgttctcttgctttagcttttgttcttaaatccaatcctantgtgaatgtgatgttgttaattctcaagaacacatctttctatcatcatttgtataataaaagctttg

SEQ ID NO: 3117 - protein, 486 aa, Arabidopsis thaliana
  peptide (1)..(486): Ceres Seq. ID no. 13574938
  misc_feature (368)..(479): Pfam Name: Pfam Description:  Remorin, C-terminal region
  misc_feature (1)..(486): NCBI GI NO: 18395321 NR Description: expressed protein [Arabidopsis thaliana]
  misc_feature (228)..(485): NCBI GI NO: 34902218 NR Description: Unknown protein
  misc_feature (185)..(485): NCBI GI NO: 15220725 NR Description: expressed protein [Arabidopsis thaliana]
  misc_feature (226)..(485): NCBI GI NO: 38344336 NR Description: OSJNBa0058K23.18
  misc_feature (355)..(486): NCBI GI NO: 18408804 NR Description: expressed protein [Arabidopsis thaliana]
  misc_feature (355)..(486): NCBI GI NO: 21536537 NR Description: unknown [Arabidopsis thaliana]
  misc_feature (355)..(486): NCBI GI NO: 28393368 NR Description: unknown protein [Arabidopsis thaliana]
  misc_feature (263)..(481): NCBI GI NO: 15220963 NR Description: hypothetical protein [Arabidopsis thaliana]
  misc_feature (275)..(482): NCBI GI NO: 15233068 NR Description: DNA-binding protein -related
  misc_feature (254)..(471): NCBI GI NO: 23928441 NR Description: hypothetical protein [Zea mays]
MDYERIGKTQVTSSGGGFSPGKLRSMLLLGVDRKKNEEEESTPTMRSGSNQIDDPRVYVASGLDDCKDVDVVSEITDCSTSGIARSISLGLQEYSDYDNVNEIKSVSASSVFEFQKTEKEKVNQRMPIRSFSKPAPSKWDDAQKWIASPTANRPKTGQVQVPGSKKGPSFGRQSSMKIVEVAEHRVVEEPDTKRIDVSQVKKDMGNKFGSWEVDSYTTVDSYVKPVLMVENSIVESATEVNLSRHDSSVATAFAQPPSTARSVSMRDMGTEMTPIASQEPSRNGTPIRATTPIRSPISSEPSSPGRQASASPMSNKELSEKELQMKTRREIMVLGTQLGKFNIAAWASKEDEDKDASTSLKTKASLQTSKSVSEARATAWEEAEKAKHMARFRREEMKIQAWENHQKAKSEAEMKKTEVKVERIKGRAQDRLMKKLATIERKAEEKRAAAEAKKDHQAAKTEKQAEQIRRTGKVPSLLFSCFSFCS

SEQ ID NO: 3118 - protein, 461 aa, Arabidopsis thaliana
  peptide (1)..(461): Ceres Seq. ID no. 13574939
  misc_feature (343)..(454): Pfam Name: Pfam Description:  Remorin, C-terminal region
  misc_feature (1)..(461): NCBI GI NO: 18395321 NR Description: expressed protein [Arabidopsis thaliana]
  misc_feature (203)..(460): NCBI GI NO: 34902218 NR Description: Unknown protein
  misc_feature (160)..(460): NCBI GI NO: 15220725 NR Description: expressed protein [Arabidopsis thaliana]
  misc_feature (201)..(460): NCBI GI NO: 38344336 NR Description: OSJNBa0058K23.18
  misc_feature (330)..(461): NCBI GI NO: 18408804 NR Description: expressed protein [Arabidopsis thaliana]
  misc_feature (330)..(461): NCBI GI NO: 28393368 NR Description: unknown protein [Arabidopsis thaliana]
  misc_feature (330)..(461): NCBI GI NO: 21536537 NR Description: unknown [Arabidopsis thaliana]
  misc_feature (238)..(456): NCBI GI NO: 15220963 NR Description: hypothetical protein [Arabidopsis thaliana]
  misc_feature (250)..(457): NCBI GI NO: 15233068 NR Description: DNA-binding protein -related
  misc_feature (229)..(446): NCBI GI NO: 23928441 NR Description: hypothetical protein [Zea mays]
MLLLGVDRKKNEEEESTPTMRSGSNQIDDPRVYVASGLDDCKDVDVVSEITDCSTSGIARSISLGLQEYSDYDNVNEIKSVSASSVFEFQKTEKEKVNQRMPIRSFSKPAPSKWDDAQKWIASPTANRPKTGQVQVPGSKKGPSFGRQSSMKIVEVAEHRVVEEPDTKRIDVSQVKKDMGNKFGSWEVDSYTTVDSYVKPVLMVENSIVESATEVNLSRHDSSVATAFAQPPSTARSVSMRDMGTEMTPIASQEPSRNGTPIRATTPIRSPISSEPSSPGRQASASPMSNKELSEKELQMKTRREIMVLGTQLGKFNIAAWASKEDEDKDASTSLKTKASLQTSKSVSEARATAWEEAEKAKHMARFRREEMKIQAWENHQKAKSEAEMKKTEVKVERIKGRAQDRLMKKLATIERKAEEKRAAAEAKKDHQAAKTEKQAEQIRRTGKVPSLLFSCFSFCS

SEQ ID NO: 3119 - protein, 442 aa, Arabidopsis thaliana
  peptide (1)..(442): Ceres Seq. ID no. 13574940
  misc_feature (324)..(435): Pfam Name: Pfam Description:  Remorin, C-terminal region
  misc_feature (1)..(442): NCBI GI NO: 18395321 NR Description: expressed protein [Arabidopsis thaliana]
  misc_feature (184)..(441): NCBI GI NO: 34902218 NR Description: Unknown protein
  misc_feature (141)..(441): NCBI GI NO: 15220725 NR Description: expressed protein [Arabidopsis thaliana]
  misc_feature (182)..(441): NCBI GI NO: 38344336 NR Description: OSJNBa0058K23.18
  misc_feature (311)..(442): NCBI GI NO: 18408804 NR Description: expressed protein [Arabidopsis thaliana]
  misc_feature (311)..(442): NCBI GI NO: 28393368 NR Description: unknown protein [Arabidopsis thaliana]
  misc_feature (311)..(442): NCBI GI NO: 21536537 NR Description: unknown [Arabidopsis thaliana]
  misc_feature (219)..(437): NCBI GI NO: 15220963 NR Description: hypothetical protein [Arabidopsis thaliana]
  misc_feature (231)..(438): NCBI GI NO: 15233068 NR Description: DNA-binding protein -related
  misc_feature (210)..(427): NCBI GI NO: 23928441 NR Description: hypothetical protein [Zea mays]
MRSGSNQIDDPRVYVASGLDDCKDVDVVSEITDCSTSGIARSISLGLQEYSDYDNVNEIKSVSASSVFEFQKTEKEKVNQRMPIRSFSKPAPSKWDDAQKWIASPTANRPKTGQVQVPGSKKGPSFGRQSSMKIVEVAEHRVVEEPDTKRIDVSQVKKDMGNKFGSWEVDSYTTVDSYVKPVLMVENSIVESATEVNLSRHDSSVATAFAQPPSTARSVSMRDMGTEMTPIASQEPSRNGTPIRATTPIRSPISSEPSSPGRQASASPMSNKELSEKELQMKTRREIMVLGTQLGKFNIAAWASKEDEDKDASTSLKTKASLQTSKSVSEARATAWEEAEKAKHMARFRREEMKIQAWENHQKAKSEAEMKKTEVKVERIKGRAQDRLMKKLATIERKAEEKRAAAEAKKDHQAAKTEKQAEQIRRTGKVPSLLFSCFSFCS

SEQ ID NO: 3120 - DNA, 591 bp, Arabidopsis thaliana
  misc_feature (1)..(591): Ceres Seq. ID no. 12466015
caaaatgtccatacaaggatctagctgcaccaaccgatgtcttcattgacaagccacccacaggggaatcatctaccatgtccgctgcacctggaactggcaaggccgcgtatgtcccgcctagcatgagagcaggtgcagacagaagcgctgtgggttcagacatgaggaggaggaacgatgagaactctgtgcgtgtaaccaatctgtccgaggatacccgtgaacctgacttgatggagctgttccatccgtttggagctgtcacacgtgtctatgtggccattgatcagaaaactgaagtgagcagaggatttggtttcgtcaatttcgtgagcagagaagacgctcaaagagcaatcaacaaattgaatggttatggttatgataacctcatcctcagggttgaatgggcaactccaagaccaacctagaaagaaatgtctgatgttgagaccttaaaactcttctcattctcgtctttcttgttatggatttttgtttatcgaccagtttgtttgttggtttggtttctgtatgaatagatgagaatttgttcaatttctctttaatacataaggcatgcttttt

SEQ ID NO: 3121 - protein, 143 aa, Arabidopsis thaliana
  peptide (1)..(143): Ceres Seq. ID no. 12466016
  misc_feature (64)..(135): Pfam Name: a.k.a. RRM, RBD, or RNP domain Pfam Description: RNA recognition motif.
  misc_feature (1)..(143): NCBI GI NO: 12407751 NR Description: initiation factor 3g [Arabidopsis thaliana]
  misc_feature (1)..(143): NCBI GI NO: 15229743 NR Description: eukaryotic translation initiation factor 3 subunit g
  misc_feature (1)..(141): NCBI GI NO: 10177573 NR Description: eukaryotic translation initiation factor 3 subunit-likeprotein
  misc_feature (1)..(141): NCBI GI NO: 30681225 NR Description: eukaryotic translation initiation factor 3
  misc_feature (1)..(140): NCBI GI NO: 23503064 NR Description: Eukaryotic translation initiation factor 3 subunit 4
  misc_feature (1)..(140): NCBI GI NO: 30583983 NR Description: Homo sapiens eukaryotic translation iation factor 3
  misc_feature (1)..(140): NCBI GI NO: 4503517 NR Description: eukaryotic translation initiation factor 3
  misc_feature (1)..(140): NCBI GI NO: 29124629 NR Description: Similar to eukaryotic translation initiation factor 3
  misc_feature (1)..(141): NCBI GI NO: 2951777 NR Description: translation initiation factor 3
  misc_feature (1)..(141): NCBI GI NO: 19112519 NR Description: eukaryotic translation iation factor 3 rna-binding subunit
KCPYKDLAAPTDVFIDKPPTGESSTMSAAPGTGKAAYVPPSMRAGADRSAVGSDMRRRNDENSVRVTNLSEDTREPDLMELFHPFGAVTRVYVAIDQKTEVSRGFGFVNFVSREDAQRAINKLNGYGYDNLILRVEWATPRPT

SEQ ID NO: 3122 - protein, 118 aa, Arabidopsis thaliana
  peptide (1)..(118): Ceres Seq. ID no. 12466017
  misc_feature (39)..(110): Pfam Name: a.k.a. RRM, RBD, or RNP domain Pfam Description: RNA recognition motif.
  misc_feature (1)..(118): NCBI GI NO: 12407751 NR Description: initiation factor 3g [Arabidopsis thaliana]
  misc_feature (1)..(118): NCBI GI NO: 15229743 NR Description: eukaryotic translation initiation factor 3 subunit g
  misc_feature (1)..(116): NCBI GI NO: 10177573 NR Description: eukaryotic translation initiation factor 3 subunit-likeprotein
  misc_feature (1)..(116): NCBI GI NO: 30681225 NR Description: eukaryotic translation initiation factor 3
  misc_feature (1)..(115): NCBI GI NO: 23503064 NR Description: Eukaryotic translation initiation factor 3 subunit 4
  misc_feature (1)..(115): NCBI GI NO: 30583983 NR Description: Homo sapiens eukaryotic translation iation factor 3
  misc_feature (1)..(115): NCBI GI NO: 4503517 NR Description: eukaryotic translation initiation factor 3
  misc_feature (1)..(115): NCBI GI NO: 29124629 NR Description: Similar to eukaryotic translation initiation factor 3
  misc_feature (1)..(116): NCBI GI NO: 2951777 NR Description: translation initiation factor 3
  misc_feature (1)..(116): NCBI GI NO: 19112519 NR Description: eukaryotic translation iation factor 3 rna-binding subunit
MSAAPGTGKAAYVPPSMRAGADRSAVGSDMRRRNDENSVRVTNLSEDTREPDLMELFHPFGAVTRVYVAIDQKTEVSRGFGFVNFVSREDAQRAINKLNGYGYDNLILRVEWATPRPT

SEQ ID NO: 3123 - protein, 102 aa, Arabidopsis thaliana
  peptide (1)..(102): Ceres Seq. ID no. 12466018
  misc_feature (23)..(94): Pfam Name: a.k.a. RRM, RBD, or RNP domain Pfam Description: RNA recognition motif.
  misc_feature (1)..(102): NCBI GI NO: 12407751 NR Description: initiation factor 3g [Arabidopsis thaliana]
  misc_feature (1)..(102): NCBI GI NO: 15229743 NR Description: eukaryotic translation initiation factor 3 subunit g
  misc_feature (1)..(100): NCBI GI NO: 10177573 NR Description: eukaryotic translation initiation factor 3 subunit-likeprotein
  misc_feature (1)..(100): NCBI GI NO: 30681225 NR Description: eukaryotic translation initiation factor 3
  misc_feature (1)..(99): NCBI GI NO: 23503064 NR Description: Eukaryotic translation initiation factor 3 subunit 4
  misc_feature (1)..(99): NCBI GI NO: 30583983 NR Description: Homo sapiens eukaryotic translation iation factor 3
  misc_feature (1)..(99): NCBI GI NO: 4503517 NR Description: eukaryotic translation initiation factor 3
  misc_feature (1)..(99): NCBI GI NO: 29124629 NR Description: Similar to eukaryotic translation initiation factor 3
  misc_feature (1)..(100): NCBI GI NO: 2951777 NR Description: translation initiation factor 3
  misc_feature (1)..(100): NCBI GI NO: 19112519 NR Description: eukaryotic translation iation factor 3 rna-binding subunit
MRAGADRSAVGSDMRRRNDENSVRVTNLSEDTREPDLMELFHPFGAVTRVYVAIDQKTEVSRGFGFVNFVSREDAQRAINKLNGYGYDNLILRVEWATPRPT

SEQ ID NO: 3124 - DNA, 1097 bp, Arabidopsis thaliana
  misc_feature (1)..(1097): Ceres Seq. ID no. 12337666
aattgcatattcgaagataatagccacatgtatgagatgacgtggttggataatagcttgtagtgttaaaatacctcatttgacctttcgacattcatacgcaatcgactcattccacggatctgcttactcattgattctcgataaattgttcttctcccacagacaccagattctaccaatcatttgctcgaaaaggaatcatgggtcttaaagctggaacctttgtgcttctcttgttgggtttgatcttggtctctgacgctagatctttcgttgactccaccatctcagagaaagtttccaacaaggaagacgtttgcactctgtgtgaggaatatgttactgatgctctcagctaccttgagaaaaatgtcacacaagcggagatcatcgaagatcttcatgatcggtgttcccaattgcgcggatattcgcagcagtgcataagtttggtggattactatgttcctcttttcttcttacaactagagtcgtttcaacctcattatttctgcaagaggatgaatctttgtggcaaagttgtagctcttgtcgaagaagctcgtcaggacagttgcggtgtatgccacaggactgtttcagagattctcatcaaactacaagatcctgacacacagctggatatcgttgaactgcttatcaagggatgcaaatcgctcaagaactacgagaagaagtgcaagacgttggtgtttgaatatggacctctgatactcgtaaatgcagaggaattcctagtgaaaaacgacgtctgcacactcttgcgcgcatgcccccctgagaaatcggttctaaggcagccggagttggctgattcttgaatgttcaaaacgttgctataacaggattttaattccttatgggttatacaagtaggaacacgagctgctccatgagaatggttgcagactttgtgtagtgtctatatgtatggattcaaacacatcctccaaaatgtccctttgcctttgtgtaaataatgatcgctacaacaattgtacctctactatgatatcactgtattctatttgaggtttgttacattttatatgaatgatattagtgtagtttgc

SEQ ID NO: 3125 - protein, 213 aa, Arabidopsis thaliana
  peptide (1)..(213): Ceres Seq. ID no. 12337667
  misc_feature (37)..(75): Pfam Name: Pfam Description:  Saposin-like type B, region 1
  misc_feature (1)..(213): NCBI GI NO: 15231028 NR Description: putative protein; protein id: At3g51730
  misc_feature (6)..(199): NCBI GI NO: 15241065 NR Description: putative protein; protein id: At5g01800
  misc_feature (42)..(204): NCBI GI NO: 6942199 NR Description: putative protein [Vitis riparia]
  misc_feature (39)..(198): NCBI GI NO: 34896130 NR Description: P0701D05.19
MGLKAGTFVLLLLGLILVSDARSFVDSTISEKVSNKEDVCTLCEEYVTDALSYLEKNVTQAEIIEDLHDRCSQLRGYSQQCISLVDYYVPLFFLQLESFQPHYFCKRMNLCGKVVALVEEARQDSCGVCHRTVSEILIKLQDPDTQLDIVELLIKGCKSLKNYEKKCKTLVFEYGPLILVNAEEFLVKNDVCTLLRACPPEKSVLRQPELADS

SEQ ID NO: 3126 - protein, 106 aa, Arabidopsis thaliana
  peptide (1)..(106): Ceres Seq. ID no. 12337668
  misc_feature (1)..(106): NCBI GI NO: 15231028 NR Description: putative protein; protein id: At3g51730
  misc_feature (1)..(92): NCBI GI NO: 15241065 NR Description: putative protein; protein id: At5g01800
  misc_feature (1)..(97): NCBI GI NO: 6942199 NR Description: putative protein [Vitis riparia]
  misc_feature (1)..(91): NCBI GI NO: 34896130 NR Description: P0701D05.19
MNLCGKVVALVEEARQDSCGVCHRTVSEILIKLQDPDTQLDIVELLIKGCKSLKNYEKKCKTLVFEYGPLILVNAEEFLVKNDVCTLLRACPPEKSVLRQPELADS

SEQ ID NO: 3127 - DNA, 1049 bp, Arabidopsis thaliana
  misc_feature (1)..(1049): Ceres Seq. ID no. 13491469
gttttcttctccgtttctcgctcatcgcttactgaaaccagaaacaagtttagggtttttgcggaggtttcaaagttaacaatggcggaagagcacaagcacgaggaatcgatcatggagaagatctctgagaagatccatggtcacgatgactcttcttcttcttcttccgattcggatgacgataagaactctgcgtctctcaaaaccaagatttatcgtcttttcggaagagaacagcctcttcacaagcttttcggtggcggaaaacctgccgacattttcctgtggaggaacaagaaggtatcaggaggagtattgggtgctgcaactgtttcctggatcttattcgagttacttgagtacaatcttctcacactcttcggccacatttcaattcttgctctcgcagtattgttcttgtggtctagtgctagtaccttcattcacaagtcacctcttcatatccctgaagttcacatccccgaggatgttgttcttcagcttgcttctggattaaggattgaaatcaatcgtggatttactgttcttagggacattgcatcaggaagagatcttaagaagtttctgttggtgattgctggtttatgggttttgtccaaagttggtagctcctgcaacttcttgaccttaatctacatcgcaactgtacttctcttcacgattcccgtgctttacgagaagtatgaagataaagtagatgactttggtgaaaaggcgatgagggagatcaagaagcaatacgtggagttcgacgtgaaggttttgagtaaggtgatgagcaaaattcctaaaggagcctttgcctttatcaagaagaaagattagagagtgtgtaagtttctctcatcatcattatccgagattattcaagattgatatataaatctcgaagcattgtttttttggctgttggttaataaccctttattctctcaaatatctgctatatggattttattcgggttttaaccaaattttatagcaatattgaatctgattgaaatttgaattgatccttttttcgt

SEQ ID NO: 3128 - protein, 282 aa, Arabidopsis thaliana
  peptide (1)..(282): Ceres Seq. ID no. 13491470
  misc_feature (28)..(282): NCBI GI NO: 15222616 NR Description: expressed protein [Arabidopsis thaliana]
  misc_feature (28)..(282): NCBI GI NO: 15238125 NR Description: expressed protein [Arabidopsis thaliana]
  misc_feature (26)..(282): NCBI GI NO: 15237093 NR Description: expressed protein [Arabidopsis thaliana]
  misc_feature (31)..(273): NCBI GI NO: 34909318 NR Description: OSJNBb0021A09.5
  misc_feature (29)..(282): NCBI GI NO: 15236556 NR Description: expressed protein [Arabidopsis thaliana]
  misc_feature (28)..(266): NCBI GI NO: 18406991 NR Description: expressed protein [Arabidopsis thaliana]
  misc_feature (65)..(266): NCBI GI NO: 34904202 NR Description: P0492F05.25
  misc_feature (36)..(63): NCBI GI NO: 34904202 NR Description: P0492F05.25
  misc_feature (35)..(266): NCBI GI NO: 15234108 NR Description: hypothetical protein [Arabidopsis thaliana]
  misc_feature (33)..(281): NCBI GI NO: 34897094 NR Description: unknown protein
VFFSVSRSSLTETRNKFRVFAEVSKLTMAEEHKHEESIMEKISEKIHGHDDSSSSSSDSDDDKNSASLKTKIYRLFGREQPLHKLFGGGKPADIFLWRNKKVSGGVLGAATVSWILFELLEYNLLTLFGHISILALAVLFLWSSASTFIHKSPLHIPEVHIPEDVVLQLASGLRIEINRGFTVLRDIASGRDLKKFLLVIAGLWVLSKVGSSCNFLTLIYIATVLLFTIPVLYEKYEDKVDDFGEKAMREIKKQYVEFDVKVLSKVMSKIPKGAFAFIKKKD

SEQ ID NO: 3129 - protein, 255 aa, Arabidopsis thaliana
  peptide (1)..(255): Ceres Seq. ID no. 13491471
  misc_feature (1)..(255): NCBI GI NO: 15222616 NR Description: expressed protein [Arabidopsis thaliana]
  misc_feature (1)..(255): NCBI GI NO: 15238125 NR Description: expressed protein [Arabidopsis thaliana]
  misc_feature (1)..(255): NCBI GI NO: 15237093 NR Description: expressed protein [Arabidopsis thaliana]
  misc_feature (4)..(246): NCBI GI NO: 34909318 NR Description: OSJNBb0021A09.5
  misc_feature (2)..(255): NCBI GI NO: 15236556 NR Description: expressed protein [Arabidopsis thaliana]
  misc_feature (1)..(239): NCBI GI NO: 18406991 NR Description: expressed protein [Arabidopsis thaliana]
  misc_feature (38)..(239): NCBI GI NO: 34904202 NR Description: P0492F05.25
  misc_feature (9)..(36): NCBI GI NO: 34904202 NR Description: P0492F05.25
  misc_feature (8)..(239): NCBI GI NO: 15234108 NR Description: hypothetical protein [Arabidopsis thaliana]
  misc_feature (6)..(254): NCBI GI NO: 34897094 NR Description: unknown protein
MAEEHKHEESIMEKISEKIHGHDDSSSSSSDSDDDKNSASLKTKIYRLFGREQPLHKLFGGGKPADIFLWRNKKVSGGVLGAATVSWILFELLEYNLLTLFGHISILALAVLFLWSSASTFIHKSPLHIPEVHIPEDVVLQLASGLRIEINRGFTVLRDIASGRDLKKFLLVIAGLWVLSKVGSSCNFLTLIYIATVLLFTIPVLYEKYEDKVDDFGEKAMREIKKQYVEFDVKVLSKVMSKIPKGAFAFIKKKD

SEQ ID NO: 3130 - protein, 244 aa, Arabidopsis thaliana
  peptide (1)..(244): Ceres Seq. ID no. 13491472
  misc_feature (1)..(244): NCBI GI NO: 15222616 NR Description: expressed protein [Arabidopsis thaliana]
  misc_feature (1)..(244): NCBI GI NO: 15238125 NR Description: expressed protein [Arabidopsis thaliana]
  misc_feature (1)..(244): NCBI GI NO: 15237093 NR Description: expressed protein [Arabidopsis thaliana]
  misc_feature (1)..(235): NCBI GI NO: 34909318 NR Description: OSJNBb0021A09.5
  misc_feature (1)..(244): NCBI GI NO: 15236556 NR Description: expressed protein [Arabidopsis thaliana]
  misc_feature (1)..(228): NCBI GI NO: 18406991 NR Description: expressed protein [Arabidopsis thaliana]
  misc_feature (27)..(228): NCBI GI NO: 34904202 NR Description: P0492F05.25
  misc_feature (1)..(25): NCBI GI NO: 34904202 NR Description: P0492F05.25
  misc_feature (1)..(228): NCBI GI NO: 15234108 NR Description: hypothetical protein [Arabidopsis thaliana]
  misc_feature (1)..(243): NCBI GI NO: 34897094 NR Description: unknown protein
MEKISEKIHGHDDSSSSSSDSDDDKNSASLKTKIYRLFGREQPLHKLFGGGKPADIFLWRNKKVSGGVLGAATVSWILFELLEYNLLTLFGHISILALAVLFLWSSASTFIHKSPLHIPEVHIPEDVVLQLASGLRIEINRGFTVLRDIASGRDLKKFLLVIAGLWVLSKVGSSCNFLTLIYIATVLLFTIPVLYEKYEDKVDDFGEKAMREIKKQYVEFDVKVLSKVMSKIPKGAFAFIKKKD

SEQ ID NO: 3131 - DNA, 1071 bp, Arabidopsis thaliana
  misc_feature (1)..(1071): Ceres Seq. ID no. 12385269
accttataggagcagtttcgtctcttcctcgttctttcacttagctcttcctagtgttaaaccagagtaaagcttgaaactttggactaaaagaatggcgtctttgggtgtgtcggaaatgcttggtactccccttaacttcagggcagtttcaagatcgtctgctccgttggcatcaagcccatccacgttcaagactgttgctctcttctctaagaaaaagccagctcctgctaagtccaaggctgtctctgagactagcgatgagctcgccaagtggtatggtcctgacaggagaattttcttgcctgatggtcttttggatagatcagagatcccagagtacttaaacggtgaagttgctggagattatggttatgacccatttggtcttggaaagaagcctgagaactttgctaaataccaagcttttgaattgatccatgcgagatgggctatgttaggagcagctggtttcatcattcctgaagctttaaacaaatatggcgctaactgtggccctgaagctgtctggtttaagactggtgctttgcttcttgatggaaacacattgaactactttggcaagaacatccctatcaaccttgttctcgccgtagttgctgaggttgttctcctcggtggagccgagtactacagaatcaccaacggattggatttcgaggacaagctacacccaggaggtccatttgatcctctaggccttgctaaggaccctgagcaaggagctcttctcaaagtcaaagagatcaagaacgggagattagccatgtttgcgatgctcggtttctttatccaagcgtatgttaccggagaaggtcctgttgagaaccttgcaaagcatctcagtgatccttttggaaacaacttgcttaccgtcatcgctggaactgccgagagagctcccactctctaagccatttctactttttttaagagcttccaaaatgtacactttgttcgattggaactccttttgacaatgttaaaaaaacttccatctgaattttccttgatatatttcaatggtgctttatcatgcttctaagc

SEQ ID NO: 3132 - protein, 280 aa, Arabidopsis thaliana
  peptide (1)..(280): Ceres Seq. ID no. 12385270
  misc_feature (80)..(244): Pfam Name: Pfam Description:  Chlorophyll A-B binding protein
  misc_feature (1)..(280): NCBI GI NO: 15235029 NR Description: light-harvesting chlorophyll a/b binding protein
  misc_feature (1)..(280): NCBI GI NO: 21593520 NR Description: chlorophyll a/b-binding protein-like
  misc_feature (3)..(280): NCBI GI NO: 1644289 NR Description: chlorophyll a/b-binding protein CP26 in PS II
  misc_feature (3)..(280): NCBI GI NO: 100200 NR Description: chlorophyll a/b-binding protein type I precursor
  misc_feature (3)..(280): NCBI GI NO: 19184 NR Description: Type I (26 kD) CP29 polypeptide
  misc_feature (1)..(280): NCBI GI NO: 7443227 NR Description: chlorophyll a/b-binding protein CP26 precursor
  misc_feature (1)..(280): NCBI GI NO: 100573 NR Description: chlorophyll a/b-binding protein CP29 precursor
  misc_feature (1)..(280): NCBI GI NO: 7443226 NR Description: chlorophyll a/b-binding protein CP26 precursor
  misc_feature (2)..(280): NCBI GI NO: 322391 NR Description: chlorophyll a/b-binding protein Lhcb5
  misc_feature (110)..(280): NCBI GI NO: 15487754 NR Description: ASCAB9 [Centromadia pungens]
MASLGVSEMLGTPLNFRAVSRSSAPLASSPSTFKTVALFSKKKPAPAKSKAVSETSDELAKWYGPDRRIFLPDGLLDRSEIPEYLNGEVAGDYGYDPFGLGKKPENFAKYQAFELIHARWAMLGAAGFIIPEALNKYGANCGPEAVWFKTGALLLDGNTLNYFGKNIPINLVLAVVAEVVLLGGAEYYRITNGLDFEDKLHPGGPFDPLGLAKDPEQGALLKVKEIKNGRLAMFAMLGFFIQAYVTGEGPVENLAKHLSDPFGNNLLTVIAGTAERAPTL

SEQ ID NO: 3133 - protein, 272 aa, Arabidopsis thaliana
  peptide (1)..(272): Ceres Seq. ID no. 12385271
  misc_feature (72)..(236): Pfam Name: Pfam Description:  Chlorophyll A-B binding protein
  misc_feature (1)..(272): NCBI GI NO: 15235029 NR Description: light-harvesting chlorophyll a/b binding protein
  misc_feature (1)..(272): NCBI GI NO: 21593520 NR Description: chlorophyll a/b-binding protein-like
  misc_feature (1)..(272): NCBI GI NO: 1644289 NR Description: chlorophyll a/b-binding protein CP26 in PS II
  misc_feature (1)..(272): NCBI GI NO: 100200 NR Description: chlorophyll a/b-binding protein type I precursor
  misc_feature (1)..(272): NCBI GI NO: 19184 NR Description: Type I (26 kD) CP29 polypeptide
  misc_feature (1)..(272): NCBI GI NO: 7443227 NR Description: chlorophyll a/b-binding protein CP26 precursor
  misc_feature (1)..(272): NCBI GI NO: 100573 NR Description: chlorophyll a/b-binding protein CP29 precursor
  misc_feature (1)..(272): NCBI GI NO: 7443226 NR Description: chlorophyll a/b-binding protein CP26 precursor
  misc_feature (1)..(272): NCBI GI NO: 322391 NR Description: chlorophyll a/b-binding protein Lhcb5
  misc_feature (102)..(272): NCBI GI NO: 15487754 NR Description: ASCAB9 [Centromadia pungens]
MLGTPLNFRAVSRSSAPLASSPSTFKTVALFSKKKPAPAKSKAVSETSDELAKWYGPDRRIFLPDGLLDRSEIPEYLNGEVAGDYGYDPFGLGKKPENFAKYQAFELIHARWAMLGAAGFIIPEALNKYGANCGPEAVWFKTGALLLDGNTLNYFGKNIPINLVLAVVAEVVLLGGAEYYRITNGLDFEDKLHPGGPFDPLGLAKDPEQGALLKVKEIKNGRLAMFAMLGFFIQAYVTGEGPVENLAKHLSDPFGNNLLTVIAGTAERAPTL

SEQ ID NO: 3134 - protein, 159 aa, Arabidopsis thaliana
  peptide (1)..(159): Ceres Seq. ID no. 12385272
  misc_feature (1)..(123): Pfam Name: Pfam Description:  Chlorophyll A-B binding protein
  misc_feature (1)..(159): NCBI GI NO: 15235029 NR Description: light-harvesting chlorophyll a/b binding protein
  misc_feature (1)..(159): NCBI GI NO: 21593520 NR Description: chlorophyll a/b-binding protein-like
  misc_feature (1)..(159): NCBI GI NO: 1644289 NR Description: chlorophyll a/b-binding protein CP26 in PS II
  misc_feature (1)..(159): NCBI GI NO: 100200 NR Description: chlorophyll a/b-binding protein type I precursor
  misc_feature (1)..(159): NCBI GI NO: 19184 NR Description: Type I (26 kD) CP29 polypeptide
  misc_feature (1)..(159): NCBI GI NO: 7443227 NR Description: chlorophyll a/b-binding protein CP26 precursor
  misc_feature (1)..(159): NCBI GI NO: 100573 NR Description: chlorophyll a/b-binding protein CP29 precursor
  misc_feature (1)..(159): NCBI GI NO: 7443226 NR Description: chlorophyll a/b-binding protein CP26 precursor
  misc_feature (1)..(159): NCBI GI NO: 322391 NR Description: chlorophyll a/b-binding protein Lhcb5
  misc_feature (1)..(159): NCBI GI NO: 15487754 NR Description: ASCAB9 [Centromadia pungens]
MLGAAGFIIPEALNKYGANCGPEAVWFKTGALLLDGNTLNYFGKNIPINLVLAVVAEVVLLGGAEYYRITNGLDFEDKLHPGGPFDPLGLAKDPEQGALLKVKEIKNGRLAMFAMLGFFIQAYVTGEGPVENLAKHLSDPFGNNLLTVIAGTAERAPTL

SEQ ID NO: 3135 - DNA, 1444 bp, Arabidopsis thaliana
  misc_feature (1)..(1444): Ceres Seq. ID no. 12422058
aatcttaacacaagcttgatcgtcctcatctgccaccaaaccaaagacataatttcttcggtgacttccatggctccgcctgtctctgatgattccctacagcctcgagatgtttgtgttgtgggagtggcgcgaacgcctataggggacttccttggctccctctcgtctttaactgctacaagacttgggtccatagccatccaagccgcacttaagagagcacatgttgatccggcccttgtggaagaggtcttctttggcaatgtcttaactgccaatcttgggcaagcaccagcaagacaggctgcacttggtgctgggattccctattctgtgatctgcaccactatcaacaaagtttgtgctgcaggaatgaaatctgtaatgctagcgtctcaaagtatccagctcggcttgaatgatattgttgttgctggtgggatggagagcatgtcaaacgtacctaagtacctcccggacgcaagaaggggttctcgattaggtcatgatactgttgttgatggtatgatgaaagatggactttgggatgtctataatgactttggaatgggagtttgtggagaaatatgcgctgaccagtaccgtattacaagagaagaacaggatgcttatgctatccagagctttgagcgtggtattgctgcgcaaaacactcagttgttcgcttgggaaattgttccggtcgaagtttccactggaagagggaggccttcagttgttattgacaaggatgaaggattggggaagtttgatgcagccaagttaaaaaagcttagaccaagtttcaaggaggatgggggatcagtcactgctggaaatgcatcaagcataagtgatggtgcggcagcgttagtgctagtgagtggagagaaggctcttgagcttggactgcatgttatcgctaagattagaggatacgctgatgctgctcaggcaccagagttattcacaaccacgccagctcttgctattcctaaagctataaagcgggctggtttggatgcatctcaagtggattattatgaaataaacgaagcattttctgtggtagctctagccaatcagaaactactgggattagatcctgaacggctcaatgcgcatggaggggctgtttcactgggacatccattgggctgtagcggtgctcgtatcttggtcacattattgggggtgttgagagcaaagaagggaaagtatggagtggcatcaatatgcaacggaggaggaggagcatcagcacttgtccttgagttcatgtcggagaagacaatcggatattcggcactctgaagctaatagctgttgttttataacgcaaagcttatgtatatggttcatgtgtgtgtcacaagactgtaactttgtacttgagagagatgcaataaaagtgtgttagaaaatgagcggtagatttccc

SEQ ID NO: 3136 - protein, 438 aa, Arabidopsis thaliana
  peptide (1)..(438): Ceres Seq. ID no. 12422059
  misc_feature (35)..(298): Pfam Name: Pfam Description:  Thiolase, N-terminal domain
  misc_feature (24)..(438): NCBI GI NO: 15238793 NR Description: acetoacyl-CoA-thiolase; protein id: At5g47720
  misc_feature (24)..(428): NCBI GI NO: 30695277 NR Description: acetyl-CoA C-acetyltransferase
  misc_feature (24)..(438): NCBI GI NO: 16417944 NR Description: acetyl Co-A acetyltransferase [Hevea brasiliensis]
  misc_feature (29)..(428): NCBI GI NO: 8777413 NR Description: acetyl-CoA C-acetyltransferase
  misc_feature (29)..(428): NCBI GI NO: 30695411 NR Description: acetyl-CoA C-acetyltransferase
  misc_feature (37)..(428): NCBI GI NO: 30695409 NR Description: acetyl-CoA C-acetyltransferase
  misc_feature (24)..(438): NCBI GI NO: 34894172 NR Description: putative acetoacyl-CoA-thiolase
  misc_feature (29)..(426): NCBI GI NO: 7433657 NR Description: acetyl-CoA C-acetyltransferase (EC 2
  misc_feature (37)..(426): NCBI GI NO: 19113478 NR Description: acetyl-coa acetyltransferase (EC 2.3.1.9)
  misc_feature (37)..(426): NCBI GI NO: 11257345 NR Description: probable acetyl-CoA C-acetyltransferase (EC 2
NLNTSLIVLICHQTKDIISSVTSMAPPVSDDSLQPRDVCVVGVARTPIGDFLGSLSSLTATRLGSIAIQAALKRAHVDPALVEEVFFGNVLTANLGQAPARQAALGAGIPYSVICTTINKVCAAGMKSVMLASQSIQLGLNDIVVAGGMESMSNVPKYLPDARRGSRLGHDTVVDGMMKDGLWDVYNDFGMGVCGEICADQYRITREEQDAYAIQSFERGIAAQNTQLFAWEIVPVEVSTGRGRPSVVIDKDEGLGKFDAAKLKKLRPSFKEDGGSVTAGNASSISDGAAALVLVSGEKALELGLHVIAKIRGYADAAQAPELFTTTPALAIPKAIKRAGLDASQVDYYEINEAFSVVALANQKLLGLDPERLNAHGGAVSLGHPLGCSGARILVTLLGVLRAKKGKYGVASICNGGGGASALVLEFMSEKTIGYSAL

SEQ ID NO: 3137 - protein, 415 aa, Arabidopsis thaliana
  peptide (1)..(415): Ceres Seq. ID no. 12422060
  misc_feature (12)..(275): Pfam Name: Pfam Description:  Thiolase, N-terminal domain
  misc_feature (1)..(415): NCBI GI NO: 15238793 NR Description: acetoacyl-CoA-thiolase; protein id: At5g47720
  misc_feature (1)..(405): NCBI GI NO: 30695277 NR Description: acetyl-CoA C-acetyltransferase
  misc_feature (1)..(415): NCBI GI NO: 16417944 NR Description: acetyl Co-A acetyltransferase [Hevea brasiliensis]
  misc_feature (6)..(405): NCBI GI NO: 8777413 NR Description: acetyl-CoA C-acetyltransferase
  misc_feature (6)..(405): NCBI GI NO: 30695411 NR Description: acetyl-CoA C-acetyltransferase
  misc_feature (14)..(405): NCBI GI NO: 30695409 NR Description: acetyl-CoA C-acetyltransferase
  misc_feature (1)..(415): NCBI GI NO: 34894172 NR Description: putative acetoacyl-CoA-thiolase
  misc_feature (6)..(403): NCBI GI NO: 7433657 NR Description: acetyl-CoA C-acetyltransferase (EC 2
  misc_feature (14)..(403): NCBI GI NO: 19113478 NR Description: acetyl-coa acetyltransferase (EC 2.3.1.9)
  misc_feature (14)..(403): NCBI GI NO: 11257345 NR Description: probable acetyl-CoA C-acetyltransferase (EC 2
MAPPVSDDSLQPRDVCVVGVARTPIGDFLGSLSSLTATRLGSIAIQAALKRAHVDPALVEEVFFGNVLTANLGQAPARQAALGAGIPYSVICTTINKVCAAGMKSVMLASQSIQLGLNDIVVAGGMESMSNVPKYLPDARRGSRLGHDTVVDGMMKDGLWDVYNDFGMGVCGEICADQYRITREEQDAYAIQSFERGIAAQNTQLFAWEIVPVEVSTGRGRPSVVIDKDEGLGKFDAAKLKKLRPSFKEDGGSVTAGNASSISDGAAALVLVSGEKALELGLHVIAKIRGYADAAQAPELFTTTPALAIPKAIKRAGLDASQVDYYEINEAFSVVALANQKLLGLDPERLNAHGGAVSLGHPLGCSGARILVTLLGVLRAKKGKYGVASICNGGGGASALVLEFMSEKTIGYSAL

SEQ ID NO: 3138 - protein, 313 aa, Arabidopsis thaliana
  peptide (1)..(313): Ceres Seq. ID no. 12422061
  misc_feature (1)..(173): Pfam Name: Pfam Description:  Thiolase, N-terminal domain
  misc_feature (1)..(313): NCBI GI NO: 15238793 NR Description: acetoacyl-CoA-thiolase; protein id: At5g47720
  misc_feature (1)..(303): NCBI GI NO: 30695277 NR Description: acetyl-CoA C-acetyltransferase
  misc_feature (1)..(313): NCBI GI NO: 16417944 NR Description: acetyl Co-A acetyltransferase [Hevea brasiliensis]
  misc_feature (1)..(303): NCBI GI NO: 8777413 NR Description: acetyl-CoA C-acetyltransferase
  misc_feature (1)..(303): NCBI GI NO: 30695411 NR Description: acetyl-CoA C-acetyltransferase
  misc_feature (1)..(303): NCBI GI NO: 30695409 NR Description: acetyl-CoA C-acetyltransferase
  misc_feature (1)..(313): NCBI GI NO: 34894172 NR Description: putative acetoacyl-CoA-thiolase
  misc_feature (1)..(301): NCBI GI NO: 7433657 NR Description: acetyl-CoA C-acetyltransferase (EC 2
  misc_feature (1)..(301): NCBI GI NO: 19113478 NR Description: acetyl-coa acetyltransferase (EC 2.3.1.9)
  misc_feature (1)..(301): NCBI GI NO: 11257345 NR Description: probable acetyl-CoA C-acetyltransferase (EC 2
MKSVMLASQSIQLGLNDIVVAGGMESMSNVPKYLPDARRGSRLGHDTVVDGMMKDGLWDVYNDFGMGVCGEICADQYRITREEQDAYAIQSFERGIAAQNTQLFAWEIVPVEVSTGRGRPSVVIDKDEGLGKFDAAKLKKLRPSFKEDGGSVTAGNASSISDGAAALVLVSGEKALELGLHVIAKIRGYADAAQAPELFTTTPALAIPKAIKRAGLDASQVDYYEINEAFSVVALANQKLLGLDPERLNAHGGAVSLGHPLGCSGARILVTLLGVLRAKKGKYGVASICNGGGGASALVLEFMSEKTIGYSAL

SEQ ID NO: 3139 - DNA, 1310 bp, Arabidopsis thaliana
  misc_feature (1)..(1310): Ceres Seq. ID no. 12327792
agaatcagaagagagtacatgagtttcctcttctgcctctttggtgattcttagcatttattattactcactcatcttcttttcattacattacataccaaacaagagctctcaaatggaaaggtttcaaggacacatcaacccctgtttcttcgatcgaaaaccggatgtgagaagcctcgaggttcaaggatttgcagaggctcaaagctttgctttcaaagaaaaagaggaagaaagcttacaagatacagttctatttctacagatgctgcaaagtgaagacccctcatcgtttttttcaatcaaagagccaaactttctgacgctactgtctcttcaaaccctcaaggagccttgggaactcgaaagatatctttcacttgaggattcacaatttcattcaccggtccaatctgagaccaaccgccttcatggaaggagccaatcaagctgtgtcaagccaagaaattccctttagccaagcaaacatgacactcccttcttctacctcatcaccactcagtgcacattcaagacgaaagcgcaaaatcaaccacttgctgcctcaagaaatgactagagaaaagagaaagaggaggaaaacaaaaccaagtaaaaacaatgaagagattgagaatcaaagaataaaccacattgctgttgaacgaaacagaagacgtcaaatgaacgaacatatcaactctctccgggcccttctcccaccttcctacatccaacgaggagaccaagcttccatagtaggaggagcaataaactacgtgaaggtcctcgagcaaatcatacaatctctcgaatcgcaaaagagaacgcaacaacaaagtaacagtgaggtagtagaaaacgcacttaatcatctcttaggcatttcgtcgaacgacctgtggacaactcttgaagatcaaacttgtatccccaagatcgaagctacagtgatacaaaaccatgtcagccttaaagttcaatgtgagaagaaacaaggacaacttctcaaaggaatcatatcacttgaaaagcttaaactcactgttcttcatctcaatatcactacttcgtctcattcctctgtttcttattccttcaacctcaagatggaagatgagtgcgacttagagtcagccgacgagattacggcggctgttcatcggattttcgatattccgacaatttgattaaacacatataattccaaaaatattaacagctgacaaaatggtatcttttttttttttcctacttgtaccatttttttaagaattaagagaataaaaaaatttcgtttttcgttc

SEQ ID NO: 3140 - protein, 252 aa, Arabidopsis thaliana
  peptide (1)..(252): Ceres Seq. ID no. 12327793
  misc_feature (70)..(121): Pfam Name: Pfam Description:  Helix-loop-helix DNA-binding domain
  misc_feature (1)..(252): NCBI GI NO: 30695519 NR Description: bHLH protein family [Arabidopsis thaliana]
  misc_feature (1)..(252): NCBI GI NO: 21618009 NR Description: unknown [Arabidopsis thaliana]
  misc_feature (1)..(252): NCBI GI NO: 18412203 NR Description: putative protein; protein id: At3g61950
  misc_feature (1)..(252): NCBI GI NO: 11282339 NR Description: hypothetical protein F21F14
  misc_feature (1)..(248): NCBI GI NO: 15226442 NR Description: unknown protein; protein id: At2g46810.1
  misc_feature (50)..(248): NCBI GI NO: 15234187 NR Description: bHLH protein; protein id: At4g01460
  misc_feature (167)..(248): NCBI GI NO: 37533680 NR Description: putative helix-loop-helix DNA-binding protein
  misc_feature (52)..(131): NCBI GI NO: 37533680 NR Description: putative helix-loop-helix DNA-binding protein
  misc_feature (52)..(139): NCBI GI NO: 34902426 NR Description: Unknown protein
  misc_feature (167)..(246): NCBI GI NO: 34902426 NR Description: Unknown protein
MEGANQAVSSQEIPFSQANMTLPSSTSSPLSAHSRRKRKINHLLPQEMTREKRKRRKTKPSKNNEEIENQRINHIAVERNRRRQMNEHINSLRALLPPSYIQRGDQASIVGGAINYVKVLEQIIQSLESQKRTQQQSNSEVVENALNHLLGISSNDLWTTLEDQTCIPKIEATVIQNHVSLKVQCEKKQGQLLKGIISLEKLKLTVLHLNITTSSHSSVSYSFNLKMEDECDLESADEITAAVHRIFDIPTI

SEQ ID NO: 3141 - protein, 233 aa, Arabidopsis thaliana
  peptide (1)..(233): Ceres Seq. ID no. 12327794
  misc_feature (51)..(102): Pfam Name: Pfam Description:  Helix-loop-helix DNA-binding domain
  misc_feature (1)..(233): NCBI GI NO: 30695519 NR Description: bHLH protein family [Arabidopsis thaliana]
  misc_feature (1)..(233): NCBI GI NO: 21618009 NR Description: unknown [Arabidopsis thaliana]
  misc_feature (1)..(233): NCBI GI NO: 18412203 NR Description: putative protein; protein id: At3g61950
  misc_feature (1)..(233): NCBI GI NO: 11282339 NR Description: hypothetical protein F21F14
  misc_feature (1)..(229): NCBI GI NO: 15226442 NR Description: unknown protein; protein id: At2g46810.1
  misc_feature (31)..(229): NCBI GI NO: 15234187 NR Description: bHLH protein; protein id: At4g01460
  misc_feature (148)..(229): NCBI GI NO: 37533680 NR Description: putative helix-loop-helix DNA-binding protein
  misc_feature (33)..(112): NCBI GI NO: 37533680 NR Description: putative helix-loop-helix DNA-binding protein
  misc_feature (33)..(120): NCBI GI NO: 34902426 NR Description: Unknown protein
  misc_feature (148)..(227): NCBI GI NO: 34902426 NR Description: Unknown protein
MTLPSSTSSPLSAHSRRKRKINHLLPQEMTREKRKRRKTKPSKNNEEIENQRINHIAVERNRRRQMNEHINSLRALLPPSYIQRGDQASIVGGAINYVKVLEQIIQSLESQKRTQQQSNSEVVENALNHLLGISSNDLWTTLEDQTCIPKIEATVIQNHVSLKVQCEKKQGQLLKGIISLEKLKLTVLHLNITTSSHSSVSYSFNLKMEDECDLESADEITAAVHRIFDIPTI

SEQ ID NO: 3142 - protein, 205 aa, Arabidopsis thaliana
  peptide (1)..(205): Ceres Seq. ID no. 12327795
  misc_feature (23)..(74): Pfam Name: Pfam Description:  Helix-loop-helix DNA-binding domain
  misc_feature (1)..(205): NCBI GI NO: 30695519 NR Description: bHLH protein family [Arabidopsis thaliana]
  misc_feature (1)..(205): NCBI GI NO: 21618009 NR Description: unknown [Arabidopsis thaliana]
  misc_feature (1)..(205): NCBI GI NO: 18412203 NR Description: putative protein; protein id: At3g61950
  misc_feature (1)..(205): NCBI GI NO: 11282339 NR Description: hypothetical protein F21F14
  misc_feature (1)..(201): NCBI GI NO: 15226442 NR Description: unknown protein; protein id: At2g46810.1
  misc_feature (3)..(201): NCBI GI NO: 15234187 NR Description: bHLH protein; protein id: At4g01460
  misc_feature (120)..(201): NCBI GI NO: 37533680 NR Description: putative helix-loop-helix DNA-binding protein
  misc_feature (5)..(84): NCBI GI NO: 37533680 NR Description: putative helix-loop-helix DNA-binding protein
  misc_feature (5)..(92): NCBI GI NO: 34902426 NR Description: Unknown protein
  misc_feature (120)..(199): NCBI GI NO: 34902426 NR Description: Unknown protein
MTREKRKRRKTKPSKNNEEIENQRINHIAVERNRRRQMNEHINSLRALLPPSYIQRGDQASIVGGAINYVKVLEQIIQSLESQKRTQQQSNSEVVENALNHLLGISSNDLWTTLEDQTCIPKIEATVIQNHVSLKVQCEKKQGQLLKGIISLEKLKLTVLHLNITTSSHSSVSYSFNLKMEDECDLESADEITAAVHRIFDIPTI

SEQ ID NO: 3143 - DNA, 1194 bp, Arabidopsis thaliana
  misc_feature (1)..(1194): Ceres Seq. ID no. 13488606
aaaaccgacattgacctgacagtttcttacgccggcgagcgaactcgacgaagaagacaacttccttttgttgcacctgtgagtctgcgaccatggctatgcaatctggtattgggttatcgaagattttgattctagctggagcaggttatactagtacgattctggttaagaatgggaagatggcagatattttgggtgagcttcaggctttggttaagcgatttgagaaatctggagatcatgtagatgatgattctgatgccatgactactcagatgcaacgattagcaatggaggttcggcaattggcttcgtcgcggcagataactgttatgaatggagctcagggagctgattttacaccgtttattgtcccggcagcgacattgggagcattaggctatggctatatgtggttcaagggaatttcattctctgatatcatgtgtgtaacgaagcggaacatggaaaatgcagtgtcgaacttgaccaagcatttggataccgtttcagaagctattttgaatgctaagaagcacctgagccagcggcttcagaaggtggacgataagctagacttgcagaaagatctcttaaagggagtccaggataatgtgggtttggctcttgaggatcttgctaacattggagatgattttgacgcaatgcatagcatctttggtggtatgggtgggaaattagatagcattgagtacaagcagaatattgcgaacatgggtttgatatatctgtgcgactctttgggtggagaaaatcacaagatgccggatatattgatgcaggagaagcttcggctttcagggaagtcaaacacatgtatagtacttacaaccgaagaaacttcaagctcagagggtttaaaagaaagcgataagatacagctactagatgactgctaattcaaatggtgccaatatatcatcaagcaagaagccacgagtctgatagcattgacgagaatgaccctggatttggatagaaagaaggtataggattaataggagtgattattatgtattggtatttagaatagtgtgtcctttgaggcaagtaagaagattgagaaaaataaaaagaatgtgctttttttttccttcaattttttcgcatccaacaaaaaatgaaacctatattttttctaataatatactgcattatgcacaatttgtc

SEQ ID NO: 3144 - protein, 276 aa, Arabidopsis thaliana
  peptide (1)..(276): Ceres Seq. ID no. 13488607
  misc_feature (1)..(276): NCBI GI NO: 15227027 NR Description: expressed protein [Arabidopsis thaliana]
  misc_feature (1)..(262): NCBI GI NO: 7487252 NR Description: hypothetical protein At2g02730
  misc_feature (1)..(266): NCBI GI NO: 18396143 NR Description: bZIP family transcription factor
  misc_feature (1)..(266): NCBI GI NO: 21537323 NR Description: unknown [Arabidopsis thaliana]
  misc_feature (1)..(266): NCBI GI NO: 25361065 NR Description: protein T7N9.6 [imported] - Arabidopsis thaliana
  misc_feature (1)..(249): NCBI GI NO: 18390460 NR Description: expressed protein [Arabidopsis thaliana]
  misc_feature (1)..(245): NCBI GI NO: 34906300 NR Description: unnamed protein product
  misc_feature (7)..(211): NCBI GI NO: 34894218 NR Description: P0439B06.30
  misc_feature (9)..(218): NCBI GI NO: 22329773 NR Description: expressed protein [Arabidopsis thaliana]
  misc_feature (7)..(218): NCBI GI NO: 30688826 NR Description: expressed protein [Arabidopsis thaliana]
MAMQSGIGLSKILILAGAGYTSTILVKNGKMADILGELQALVKRFEKSGDHVDDDSDAMTTQMQRLAMEVRQLASSRQITVMNGAQGADFTPFIVPAATLGALGYGYMWFKGISFSDIMCVTKRNMENAVSNLTKHLDTVSEAILNAKKHLSQRLQKVDDKLDLQKDLLKGVQDNVGLALEDLANIGDDFDAMHSIFGGMGGKLDSIEYKQNIANMGLIYLCDSLGGENHKMPDILMQEKLRLSGKSNTCIVLTTEETSSSEGLKESDKIQLLDDC

SEQ ID NO: 3145 - protein, 274 aa, Arabidopsis thaliana
  peptide (1)..(274): Ceres Seq. ID no. 13488608
  misc_feature (1)..(274): NCBI GI NO: 15227027 NR Description: expressed protein [Arabidopsis thaliana]
  misc_feature (1)..(260): NCBI GI NO: 7487252 NR Description: hypothetical protein At2g02730
  misc_feature (1)..(264): NCBI GI NO: 18396143 NR Description: bZIP family transcription factor
  misc_feature (1)..(264): NCBI GI NO: 21537323 NR Description: unknown [Arabidopsis thaliana]
  misc_feature (1)..(264): NCBI GI NO: 25361065 NR Description: protein T7N9.6 [imported] - Arabidopsis thaliana
  misc_feature (1)..(247): NCBI GI NO: 18390460 NR Description: expressed protein [Arabidopsis thaliana]
  misc_feature (1)..(243): NCBI GI NO: 34906300 NR Description: unnamed protein product
  misc_feature (5)..(209): NCBI GI NO: 34894218 NR Description: P0439B06.30
  misc_feature (7)..(216): NCBI GI NO: 22329773 NR Description: expressed protein [Arabidopsis thaliana]
  misc_feature (5)..(216): NCBI GI NO: 30688826 NR Description: expressed protein [Arabidopsis thaliana]
MQSGIGLSKILILAGAGYTSTILVKNGKMADILGELQALVKRFEKSGDHVDDDSDAMTTQMQRLAMEVRQLASSRQITVMNGAQGADFTPFIVPAATLGALGYGYMWFKGISFSDIMCVTKRNMENAVSNLTKHLDTVSEAILNAKKHLSQRLQKVDDKLDLQKDLLKGVQDNVGLALEDLANIGDDFDAMHSIFGGMGGKLDSIEYKQNIANMGLIYLCDSLGGENHKMPDILMQEKLRLSGKSNTCIVLTTEETSSSEGLKESDKIQLLDDC

SEQ ID NO: 3146 - protein, 246 aa, Arabidopsis thaliana
  peptide (1)..(246): Ceres Seq. ID no. 13488609
  misc_feature (1)..(246): NCBI GI NO: 15227027 NR Description: expressed protein [Arabidopsis thaliana]
  misc_feature (1)..(232): NCBI GI NO: 7487252 NR Description: hypothetical protein At2g02730
  misc_feature (1)..(236): NCBI GI NO: 18396143 NR Description: bZIP family transcription factor
  misc_feature (1)..(236): NCBI GI NO: 21537323 NR Description: unknown [Arabidopsis thaliana]
  misc_feature (1)..(236): NCBI GI NO: 25361065 NR Description: protein T7N9.6 [imported] - Arabidopsis thaliana
  misc_feature (1)..(219): NCBI GI NO: 18390460 NR Description: expressed protein [Arabidopsis thaliana]
  misc_feature (1)..(215): NCBI GI NO: 34906300 NR Description: unnamed protein product
  misc_feature (1)..(181): NCBI GI NO: 34894218 NR Description: P0439B06.30
  misc_feature (1)..(188): NCBI GI NO: 22329773 NR Description: expressed protein [Arabidopsis thaliana]
  misc_feature (1)..(188): NCBI GI NO: 30688826 NR Description: expressed protein [Arabidopsis thaliana]
MADILGELQALVKRFEKSGDHVDDDSDAMTTQMQRLAMEVRQLASSRQITVMNGAQGADFTPFIVPAATLGALGYGYMWFKGISFSDIMCVTKRNMENAVSNLTKHLDTVSEAILNAKKHLSQRLQKVDDKLDLQKDLLKGVQDNVGLALEDLANIGDDFDAMHSIFGGMGGKLDSIEYKQNIANMGLIYLCDSLGGENHKMPDILMQEKLRLSGKSNTCIVLTTEETSSSEGLKESDKIQLLDDC

SEQ ID NO: 3147 - DNA, 1326 bp, Arabidopsis thaliana
  misc_feature (1)..(1326): Ceres Seq. ID no. 13489024
atcaagctccggactcaaaacccaaatctctgagaaagaatcaaagccaatattcgatcaatcaagctggagtggaagaaagggaaagtgaacccattcgtgaggggaataagatagaggttaattaggcccaaatcgatgcctttaaatgtagtcaatgatcgtgatggctcttctcgcattcttttgaccgaccctgccggatcaactgctgaggtgcttttgtatggagggcaagtggtttcttggaaaaacgaaaggagagagaagttgctttatatgagcaccaaggcgcaattgaagccaccaaaggcgatcaggggagggttacctatcagctttccacagtttggaaattttggtgcacttgagcgacatggatttgcccgtaacagattctggtcacttgataatgatccttcacctctgcctccggctaaccagcaatcaactgttgatttagtattgaagtctactgaagatgatttgaagatatggcctcatagctttgaacttcgtgttcgcatatctatcagtcctggaaaacttacaataatcccgcgtgtgaggaacactgacacaaaggcattttcctttatgttttcacttcgtaactacttatatgtatccgatataagtgaagttcgggttgagggtctggagacgcttgattatctggacaacttggtgcgtagagaaagattcacggagcaggcagatgcaattacctttgacggcgaggttgataaagtgtacttgaacacgccgacaaagattgccatcatagatcatgagaggaaaagaactatcgagttgcgaaaggaaggcatgccaaatgcagctgtgtggaacccttgggacaagaaggccaagagtattgcagatatgggagatgaggattacacaacaatgctgtgtgtagattctggtgctatagaaagcccaattgtgttgaagccacatgaagagtggaaaggaagacaagaactctctatcgtctcctcaagctactgcagcggtcagctcgatccacgtaaggttctttatggggattactgataatatatatgaaatcaaacttggaaacatcatcagtcttatattttgatcgtcttcatggataaagcgattgatgcccaaacaaatctgatatgatatgattttgtttggagctattgccctttgtgagtttctgacaggcacacagaaagataggcaaatgtagtattttgtaacgttgccttctgtgtggcggtcagggacttattaatatgtattatggttcacccggaaacatgagtcttatattgaatcgtcttcttcatg

SEQ ID NO: 3148 - protein, 306 aa, Arabidopsis thaliana
  peptide (1)..(306): Ceres Seq. ID no. 13489025
  misc_feature (13)..(285): Pfam Name: Pfam Description:  Aldose 1-epimerase
  misc_feature (1)..(306): NCBI GI NO: 11281678 NR Description: hypothetical protein F18O22
  misc_feature (1)..(306): NCBI GI NO: 28393808 NR Description: unknown protein [Arabidopsis thaliana]
  misc_feature (1)..(306): NCBI GI NO: 18417396 NR Description: aldose 1-epimerase family [Arabidopsis thaliana]
  misc_feature (1)..(305): NCBI GI NO: 18395868 NR Description: aldose 1-epimerase family [Arabidopsis thaliana]
  misc_feature (1)..(305): NCBI GI NO: 16612258 NR Description: AT3g01590/F4P13_13 [Arabidopsis thaliana]
  misc_feature (10)..(302): NCBI GI NO: 15242099 NR Description: aldose 1-epimerase family [Arabidopsis thaliana]
  misc_feature (1)..(304): NCBI GI NO: 38344152 NR Description: OSJNBa0041A02.19
  misc_feature (5)..(304): NCBI GI NO: 2501555 NR Description: POSSIBLE APOSPORY-ASSOCIATED PROTEIN C
  misc_feature (1)..(304): NCBI GI NO: 40253263 NR Description: putative Aldose 1-epimerase
  misc_feature (10)..(302): NCBI GI NO: 19387263 NR Description: putative apospory-associated protein C
MPLNVVNDRDGSSRILLTDPAGSTAEVLLYGGQVVSWKNERREKLLYMSTKAQLKPPKAIRGGLPISFPQFGNFGALERHGFARNRFWSLDNDPSPLPPANQQSTVDLVLKSTEDDLKIWPHSFELRVRISISPGKLTIIPRVRNTDTKAFSFMFSLRNYLYVSDISEVRVEGLETLDYLDNLVRRERFTEQADAITFDGEVDKVYLNTPTKIAIIDHERKRTIELRKEGMPNAAVWNPWDKKAKSIADMGDEDYTTMLCVDSGAIESPIVLKPHEEWKGRQELSIVSSSYCSGQLDPRKVLYGDY

SEQ ID NO: 3149 - protein, 259 aa, Arabidopsis thaliana
  peptide (1)..(259): Ceres Seq. ID no. 13489026
  misc_feature (1)..(238): Pfam Name: Pfam Description:  Aldose 1-epimerase
  misc_feature (1)..(259): NCBI GI NO: 11281678 NR Description: hypothetical protein F18O22
  misc_feature (1)..(259): NCBI GI NO: 28393808 NR Description: unknown protein [Arabidopsis thaliana]
  misc_feature (1)..(259): NCBI GI NO: 18417396 NR Description: aldose 1-epimerase family [Arabidopsis thaliana]
  misc_feature (1)..(258): NCBI GI NO: 18395868 NR Description: aldose 1-epimerase family [Arabidopsis thaliana]
  misc_feature (1)..(258): NCBI GI NO: 16612258 NR Description: AT3g01590/F4P13_13 [Arabidopsis thaliana]
  misc_feature (1)..(255): NCBI GI NO: 15242099 NR Description: aldose 1-epimerase family [Arabidopsis thaliana]
  misc_feature (1)..(257): NCBI GI NO: 38344152 NR Description: OSJNBa0041A02.19
  misc_feature (1)..(257): NCBI GI NO: 2501555 NR Description: POSSIBLE APOSPORY-ASSOCIATED PROTEIN C
  misc_feature (1)..(257): NCBI GI NO: 40253263 NR Description: putative Aldose 1-epimerase
  misc_feature (1)..(255): NCBI GI NO: 19387263 NR Description: putative apospory-associated protein C
MSTKAQLKPPKAIRGGLPISFPQFGNFGALERHGFARNRFWSLDNDPSPLPPANQQSTVDLVLKSTEDDLKIWPHSFELRVRISISPGKLTIIPRVRNTDTKAFSFMFSLRNYLYVSDISEVRVEGLETLDYLDNLVRRERFTEQADAITFDGEVDKVYLNTPTKIAIIDHERKRTIELRKEGMPNAAVWNPWDKKAKSIADMGDEDYTTMLCVDSGAIESPIVLKPHEEWKGRQELSIVSSSYCSGQLDPRKVLYGDY

SEQ ID NO: 3150 - protein, 153 aa, Arabidopsis thaliana
  peptide (1)..(153): Ceres Seq. ID no. 13489027
  misc_feature (1)..(132): Pfam Name: Pfam Description:  Aldose 1-epimerase
  misc_feature (1)..(153): NCBI GI NO: 11281678 NR Description: hypothetical protein F18O22
  misc_feature (1)..(153): NCBI GI NO: 28393808 NR Description: unknown protein [Arabidopsis thaliana]
  misc_feature (1)..(153): NCBI GI NO: 18417396 NR Description: aldose 1-epimerase family [Arabidopsis thaliana]
  misc_feature (1)..(152): NCBI GI NO: 18395868 NR Description: aldose 1-epimerase family [Arabidopsis thaliana]
  misc_feature (1)..(152): NCBI GI NO: 16612258 NR Description: AT3g01590/F4P13_13 [Arabidopsis thaliana]
  misc_feature (1)..(149): NCBI GI NO: 15242099 NR Description: aldose 1-epimerase family [Arabidopsis thaliana]
  misc_feature (1)..(151): NCBI GI NO: 38344152 NR Description: OSJNBa0041A02.19
  misc_feature (1)..(151): NCBI GI NO: 2501555 NR Description: POSSIBLE APOSPORY-ASSOCIATED PROTEIN C
  misc_feature (1)..(151): NCBI GI NO: 40253263 NR Description: putative Aldose 1-epimerase
  misc_feature (1)..(149): NCBI GI NO: 19387263 NR Description: putative apospory-associated protein C
MFSLRNYLYVSDISEVRVEGLETLDYLDNLVRRERFTEQADAITFDGEVDKVYLNTPTKIAIIDHERKRTIELRKEGMPNAAVWNPWDKKAKSIADMGDEDYTTMLCVDSGAIESPIVLKPHEEWKGRQELSIVSSSYCSGQLDPRKVLYGDY

SEQ ID NO: 3151 - DNA, 1108 bp, Arabidopsis thaliana
  misc_feature (1)..(1108): Ceres Seq. ID no. 12371248
aataaccttttcggtgctcaagcgccgtttctagggtttttctctgaggaagaagcgtttcatttctctgaatttcatcgaaaatggcggaaagaggaggagaaggcggcgcagagcgtggcggtgaccgtggtgacttcggacgtggattcggcggtggacgtggaggtggccgtggccgtgatcgtggtccaagaggccgtggaagacgtggaggccgtgcctcggaagaaacgaaatgggttccagtgaccaaactaggtcgtctagtggctgacaataaaataacgaagctagagcagatctatctccattctctcccagtaaaggagtaccaaatcatagatcatcttgttggtcctacgttgaaagacgaggttatgaagatcatgcctgttcagaaacaaaccagagctggtcaaaggactagattcaaggcctttgttgttgttggtgatggtaatggtcatgttggtttgggtgtcaagtgttctaaggaagttgctactgccattagaggagctattattcttgctaagctctctgttgttccggtgaggagaggttactgggggaataagattgggaagccacacactgtgccttgtaaggttactgggaagtgtggctctgttactgtgagaatggttcctgctccgagaggttctggtattgttgctgctagggttcctaagaaggttcttcagttcgctggtattgatgatgtctttacttcttccagaggatctactaaaactcttggaaactttgtcaaggcgacgtttgactgcttacagaagacatatgggttccttacaccagagttctggaaagagactagattctccagatcgccctaccaagagcacactgatttcttgtcgactaaggctgtttctgcaaccaaggttatcacggagggtgaagaccaagcttaagaccttcatgagataagttttggttgttcttaatactaattcctactttgaaaaagagtatttttttttcttgattatctatgagttttgttattggtggtttcgttactgttttggattttgttagatgtttgccttaatgcaaatttcaatgaaatagcttttgcaat

SEQ ID NO: 3152 - protein, 284 aa, Arabidopsis thaliana
  peptide (1)..(284): Ceres Seq. ID no. 12371249
  misc_feature (177)..(250): Pfam Name: Pfam Description:  Ribosomal protein S5, C-terminal domain
  misc_feature (1)..(284): NCBI GI NO: 15217951 NR Description: ribosomal protein S2, putative
  misc_feature (1)..(284): NCBI GI NO: 21618011 NR Description: ribosomal protein S2, putative
  misc_feature (1)..(284): NCBI GI NO: 18406325 NR Description: ribosomal protein S2, putative
  misc_feature (1)..(284): NCBI GI NO: 21539457 NR Description: ribosomal protein S2, putative
  misc_feature (3)..(284): NCBI GI NO: 25294520 NR Description: hypothetical protein RF12
  misc_feature (1)..(284): NCBI GI NO: 15227443 NR Description: 40S ribosomal protein S2; protein id: At2g41840
  misc_feature (1)..(284): NCBI GI NO: 21553851 NR Description: 40S ribosomal protein S2 [Arabidopsis thaliana]
  misc_feature (1)..(279): NCBI GI NO: 15230312 NR Description: 40S ribosomal protein S2 homolog
  misc_feature (1)..(231): NCBI GI NO: 8979936 NR Description: Identical to gene XW6 from Arabidopsis thaliana gb| AB008016and
  misc_feature (1)..(267): NCBI GI NO: 34393314 NR Description: putative 40S ribosomal protein S2
MAERGGEGGAERGGDRGDFGRGFGGGRGGGRGRDRGPRGRGRRGGRASEETKWVPVTKLGRLVADNKITKLEQIYLHSLPVKEYQIIDHLVGPTLKDEVMKIMPVQKQTRAGQRTRFKAFVVVGDGNGHVGLGVKCSKEVATAIRGAIILAKLSVVPVRRGYWGNKIGKPHTVPCKVTGKCGSVTVRMVPAPRGSGIVAARVPKKVLQFAGIDDVFTSSRGSTKTLGNFVKATFDCLQKTYGFLTPEFWKETRFSRSPYQEHTDFLSTKAVSATKVITEGEDQA

SEQ ID NO: 3153 - protein, 185 aa, Arabidopsis thaliana
  peptide (1)..(185): Ceres Seq. ID no. 12371250
  misc_feature (78)..(151): Pfam Name: Pfam Description:  Ribosomal protein S5, C-terminal domain
  misc_feature (1)..(185): NCBI GI NO: 15217951 NR Description: ribosomal protein S2, putative
  misc_feature (1)..(185): NCBI GI NO: 21618011 NR Description: ribosomal protein S2, putative
  misc_feature (1)..(185): NCBI GI NO: 18406325 NR Description: ribosomal protein S2, putative
  misc_feature (1)..(185): NCBI GI NO: 21539457 NR Description: ribosomal protein S2, putative
  misc_feature (1)..(185): NCBI GI NO: 25294520 NR Description: hypothetical protein RF12
  misc_feature (1)..(185): NCBI GI NO: 15227443 NR Description: 40S ribosomal protein S2; protein id: At2g41840
  misc_feature (1)..(185): NCBI GI NO: 21553851 NR Description: 40S ribosomal protein S2 [Arabidopsis thaliana]
  misc_feature (1)..(180): NCBI GI NO: 15230312 NR Description: 40S ribosomal protein S2 homolog
  misc_feature (1)..(132): NCBI GI NO: 8979936 NR Description: Identical to gene XW6 from Arabidopsis thaliana gb| AB008016and
  misc_feature (1)..(168): NCBI GI NO: 34393314 NR Description: putative 40S ribosomal protein S2
MKIMPVQKQTRAGQRTRFKAFVVVGDGNGHVGLGVKCSKEVATAIRGAIILAKLSVVPVRRGYWGNKIGKPHTVPCKVTGKCGSVTVRMVPAPRGSGIVAARVPKKVLQFAGIDDVFTSSRGSTKTLGNFVKATFDCLQKTYGFLTPEFWKETRFSRSPYQEHTDFLSTKAVSATKVITEGEDQA

SEQ ID NO: 3154 - protein, 182 aa, Arabidopsis thaliana
  peptide (1)..(182): Ceres Seq. ID no. 12371251
  misc_feature (75)..(148): Pfam Name: Pfam Description:  Ribosomal protein S5, C-terminal domain
  misc_feature (1)..(182): NCBI GI NO: 15217951 NR Description: ribosomal protein S2, putative
  misc_feature (1)..(182): NCBI GI NO: 21618011 NR Description: ribosomal protein S2, putative
  misc_feature (1)..(182): NCBI GI NO: 18406325 NR Description: ribosomal protein S2, putative
  misc_feature (1)..(182): NCBI GI NO: 21539457 NR Description: ribosomal protein S2, putative
  misc_feature (1)..(182): NCBI GI NO: 25294520 NR Description: hypothetical protein RF12
  misc_feature (1)..(182): NCBI GI NO: 15227443 NR Description: 40S ribosomal protein S2; protein id: At2g41840
  misc_feature (1)..(182): NCBI GI NO: 21553851 NR Description: 40S ribosomal protein S2 [Arabidopsis thaliana]
  misc_feature (1)..(177): NCBI GI NO: 15230312 NR Description: 40S ribosomal protein S2 homolog
  misc_feature (1)..(129): NCBI GI NO: 8979936 NR Description: Identical to gene XW6 from Arabidopsis thaliana gb| AB008016and
  misc_feature (1)..(165): NCBI GI NO: 34393314 NR Description: putative 40S ribosomal protein S2
MPVQKQTRAGQRTRFKAFVVVGDGNGHVGLGVKCSKEVATAIRGAIILAKLSVVPVRRGYWGNKIGKPHTVPCKVTGKCGSVTVRMVPAPRGSGIVAARVPKKVLQFAGIDDVFTSSRGSTKTLGNFVKATFDCLQKTYGFLTPEFWKETRFSRSPYQEHTDFLSTKAVSATKVITEGEDQA

SEQ ID NO: 3155 - DNA, 854 bp, Arabidopsis thaliana
  misc_feature (1)..(854): Ceres Seq. ID no. 12330075
attttagaaaaaataaacaaacaaacaaaccaaaacaccatggagcttaaaaatacaatctttctagtcatacttctatcaataaccattctccaatcttcatctgcaaccccaaaccggtcggaatcagaccagtttattgtgtcttcatgccaaaccacccaatatccatcactatgcgtgcacacactctctgcttacgccaccaagatccgccacaacaatgaccaagatctcgcccagactgctctcatcatcagcttggctcgagccaaatccgttactatcttcgtcgccaaactaaccaaagagacaccaagatttaaacgtagggaatatctagcaatcaaagattgcatcgaagtgctaggcaatagcgtggaccggttagctcaatcggttaaggaacttgctcgagctggtcatgctgtggctagtgaggacttcatgtggaaaatgagtaacgttcaaacatgggtcagtgccgctttgacggacgagacaacgtgtctagatggattctcagaacgagccatgggaggcaaagtgaagagactgattcggtataaggtggttcacgtggctcaagtcactagcaatgctcttgctttggttaatcagtttgcagagaagcgaagtgtgaagtttccttaaatggacttaaatgtgaaaattttggcttgtaagtgagagtttgaatctaaacttcaattagttgtgtaaattgttatcttttttttttttgtcggtcggaaagaaaactcaagattgtgtaacaatctttgttgtgtcctgcataatattgtattttaagataatgatatatagtcaccttttttgggtgtaaattatgg

SEQ ID NO: 3156 - protein, 217 aa, Arabidopsis thaliana
  peptide (1)..(217): Ceres Seq. ID no. 12330076
  misc_feature (14)..(217): NCBI GI NO: 21618013 NR Description: putative ripening-related protein
  misc_feature (14)..(217): NCBI GI NO: 18407657 NR Description: expressed protein; protein id: At1g62770
  misc_feature (20)..(211): NCBI GI NO: 15234547 NR Description: putative protein; protein id: At4g12390
  misc_feature (20)..(211): NCBI GI NO: 21555297 NR Description: unknown [Arabidopsis thaliana]
  misc_feature (22)..(211): NCBI GI NO: 7406663 NR Description: putative ripening-related protein [Vitis vinifera]
  misc_feature (14)..(211): NCBI GI NO: 112717 NR Description: 21 KD PROTEIN PRECURSOR (1.2 PROTEIN)
  misc_feature (19)..(210): NCBI GI NO: 15241799 NR Description: ripening-related protein - like
  misc_feature (19)..(210): NCBI GI NO: 21618088 NR Description: ripening-related protein-like
  misc_feature (19)..(211): NCBI GI NO: 7488727 NR Description: 21K protein precursor - alfalfa
  misc_feature (15)..(211): NCBI GI NO: 15234982 NR Description: putative protein; protein id: At4g25260
ILEKINKQTNQNTMELKNTIFLVILLSITILQSSSATPNRSESDQFIVSSCQTTQYPSLCVHTLSAYATKIRHNNDQDLAQTALIISLARAKSVTIFVAKLTKETPRFKRREYLAIKDCIEVLGNSVDRLAQSVKELARAGHAVASEDFMWKMSNVQTWVSAALTDETTCLDGFSERAMGGKVKRLIRYKVVHVAQVTSNALALVNQFAEKRSVKFP

SEQ ID NO: 3157 - protein, 204 aa, Arabidopsis thaliana
  peptide (1)..(204): Ceres Seq. ID no. 12330077
  misc_feature (1)..(204): NCBI GI NO: 21618013 NR Description: putative ripening-related protein
  misc_feature (1)..(204): NCBI GI NO: 18407657 NR Description: expressed protein; protein id: At1g62770
  misc_feature (7)..(198): NCBI GI NO: 15234547 NR Description: putative protein; protein id: At4g12390
  misc_feature (7)..(198): NCBI GI NO: 21555297 NR Description: unknown [Arabidopsis thaliana]
  misc_feature (9)..(198): NCBI GI NO: 7406663 NR Description: putative ripening-related protein [Vitis vinifera]
  misc_feature (1)..(198): NCBI GI NO: 112717 NR Description: 21 KD PROTEIN PRECURSOR (1.2 PROTEIN)
  misc_feature (6)..(197): NCBI GI NO: 15241799 NR Description: ripening-related protein - like
  misc_feature (6)..(197): NCBI GI NO: 21618088 NR Description: ripening-related protein-like
  misc_feature (6)..(198): NCBI GI NO: 7488727 NR Description: 21K protein precursor - alfalfa
  misc_feature (2)..(198): NCBI GI NO: 15234982 NR Description: putative protein; protein id: At4g25260
MELKNTIFLVILLSITILQSSSATPNRSESDQFIVSSCQTTQYPSLCVHTLSAYATKIRHNNDQDLAQTALIISLARAKSVTIFVAKLTKETPRFKRREYLAIKDCIEVLGNSVDRLAQSVKELARAGHAVASEDFMWKMSNVQTWVSAALTDETTCLDGFSERAMGGKVKRLIRYKVVHVAQVTSNALALVNQFAEKRSVKFP

SEQ ID NO: 3158 - DNA, 829 bp, Arabidopsis thaliana
  misc_feature (1)..(829): Ceres Seq. ID no. 12660820
aagcaactactctctctctctctctttcttctgccatcgccaaaaacttgtcttttgcttcttatttggtctcagctctgatcttttgattcaacggctcccggagacgacggaagcaatgcagttcttcggtggatctgagattagtccgtcgccgccagttccgacggcgagtggaaacaacgcgcacatgatgtacgttttcaatcgtaacggtgtatgtcttctctacaaagaatggaatcggcctcttcatacacttaatcctcagcaagatcacaagctcatgtttggtcttctcttctctctcaaatctctcaccgctaagatggatccagtcaatgcggataaaggaaatcttggggttccacagttgccaggacaaggttgctctttccatagtttccgtacgaatacttacaagctaagtttcatggagactccctctggtattaagattatcttagtaactcatccaaagaccggagatttacgcgaatccttgaagtacatctacagtttatacgttgaatatgtcgtaaaaaatcctatatacagcccaggatctccaatcaagtcggagttgttcaacactgcacttgaccagtacgtaaggagcatctcttagtgtgtgcattacagatttgtccattggaacttctctccttcaacagaactatcgtctgaacaatctctgaaaagaagagagaattgtagtagagagatttatcttgagttcgactgttttctctgcaaatctatgtttcgtttaccctttttattaactccactgtattggcttgctatcaatgatgttcatggtttactc

SEQ ID NO: 3159 - protein, 208 aa, Arabidopsis thaliana
  peptide (1)..(208): Ceres Seq. ID no. 12660821
  misc_feature (62)..(207): Pfam Name: Pfam Description:  Sybindin-like family
  misc_feature (40)..(208): NCBI GI NO: 15223752 NR Description: unknown protein; protein id: At1g51160.1
  misc_feature (47)..(207): NCBI GI NO: 34914656 NR Description: P0504D03.19
  misc_feature (63)..(207): NCBI GI NO: 20881775 NR Description: similar to MUM2 protein
  misc_feature (63)..(207): NCBI GI NO: 10864021 NR Description: MUM2 protein [Homo sapiens]
  misc_feature (65)..(205): NCBI GI NO: 24651330 NR Description: CG1359-PA [Drosophila melanogaster]
  misc_feature (88)..(207): NCBI GI NO: 28828451 NR Description: similar to Homo sapiens (Human). MUM2 protein
  misc_feature (63)..(208): NCBI GI NO: 19114985 NR Description: hypothetical protein [Schizosaccharomyces pombe]
  misc_feature (92)..(207): NCBI GI NO: 40740926 NR Description: hypothetical protein AN8828.2
  misc_feature (132)..(208): NCBI GI NO: 19115000 NR Description: conserved hypothetical protein
  misc_feature (63)..(206): NCBI GI NO: 19113462 NR Description: hypothetical protein [Schizosaccharomyces pombe]
SNYSLSLSFFCHRQKLVFCFLFGLSSDLLIQRLPETTEAMQFFGGSEISPSPPVPTASGNNAHMMYVFNRNGVCLLYKEWNRPLHTLNPQQDHKLMFGLLFSLKSLTAKMDPVNADKGNLGVPQLPGQGCSFHSFRTNTYKLSFMETPSGIKIILVTHPKTGDLRESLKYIYSLYVEYVVKNPIYSPGSPIKSELFNTALDQYVRSIS

SEQ ID NO: 3160 - protein, 169 aa, Arabidopsis thaliana
  peptide (1)..(169): Ceres Seq. ID no. 12660822
  misc_feature (23)..(168): Pfam Name: Pfam Description:  Sybindin-like family
  misc_feature (1)..(169): NCBI GI NO: 15223752 NR Description: unknown protein; protein id: At1g51160.1
  misc_feature (8)..(168): NCBI GI NO: 34914656 NR Description: P0504D03.19
  misc_feature (24)..(168): NCBI GI NO: 20881775 NR Description: similar to MUM2 protein
  misc_feature (24)..(168): NCBI GI NO: 10864021 NR Description: MUM2 protein [Homo sapiens]
  misc_feature (26)..(166): NCBI GI NO: 24651330 NR Description: CG1359-PA [Drosophila melanogaster]
  misc_feature (49)..(168): NCBI GI NO: 28828451 NR Description: similar to Homo sapiens (Human). MUM2 protein
  misc_feature (24)..(169): NCBI GI NO: 19114985 NR Description: hypothetical protein [Schizosaccharomyces pombe]
  misc_feature (53)..(168): NCBI GI NO: 40740926 NR Description: hypothetical protein AN8828.2
  misc_feature (93)..(169): NCBI GI NO: 19115000 NR Description: conserved hypothetical protein
  misc_feature (24)..(167): NCBI GI NO: 19113462 NR Description: hypothetical protein [Schizosaccharomyces pombe]
MQFFGGSEISPSPPVPTASGNNAHMMYVFNRNGVCLLYKEWNRPLHTLNPQQDHKLMFGLLFSLKSLTAKMDPVNADKGNLGVPQLPGQGCSFHSFRTNTYKLSFMETPSGIKIILVTHPKTGDLRESLKYIYSLYVEYVVKNPIYSPGSPIKSELFNTALDQYVRSIS

SEQ ID NO: 3161 - protein, 145 aa, Arabidopsis thaliana
  peptide (1)..(145): Ceres Seq. ID no. 12660823
  misc_feature (1)..(144): Pfam Name: Pfam Description:  Sybindin-like family
  misc_feature (1)..(145): NCBI GI NO: 15223752 NR Description: unknown protein; protein id: At1g51160.1
  misc_feature (1)..(144): NCBI GI NO: 34914656 NR Description: P0504D03.19
  misc_feature (1)..(144): NCBI GI NO: 20881775 NR Description: similar to MUM2 protein
  misc_feature (1)..(144): NCBI GI NO: 10864021 NR Description: MUM2 protein [Homo sapiens]
  misc_feature (2)..(142): NCBI GI NO: 24651330 NR Description: CG1359-PA [Drosophila melanogaster]
  misc_feature (25)..(144): NCBI GI NO: 28828451 NR Description: similar to Homo sapiens (Human). MUM2 protein
  misc_feature (1)..(145): NCBI GI NO: 19114985 NR Description: hypothetical protein [Schizosaccharomyces pombe]
  misc_feature (29)..(144): NCBI GI NO: 40740926 NR Description: hypothetical protein AN8828.2
  misc_feature (69)..(145): NCBI GI NO: 19115000 NR Description: conserved hypothetical protein
  misc_feature (1)..(143): NCBI GI NO: 19113462 NR Description: hypothetical protein [Schizosaccharomyces pombe]
MMYVFNRNGVCLLYKEWNRPLHTLNPQQDHKLMFGLLFSLKSLTAKMDPVNADKGNLGVPQLPGQGCSFHSFRTNTYKLSFMETPSGIKIILVTHPKTGDLRESLKYIYSLYVEYVVKNPIYSPGSPIKSELFNTALDQYVRSIS

SEQ ID NO: 3162 - DNA, 1347 bp, Arabidopsis thaliana
  misc_feature (1)..(1347): Ceres Seq. ID no. 12371273
atcagataaacgaatggctaacgactacgtttccactgttctgcttcttcttagcctccttatcttcttgagtcagcgtactgattctgcctctatcgtcaagtctcttcctggttttgatggccctcttccctttgaactcgaaaccgggtatattggtgttggtgaggaagaggaagtgcagttgttttactactttatcaagtctgagaggaatccacaagaagatcctcttctactctggttaagtggaggacctggttgctcttctatctctggtcttctttacgagaatgggcctgtgaatgtgaagattgaggtttacaatggaactcttccttccttggtctctactacatattcatggactaaggtttcgagtataatatatttggatcagcctgttggaactggcttctcctactcaagaactaaacttgttaacaaacccagtgattcaggagaagccaagagaatccacgagtttcttcacaagtggctaggcaagcatcaagagttttcctccaaccctttctatgtcggtggggattcttattgtggtatggtcattccggcactcgttcaagaaatctcaaaaggaaactatgtatgctgcaaacctccaataaatcttcagggctatattcttggaaacccatcaacagaaaatgaagttgatattaattatcgcattccatatgctcatggaatggcactgatctctgatgaactctatgagtcaatgaagagaatctgcaaaggaaaatatgaaaatgttgatccacgtaacacaaaatgcttgaaactcgttggagaatatcagaagtgcactaaaagaataaacaaagcacttataataacgccagagtgtgtagacacatctcctgattgctatatgtatcggtatttgttaactacctactgggccaatgatgagaatgtgcaaagagctcttcatgtcaataaggggagtataggggaatgggtacgttgttattttgagataccttacaatcatgacattaaaagcagtgtaccgtaccacatgaataacagcatcgatggatatgcatctctcatcttcagtggtgatcacgacatggaagtaccttaccttggaactcaagcttggattaggtctcttaattattctctcattgatgactggagaccttggatgataggagatcaaatcgctggatacacgaggacctatgccaataagatggcatttgctactatcaaaggaggaggacacacaccagagtataaaccagaggagagttatatcatgttccaaaggtggatcagtggtcagcctttgtaacttgaagccaaagcaattcc

SEQ ID NO: 3163 - protein, 441 aa, Arabidopsis thaliana
  peptide (1)..(441): Ceres Seq. ID no. 12371274
  misc_feature (37)..(438): Pfam Name: Pfam Description:  Serine carboxypeptidase
  misc_feature (5)..(441): NCBI GI NO: 15228300 NR Description: putative glucose acyltransferase
  misc_feature (5)..(441): NCBI GI NO: 15219433 NR Description: putative serine carboxypeptidase
  misc_feature (5)..(441): NCBI GI NO: 22327401 NR Description: serine carboxypeptidase; protein id: At5g36180
  misc_feature (5)..(441): NCBI GI NO: 15219431 NR Description: putative serine carboxypeptidase
  misc_feature (5)..(441): NCBI GI NO: 15219429 NR Description: putative serine carboxypeptidase
  misc_feature (5)..(441): NCBI GI NO: 8777303 NR Description: serine carboxypeptidase [Arabidopsis thaliana]
  misc_feature (5)..(441): NCBI GI NO: 15219427 NR Description: putative serine carboxypeptidase
  misc_feature (5)..(441): NCBI GI NO: 15219435 NR Description: putative serine carboxypeptidase
  misc_feature (11)..(441): NCBI GI NO: 15227765 NR Description: putative serine carboxypeptidase I
  misc_feature (12)..(441): NCBI GI NO: 15227769 NR Description: putative serine carboxypeptidase II
SDKRMANDYVSTVLLLLSLLIFLSQRTDSASIVKSLPGFDGPLPFELETGYIGVGEEEEVQLFYYFIKSERNPQEDPLLLWLSGGPGCSSISGLLYENGPVNVKIEVYNGTLPSLVSTTYSWTKVSSIIYLDQPVGTGFSYSRTKLVNKPSDSGEAKRIHEFLHKWLGKHQEFSSNPFYVGGDSYCGMVIPALVQEISKGNYVCCKPPINLQGYILGNPSTENEVDINYRIPYAHGMALISDELYESMKRICKGKYENVDPRNTKCLKLVGEYQKCTKRINKALIITPECVDTSPDCYMYRYLLTTYWANDENVQRALHVNKGSIGEWVRCYFEIPYNHDIKSSVPYHMNNSIDGYASLIFSGDHDMEVPYLGTQAWIRSLNYSLIDDWRPWMIGDQIAGYTRTYANKMAFATIKGGGHTPEYKPEESYIMFQRWISGQPL

SEQ ID NO: 3164 - protein, 437 aa, Arabidopsis thaliana
  peptide (1)..(437): Ceres Seq. ID no. 12371275
  misc_feature (33)..(434): Pfam Name: Pfam Description:  Serine carboxypeptidase
  misc_feature (1)..(437): NCBI GI NO: 15228300 NR Description: putative glucose acyltransferase
  misc_feature (1)..(437): NCBI GI NO: 15219433 NR Description: putative serine carboxypeptidase
  misc_feature (1)..(437): NCBI GI NO: 22327401 NR Description: serine carboxypeptidase; protein id: At5g36180
  misc_feature (1)..(437): NCBI GI NO: 15219431 NR Description: putative serine carboxypeptidase
  misc_feature (1)..(437): NCBI GI NO: 15219429 NR Description: putative serine carboxypeptidase
  misc_feature (1)..(437): NCBI GI NO: 8777303 NR Description: serine carboxypeptidase [Arabidopsis thaliana]
  misc_feature (1)..(437): NCBI GI NO: 15219427 NR Description: putative serine carboxypeptidase
  misc_feature (1)..(437): NCBI GI NO: 15219435 NR Description: putative serine carboxypeptidase
  misc_feature (7)..(437): NCBI GI NO: 15227765 NR Description: putative serine carboxypeptidase I
  misc_feature (8)..(437): NCBI GI NO: 15227769 NR Description: putative serine carboxypeptidase II
MANDYVSTVLLLLSLLIFLSQRTDSASIVKSLPGFDGPLPFELETGYIGVGEEEEVQLFYYFIKSERNPQEDPLLLWLSGGPGCSSISGLLYENGPVNVKIEVYNGTLPSLVSTTYSWTKVSSIIYLDQPVGTGFSYSRTKLVNKPSDSGEAKRIHEFLHKWLGKHQEFSSNPFYVGGDSYCGMVIPALVQEISKGNYVCCKPPINLQGYILGNPSTENEVDINYRIPYAHGMALISDELYESMKRICKGKYENVDPRNTKCLKLVGEYQKCTKRINKALIITPECVDTSPDCYMYRYLLTTYWANDENVQRALHVNKGSIGEWVRCYFEIPYNHDIKSSVPYHMNNSIDGYASLIFSGDHDMEVPYLGTQAWIRSLNYSLIDDWRPWMIGDQIAGYTRTYANKMAFATIKGGGHTPEYKPEESYIMFQRWISGQPL

SEQ ID NO: 3165 - protein, 254 aa, Arabidopsis thaliana
  peptide (1)..(254): Ceres Seq. ID no. 12371276
  misc_feature (1)..(251): Pfam Name: Pfam Description:  Serine carboxypeptidase
  misc_feature (1)..(254): NCBI GI NO: 15228300 NR Description: putative glucose acyltransferase
  misc_feature (1)..(254): NCBI GI NO: 15219433 NR Description: putative serine carboxypeptidase
  misc_feature (1)..(254): NCBI GI NO: 22327401 NR Description: serine carboxypeptidase; protein id: At5g36180
  misc_feature (1)..(254): NCBI GI NO: 15219431 NR Description: putative serine carboxypeptidase
  misc_feature (1)..(254): NCBI GI NO: 15219429 NR Description: putative serine carboxypeptidase
  misc_feature (1)..(254): NCBI GI NO: 8777303 NR Description: serine carboxypeptidase [Arabidopsis thaliana]
  misc_feature (1)..(254): NCBI GI NO: 15219427 NR Description: putative serine carboxypeptidase
  misc_feature (1)..(254): NCBI GI NO: 15219435 NR Description: putative serine carboxypeptidase
  misc_feature (1)..(254): NCBI GI NO: 15227765 NR Description: putative serine carboxypeptidase I
  misc_feature (1)..(254): NCBI GI NO: 15227769 NR Description: putative serine carboxypeptidase II
MVIPALVQEISKGNYVCCKPPINLQGYILGNPSTENEVDINYRIPYAHGMALISDELYESMKRICKGKYENVDPRNTKCLKLVGEYQKCTKRINKALIITPECVDTSPDCYMYRYLLTTYWANDENVQRALHVNKGSIGEWVRCYFEIPYNHDIKSSVPYHMNNSIDGYASLIFSGDHDMEVPYLGTQAWIRSLNYSLIDDWRPWMIGDQIAGYTRTYANKMAFATIKGGGHTPEYKPEESYIMFQRWISGQPL

SEQ ID NO: 3166 - DNA, 1539 bp, Arabidopsis thaliana
  misc_feature (1)..(1539): Ceres Seq. ID no. 13494002
atcatcaaagtgaaaatgacaaacttcaaagacaacgatggagatggaaccaaactccacgtggtaatgtttccatggttagcctttggtcacatggttccatacttggagctctctaaactcatagctcaaaagggtcacaaagtctctttcatttccactccacgtaacatcgaccgtctcctcccacggttaccggaaaatctctcctccgtcattaacttcgtcaagctatcacttcccgtcggcgacaacaaactcccggaagacggtgaagctaccacagacgtccctttcgaactcataccttacttaaaaatcgcttacgacgggttaaaagttccggtgacggagtttcttgaatcttcgaaacccgattgggttcttcaagatttcgcggggttttggcttcctccaatctctcgtcgtctcggaatcaaaaccggattctttagcgctttcaacggcgcgacgctcggtattcttaaaccgccggggttcgaagagtaccgtacttcgccggcggattttatgaagccgcctaagtgggttccgtttgaaacttcggtagctttcaagttatttgaatgcaggttcattttcaaaggatttatggcggaaaccaccgaagggaatgttcccgacatccaccgtgtcggcggcgtaattgacggctgtgacgtcatcttcgtacggagctgttacgagtatgaagcggagtggttaggacttacacaagaacttcaccggaaaccggttataccggtcggagttttgcctccaaaaccggacgaaaagtttgaagataccgacacgtggctgtctgttaaaaaatggttggactcacggaaaagtaagtccattgtctacgtagcttttggttcagaagctaaaccgagtcaaacggagctaaatgagatcgctctcggtttagagctttctggtttacctttcttttgggtgttaaagactcgtcgtggtccgtgggataccgaaccggtcgagcttccggaaggattcgaagagcgtacagcggatagagggatggtgtggagaggttgggttgagcaattgcgtacattgagccatgactcgatcggtttggttctgactcatcccggttggggaacgataattgaagctatccggtttgctaaaccgatggcaatgctggtttttgtgtatgaccaaggattgaatgcgagagtcattgaagagaagaaaattgggtatatgatccctcgagacgagacagaaggtttctttactaaagaaagtgttgcgaattcgctaagattggtaatggtggaagaagaaggaaaggtttatagagagaatgtgaaggagatgaaaggagtgtttggagatatggatagacaagatcgttatgtggattcattcttggaatatcttgttactaatcgttaactttgagtcttgatccaatggtcggttaattgagtgaagttgatcaagtgttgcaaggatgatcattgtataatgttatgatattttggaatggtcaagttttcttgaggc

SEQ ID NO: 3167 - protein, 475 aa, Arabidopsis thaliana
  peptide (1)..(475): Ceres Seq. ID no. 13494003
  misc_feature (6)..(475): NCBI GI NO: 15450577 NR Description: At2g22590/T9I22.3 [Arabidopsis thaliana]
  misc_feature (6)..(475): NCBI GI NO: 18400022 NR Description: glycosyltransferase family [Arabidopsis thaliana]
  misc_feature (15)..(471): NCBI GI NO: 20149064 NR Description: putative anthocyanidine rhamnosyl-transferase
  misc_feature (15)..(474): NCBI GI NO: 21435782 NR Description: UDP-glucosyltransferase [Stevia rebaudiana]
  misc_feature (18)..(471): NCBI GI NO: 15238503 NR Description: UDP-glycosyltransferase family
  misc_feature (18)..(471): NCBI GI NO: 26452040 NR Description: putative anthocyanidin-3-glucoside rhamnosyltransferase
  misc_feature (19)..(471): NCBI GI NO: 15240534 NR Description: UDP-glycosyltransferase family
  misc_feature (11)..(471): NCBI GI NO: 34908562 NR Description: putative anthocyanidine rhamnosyl-transferase
  misc_feature (19)..(475): NCBI GI NO: 34393985 NR Description: putative UDP-glucosyltransferase
  misc_feature (122)..(471): NCBI GI NO: 34393978 NR Description: putative UDP-glucosyltransferase
IIKVKMTNFKDNDGDGTKLHVVMFPWLAFGHMVPYLELSKLIAQKGHKVSFISTPRNIDRLLPRLPENLSSVINFVKLSLPVGDNKLPEDGEATTDVPFELIPYLKIAYDGLKVPVTEFLESSKPDWVLQDFAGFWLPPISRRLGIKTGFFSAFNGATLGILKPPGFEEYRTSPADFMKPPKWVPFETSVAFKLFECRFIFKGFMAETTEGNVPDIHRVGGVIDGCDVIFVRSCYEYEAEWLGLTQELHRKPVIPVGVLPPKPDEKFEDTDTWLSVKKWLDSRKSKSIVYVAFGSEAKPSQTELNEIALGLELSGLPFFWVLKTRRGPWDTEPVELPEGFEERTADRGMVWRGWVEQLRTLSHDSIGLVLTHPGWGTIIEAIRFAKPMAMLVFVYDQGLNARVIEEKKIGYMIPRDETEGFFTKESVANSLRLVMVEEEGKVYRENVKEMKGVFGDMDRQDRYVDSFLEYLVTNR

SEQ ID NO: 3168 - protein, 470 aa, Arabidopsis thaliana
  peptide (1)..(470): Ceres Seq. ID no. 13494004
  misc_feature (1)..(470): NCBI GI NO: 15450577 NR Description: At2g22590/T9I22.3 [Arabidopsis thaliana]
  misc_feature (1)..(470): NCBI GI NO: 18400022 NR Description: glycosyltransferase family [Arabidopsis thaliana]
  misc_feature (10)..(466): NCBI GI NO: 20149064 NR Description: putative anthocyanidine rhamnosyl-transferase
  misc_feature (10)..(469): NCBI GI NO: 21435782 NR Description: UDP-glucosyltransferase [Stevia rebaudiana]
  misc_feature (13)..(466): NCBI GI NO: 15238503 NR Description: UDP-glycosyltransferase family
  misc_feature (13)..(466): NCBI GI NO: 26452040 NR Description: putative anthocyanidin-3-glucoside rhamnosyltransferase
  misc_feature (14)..(466): NCBI GI NO: 15240534 NR Description: UDP-glycosyltransferase family
  misc_feature (6)..(466): NCBI GI NO: 34908562 NR Description: putative anthocyanidine rhamnosyl-transferase
  misc_feature (14)..(470): NCBI GI NO: 34393985 NR Description: putative UDP-glucosyltransferase
  misc_feature (117)..(466): NCBI GI NO: 34393978 NR Description: putative UDP-glucosyltransferase
MTNFKDNDGDGTKLHVVMFPWLAFGHMVPYLELSKLIAQKGHKVSFISTPRNIDRLLPRLPENLSSVINFVKLSLPVGDNKLPEDGEATTDVPFELIPYLKIAYDGLKVPVTEFLESSKPDWVLQDFAGFWLPPISRRLGIKTGFFSAFNGATLGILKPPGFEEYRTSPADFMKPPKWVPFETSVAFKLFECRFIFKGFMAETTEGNVPDIHRVGGVIDGCDVIFVRSCYEYEAEWLGLTQELHRKPVIPVGVLPPKPDEKFEDTDTWLSVKKWLDSRKSKSIVYVAFGSEAKPSQTELNEIALGLELSGLPFFWVLKTRRGPWDTEPVELPEGFEERTADRGMVWRGWVEQLRTLSHDSIGLVLTHPGWGTIIEAIRFAKPMAMLVFVYDQGLNARVIEEKKIGYMIPRDETEGFFTKESVANSLRLVMVEEEGKVYRENVKEMKGVFGDMDRQDRYVDSFLEYLVTNR

SEQ ID NO: 3169 - protein, 453 aa, Arabidopsis thaliana
  peptide (1)..(453): Ceres Seq. ID no. 13494005
  misc_feature (1)..(453): NCBI GI NO: 15450577 NR Description: At2g22590/T9I22.3 [Arabidopsis thaliana]
  misc_feature (1)..(453): NCBI GI NO: 18400022 NR Description: glycosyltransferase family [Arabidopsis thaliana]
  misc_feature (1)..(449): NCBI GI NO: 20149064 NR Description: putative anthocyanidine rhamnosyl-transferase
  misc_feature (1)..(452): NCBI GI NO: 21435782 NR Description: UDP-glucosyltransferase [Stevia rebaudiana]
  misc_feature (1)..(449): NCBI GI NO: 15238503 NR Description: UDP-glycosyltransferase family
  misc_feature (1)..(449): NCBI GI NO: 26452040 NR Description: putative anthocyanidin-3-glucoside rhamnosyltransferase
  misc_feature (1)..(449): NCBI GI NO: 15240534 NR Description: UDP-glycosyltransferase family
  misc_feature (1)..(449): NCBI GI NO: 34908562 NR Description: putative anthocyanidine rhamnosyl-transferase
  misc_feature (1)..(453): NCBI GI NO: 34393985 NR Description: putative UDP-glucosyltransferase
  misc_feature (100)..(449): NCBI GI NO: 34393978 NR Description: putative UDP-glucosyltransferase
MFPWLAFGHMVPYLELSKLIAQKGHKVSFISTPRNIDRLLPRLPENLSSVINFVKLSLPVGDNKLPEDGEATTDVPFELIPYLKIAYDGLKVPVTEFLESSKPDWVLQDFAGFWLPPISRRLGIKTGFFSAFNGATLGILKPPGFEEYRTSPADFMKPPKWVPFETSVAFKLFECRFIFKGFMAETTEGNVPDIHRVGGVIDGCDVIFVRSCYEYEAEWLGLTQELHRKPVIPVGVLPPKPDEKFEDTDTWLSVKKWLDSRKSKSIVYVAFGSEAKPSQTELNEIALGLELSGLPFFWVLKTRRGPWDTEPVELPEGFEERTADRGMVWRGWVEQLRTLSHDSIGLVLTHPGWGTIIEAIRFAKPMAMLVFVYDQGLNARVIEEKKIGYMIPRDETEGFFTKESVANSLRLVMVEEEGKVYRENVKEMKGVFGDMDRQDRYVDSFLEYLVTNR

SEQ ID NO: 3170 - DNA, 1188 bp, Arabidopsis thaliana
  misc_feature (1)..(1188): Ceres Seq. ID no. 13488410
aaatgatcattttaatttttcatgttactctctccttcttcttcacttgttctctttctcatcgcctcttgattcacgcgaacgagaaagcgacgatcgtaaccaccggcgctgaccaaaaagtaatcgattctcttcccgagctgatctctcagcttcaggtgtcttgaatctgaatctgtggctatatttggtgctcggtggtgagcaggaagggagggggatattgtcagggttttaatgtacgtcagatgaatagagcaactaatgttactggcagtagaaggagggggtttattctcagcgtccgcgtctgggtatagtaagggattgacccttcttttctctggtgataaagacgtagataggcccatgagagttgtcccgtggaatcactaccaggtggttgaccaagagcctgaggctgaccctgttcttcagctggattctattaagaaccgagtttcccgcggttgcgctgcttccttcagttgttttggtggcgcttccgcgggacttgagaccccttctcctcttaaagttgaacctgtgcagcagcagcatcgtgaaatatcatcaccagagtctgttgttgttgtttctgaaaagggtaaagaccaaataagtgaagctgataatggcagcagcaaagaagctttcaaactctcgttgaggagtagcttgaagaggccctctgttgcggaatcacgctctctagaagatataaaagaatacgagacgttgagtgtggatggtagcgatctcactggtgacatggcaaggcggaaagttcagtggcctgatgcttgtggtagtgaactcactcaagttagagaatttgagccgagtgagatgggattatcagatgaagaatgggaggtaggacgacaaagaacatgttcgtgtgtgatcatgtaaattcagaaatcatcggtatcactctttactcatgtcttgtgtgcattgctcatatatttaaagtgtatctgttattacaaaagttctcttcaaggttttggcttgtacattattccctttgttttgagtggcaacttgttccgggtttctgttttctaaaaacgataagacaacatccaaatcgatgcaaagtggaagagagtggcaataactcttgttcttgtaacgctctcaaccacattacgtacgtgtacaacaaaactagaatgc

SEQ ID NO: 3171 - protein, 216 aa, Arabidopsis thaliana
  peptide (1)..(216): Ceres Seq. ID no. 13488411
  misc_feature (1)..(216): NCBI GI NO: 18395162 NR Description: expressed protein [Arabidopsis thaliana]
  misc_feature (6)..(193): NCBI GI NO: 7452500 NR Description: hypothetical protein T22J18
  misc_feature (1)..(193): NCBI GI NO: 2505872 NR Description: hypothetical protein [Arabidopsis thaliana]
  misc_feature (1)..(215): NCBI GI NO: 34912224 NR Description: P0415C01.14
  misc_feature (1)..(165): NCBI GI NO: 30692973 NR Description: expressed protein [Arabidopsis thaliana]
  misc_feature (1)..(157): NCBI GI NO: 10092447 NR Description: unknown protein; 15226-14726
  misc_feature (1)..(157): NCBI GI NO: 25334118 NR Description: F12G12.17 protein - Arabidopsis thaliana
  misc_feature (112)..(216): NCBI GI NO: 30692973 NR Description: expressed protein [Arabidopsis thaliana]
MLLAVEGGGLFSASASGYSKGLTLLFSGDKDVDRPMRVVPWNHYQVVDQEPEADPVLQLDSIKNRVSRGCAASFSCFGGASAGLETPSPLKVEPVQQQHREISSPESVVVVSEKGKDQISEADNGSSKEAFKLSLRSSLKRPSVAESRSLEDIKEYETLSVDGSDLTGDMARRKVQWPDACGSELTQVREFEPSEMGLSDEEWEVGRQRTCSCVIM

SEQ ID NO: 3172 - protein, 181 aa, Arabidopsis thaliana
  peptide (1)..(181): Ceres Seq. ID no. 13488412
  misc_feature (1)..(181): NCBI GI NO: 18395162 NR Description: expressed protein [Arabidopsis thaliana]
  misc_feature (1)..(158): NCBI GI NO: 7452500 NR Description: hypothetical protein T22J18
  misc_feature (1)..(158): NCBI GI NO: 2505872 NR Description: hypothetical protein [Arabidopsis thaliana]
  misc_feature (1)..(180): NCBI GI NO: 34912224 NR Description: P0415C01.14
  misc_feature (1)..(130): NCBI GI NO: 30692973 NR Description: expressed protein [Arabidopsis thaliana]
  misc_feature (1)..(122): NCBI GI NO: 10092447 NR Description: unknown protein; 15226-14726
  misc_feature (1)..(122): NCBI GI NO: 25334118 NR Description: F12G12.17 protein - Arabidopsis thaliana
  misc_feature (77)..(181): NCBI GI NO: 30692973 NR Description: expressed protein [Arabidopsis thaliana]
MRVVPWNHYQVVDQEPEADPVLQLDSIKNRVSRGCAASFSCFGGASAGLETPSPLKVEPVQQQHREISSPESVVVVSEKGKDQISEADNGSSKEAFKLSLRSSLKRPSVAESRSLEDIKEYETLSVDGSDLTGDMARRKVQWPDACGSELTQVREFEPSEMGLSDEEWEVGRQRTCSCVIM

SEQ ID NO: 3173 - DNA, 959 bp, Arabidopsis thaliana
  misc_feature (1)..(959): Ceres Seq. ID no. 13591405
gtaggagaagaaagttctcatttcataattgtatcaaattgtgagaggaaaaaaagaagttcaagaaatggagaaggaaggactcgggcttgagataacggagctgagattggggcttccggggagagatgtggcagagaagatgatgaagaagagagctttcacggagatgaatatgacgtcgtcgggtagtaatagtgatcaatgtgaaagcggcgtcgtttcatctggtggtgacgctgagaaggttaatgattcgccggcggcgaaaagccaggtggtggggtggccaccggtttgttcttaccggaagaaaaacagctgtaaggaagcttcgaccacgaaagtggggttagggtatgtgaaagtgagcatggatggtgtgccttatttgaggaagatggatcttggttcgagccaaggctatgatgatctagcctttgctcttgataagctcttcggtttccgtggcatcggtgtggccttgaaagatggtgacaactgcgaatacgttaccatatacgaagacaaagatggagactggatgctcgccggtgatgtaccttgggggatgtttctagagtcatgcaagaggttgagaataatgaaaagatcggatgctaccgggtttgggctgcagcctagaggagtagacgagtgatgatgacttgaacaagaagcaaggagctggttcattaatttaatcttaaacttgatcatcaagatcctttagaacatttttcctattcatgttatataaatatatatgttatagtatattattttgcaacaaaatttcatgttatggttttgcataattatcttcagaaagacagctatatatatatacactacttgtttcttgagtgttgagttaaaacattaatctgtttcaaaatttattgttatttcggatctatatatgtgtgtagaaacatatgtaataagtatccattatt

SEQ ID NO: 3174 - protein, 197 aa, Arabidopsis thaliana
  peptide (1)..(197): Ceres Seq. ID no. 13591406
  misc_feature (6)..(191): Pfam Name: Pfam Description:  AUX/IAA family
  misc_feature (1)..(197): NCBI GI NO: 15232612 NR Description: auxin-responsive protein IAA19
  misc_feature (1)..(197): NCBI GI NO: 21618019 NR Description: early auxin-induced protein IAA19
  misc_feature (53)..(197): NCBI GI NO: 2618727 NR Description: IAA19 [Arabidopsis thaliana]
  misc_feature (1)..(194): NCBI GI NO: 114733 NR Description: AUXIN-INDUCED PROTEIN AUX22
  misc_feature (1)..(191): NCBI GI NO: 15219101 NR Description: auxin-responsive protein IAA6
  misc_feature (1)..(191): NCBI GI NO: 21553490 NR Description: putative IAA6 protein [Arabidopsis thaliana]
  misc_feature (1)..(191): NCBI GI NO: 1363486 NR Description: auxin-induced protein IAA6 - Arabidopsis thaliana
  misc_feature (1)..(194): NCBI GI NO: 416640 NR Description: Auxin-induced protein 22A
  misc_feature (43)..(194): NCBI GI NO: 11131101 NR Description: Auxin-induced protein 22C
  misc_feature (46)..(194): NCBI GI NO: 1352058 NR Description: AUXIN-INDUCED PROTEIN IAA6
MEKEGLGLEITELRLGLPGRDVAEKMMKKRAFTEMNMTSSGSNSDQCESGVVSSGGDAEKVNDSPAAKSQVVGWPPVCSYRKKNSCKEASTTKVGLGYVKVSMDGVPYLRKMDLGSSQGYDDLAFALDKLFGFRGIGVALKDGDNCEYVTIYEDKDGDWMLAGDVPWGMFLESCKRLRIMKRSDATGFGLQPRGVDE

SEQ ID NO: 3175 - protein, 172 aa, Arabidopsis thaliana
  peptide (1)..(172): Ceres Seq. ID no. 13591407
  misc_feature (1)..(166): Pfam Name: Pfam Description:  AUX/IAA family
  misc_feature (1)..(172): NCBI GI NO: 15232612 NR Description: auxin-responsive protein IAA19
  misc_feature (1)..(172): NCBI GI NO: 21618019 NR Description: early auxin-induced protein IAA19
  misc_feature (28)..(172): NCBI GI NO: 2618727 NR Description: IAA19 [Arabidopsis thaliana]
  misc_feature (1)..(169): NCBI GI NO: 114733 NR Description: AUXIN-INDUCED PROTEIN AUX22
  misc_feature (1)..(166): NCBI GI NO: 15219101 NR Description: auxin-responsive protein IAA6
  misc_feature (1)..(166): NCBI GI NO: 21553490 NR Description: putative IAA6 protein [Arabidopsis thaliana]
  misc_feature (1)..(166): NCBI GI NO: 1363486 NR Description: auxin-induced protein IAA6 - Arabidopsis thaliana
  misc_feature (1)..(169): NCBI GI NO: 416640 NR Description: Auxin-induced protein 22A
  misc_feature (18)..(169): NCBI GI NO: 11131101 NR Description: Auxin-induced protein 22C
  misc_feature (21)..(169): NCBI GI NO: 1352058 NR Description: AUXIN-INDUCED PROTEIN IAA6
MMKKRAFTEMNMTSSGSNSDQCESGVVSSGGDAEKVNDSPAAKSQVVGWPPVCSYRKKNSCKEASTTKVGLGYVKVSMDGVPYLRKMDLGSSQGYDDLAFALDKLFGFRGIGVALKDGDNCEYVTIYEDKDGDWMLAGDVPWGMFLESCKRLRIMKRSDATGFGLQPRGVDE

SEQ ID NO: 3176 - protein, 171 aa, Arabidopsis thaliana
  peptide (1)..(171): Ceres Seq. ID no. 13591408
  misc_feature (1)..(165): Pfam Name: Pfam Description:  AUX/IAA family
  misc_feature (1)..(171): NCBI GI NO: 15232612 NR Description: auxin-responsive protein IAA19
  misc_feature (1)..(171): NCBI GI NO: 21618019 NR Description: early auxin-induced protein IAA19
  misc_feature (27)..(171): NCBI GI NO: 2618727 NR Description: IAA19 [Arabidopsis thaliana]
  misc_feature (1)..(168): NCBI GI NO: 114733 NR Description: AUXIN-INDUCED PROTEIN AUX22
  misc_feature (1)..(165): NCBI GI NO: 15219101 NR Description: auxin-responsive protein IAA6
  misc_feature (1)..(165): NCBI GI NO: 21553490 NR Description: putative IAA6 protein [Arabidopsis thaliana]
  misc_feature (1)..(165): NCBI GI NO: 1363486 NR Description: auxin-induced protein IAA6 - Arabidopsis thaliana
  misc_feature (1)..(168): NCBI GI NO: 416640 NR Description: Auxin-induced protein 22A
  misc_feature (17)..(168): NCBI GI NO: 11131101 NR Description: Auxin-induced protein 22C
  misc_feature (20)..(168): NCBI GI NO: 1352058 NR Description: AUXIN-INDUCED PROTEIN IAA6
MKKRAFTEMNMTSSGSNSDQCESGVVSSGGDAEKVNDSPAAKSQVVGWPPVCSYRKKNSCKEASTTKVGLGYVKVSMDGVPYLRKMDLGSSQGYDDLAFALDKLFGFRGIGVALKDGDNCEYVTIYEDKDGDWMLAGDVPWGMFLESCKRLRIMKRSDATGFGLQPRGVDE

SEQ ID NO: 3177 - DNA, 1103 bp, Arabidopsis thaliana
  misc_feature (1)..(1103): Ceres Seq. ID no. 12328785
attcgaacaattaccgacacacaaaaagtttgaagagaaaaacaaaaaatgttgtcgagattgttcaaggcaggtgaaaaggttttgtcgaatctcgttagcaagaaagacatttacatggcgtcgaggaatcaggagaaatctcccaaagtgcaagagctttacgacctctgcaaagagactttcactggcaaagctccttctcctgcttccatggctatccaaaagctatgctctgtgttggactcagttagtcctgcagatgttgggcttgaagaggtatctcaagacgatgatcgaggctatggagtttctggggttagccgtttcaatagagtaggacgatgggcacaaccgataacattcttagacattcatgaatgtgatacttttacaatgtgtattttctgcttcccaacgtcttcagtgatcccattgcatgatcatccagagatggctgtgtttagtaaaatcctctatggatcacttcatgttaaagcttacgattgggtcgaacctccatgtattatcacacaagataaaggcgtccccggttctcttccaaggttggcgaaattggtgagtgacaaagttataacgcctcagtctgagataccggcgttgtacccaaagactggaggcaatctccattgcttcactgcgttgactccatgtgctgtgctcgacattctctcacctccttacaaagaaagtgttggcaggagttgcagttactacatggactatccgttttccactttcgcattggagaacggaatgaagaaggtggatgaaggaaaggaagacgaatacgcatggcttgtacagattgacacgcccgatgatcttcacatgcgtcccggatcatatactggtccaactatcagagtctagatatttgtggtttgttttgtagcaaagtagagcaactcttgtaacattccaagataagtttctggagaagatatcaatacgatttcagattaaagatgaactctttgtttagtccatgtccacttctcagttctcacacgcattcaagcaaatgaaactgcggaaaactacaaatagatcggcaatgagaaatgttaagatttcatttc

SEQ ID NO: 3178 - protein, 281 aa, Arabidopsis thaliana
  peptide (1)..(281): Ceres Seq. ID no. 12328786
  misc_feature (1)..(281): NCBI GI NO: 18394617 NR Description: expressed protein; protein id: At1g18490
  misc_feature (1)..(281): NCBI GI NO: 25402861 NR Description: protein F15H18.4 [imported] - Arabidopsis thaliana
  misc_feature (24)..(281): NCBI GI NO: 21618020 NR Description: unknown [Arabidopsis thaliana]
  misc_feature (56)..(281): NCBI GI NO: 15451150 NR Description: Unknown protein [Arabidopsis thaliana]
  misc_feature (36)..(280): NCBI GI NO: 25370572 NR Description: hypothetical protein At2g42670
  misc_feature (36)..(280): NCBI GI NO: 21536850 NR Description: unknown [Arabidopsis thaliana]
  misc_feature (36)..(280): NCBI GI NO: 18406030 NR Description: expressed protein; protein id: At2g42670
  misc_feature (35)..(280): NCBI GI NO: 10176982 NR Description: contains similarity to unknownprotein~emb|CAB89322
  misc_feature (35)..(280): NCBI GI NO: 15242505 NR Description: putative protein; protein id: At5g39890
  misc_feature (25)..(279): NCBI GI NO: 34906308 NR Description: unnamed protein product
MLSRLFKAGEKVLSNLVSKKDIYMASRNQEKSPKVQELYDLCKETFTGKAPSPASMAIQKLCSVLDSVSPADVGLEEVSQDDDRGYGVSGVSRFNRVGRWAQPITFLDIHECDTFTMCIFCFPTSSVIPLHDHPEMAVFSKILYGSLHVKAYDWVEPPCIITQDKGVPGSLPRLAKLVSDKVITPQSEIPALYPKTGGNLHCFTALTPCAVLDILSPPYKESVGRSCSYYMDYPFSTFALENGMKKVDEGKEDEYAWLVQIDTPDDLHMRPGSYTGPTIRV

SEQ ID NO: 3179 - protein, 258 aa, Arabidopsis thaliana
  peptide (1)..(258): Ceres Seq. ID no. 12328787
  misc_feature (1)..(258): NCBI GI NO: 18394617 NR Description: expressed protein; protein id: At1g18490
  misc_feature (1)..(258): NCBI GI NO: 25402861 NR Description: protein F15H18.4 [imported] - Arabidopsis thaliana
  misc_feature (1)..(258): NCBI GI NO: 21618020 NR Description: unknown [Arabidopsis thaliana]
  misc_feature (33)..(258): NCBI GI NO: 15451150 NR Description: Unknown protein [Arabidopsis thaliana]
  misc_feature (13)..(257): NCBI GI NO: 25370572 NR Description: hypothetical protein At2g42670
  misc_feature (13)..(257): NCBI GI NO: 21536850 NR Description: unknown [Arabidopsis thaliana]
  misc_feature (13)..(257): NCBI GI NO: 18406030 NR Description: expressed protein; protein id: At2g42670
  misc_feature (12)..(257): NCBI GI NO: 10176982 NR Description: contains similarity to unknownprotein~emb|CAB89322
  misc_feature (12)..(257): NCBI GI NO: 15242505 NR Description: putative protein; protein id: At5g39890
  misc_feature (2)..(256): NCBI GI NO: 34906308 NR Description: unnamed protein product
MASRNQEKSPKVQELYDLCKETFTGKAPSPASMAIQKLCSVLDSVSPADVGLEEVSQDDDRGYGVSGVSRFNRVGRWAQPITFLDIHECDTFTMCIFCFPTSSVIPLHDHPEMAVFSKILYGSLHVKAYDWVEPPCIITQDKGVPGSLPRLAKLVSDKVITPQSEIPALYPKTGGNLHCFTALTPCAVLDILSPPYKESVGRSCSYYMDYPFSTFALENGMKKVDEGKEDEYAWLVQIDTPDDLHMRPGSYTGPTIRV

SEQ ID NO: 3180 - protein, 226 aa, Arabidopsis thaliana
  peptide (1)..(226): Ceres Seq. ID no. 12328788
  misc_feature (1)..(226): NCBI GI NO: 18394617 NR Description: expressed protein; protein id: At1g18490
  misc_feature (1)..(226): NCBI GI NO: 25402861 NR Description: protein F15H18.4 [imported] - Arabidopsis thaliana
  misc_feature (1)..(226): NCBI GI NO: 21618020 NR Description: unknown [Arabidopsis thaliana]
  misc_feature (1)..(226): NCBI GI NO: 15451150 NR Description: Unknown protein [Arabidopsis thaliana]
  misc_feature (1)..(225): NCBI GI NO: 25370572 NR Description: hypothetical protein At2g42670
  misc_feature (1)..(225): NCBI GI NO: 21536850 NR Description: unknown [Arabidopsis thaliana]
  misc_feature (1)..(225): NCBI GI NO: 18406030 NR Description: expressed protein; protein id: At2g42670
  misc_feature (1)..(225): NCBI GI NO: 10176982 NR Description: contains similarity to unknownprotein~emb|CAB89322
  misc_feature (1)..(225): NCBI GI NO: 15242505 NR Description: putative protein; protein id: At5g39890
  misc_feature (1)..(224): NCBI GI NO: 34906308 NR Description: unnamed protein product
MAIQKLCSVLDSVSPADVGLEEVSQDDDRGYGVSGVSRFNRVGRWAQPITFLDIHECDTFTMCIFCFPTSSVIPLHDHPEMAVFSKILYGSLHVKAYDWVEPPCIITQDKGVPGSLPRLAKLVSDKVITPQSEIPALYPKTGGNLHCFTALTPCAVLDILSPPYKESVGRSCSYYMDYPFSTFALENGMKKVDEGKEDEYAWLVQIDTPDDLHMRPGSYTGPTIRV

SEQ ID NO: 3181 - DNA, 1278 bp, Arabidopsis thaliana
  misc_feature (1)..(1278): Ceres Seq. ID no. 12482452
aataaaatttggtttaaaattccaaaattctctcaaatctttaatatatattttccaataacaaaagatatatatctcctcaaattttctagggaatacagtatttgtgtgtttgagacagatttttgcagattctctcgttctgcattctctgttcttcttctgatgtatccatcaatcgaagacgatgatgatcttctcgctgctctttgttttgatcaaagcaatggagtagaagatccttatggatatatgcaaacaaatgaagataacatatttcaggattttgggtcttgtggtgtgaatctgatgcagccacaacaagaacaatttgattcttttaatggaaatcttgagcaagtttgtagtagctttagaggaggaaacaatggagttgtttatagtagtagcattggatcagcacaattggatttggctgcatcgtttagtggagttttgcagcaagagacacatcaagtctgtggctttagaggacaaaacgacgattctgcagtgcctcatttgcagcagcaacaaggacaggtgtttagtggtgtagtggaaatcaattcttcgtcatctgttggagctgttaaggaagagtttgaggaagaatgttcggggaagaggagacgaactggatcatgtagcaagccaggaaccaaagcctgtcgcgagaaactaagaagggaaaagctaaatgacaagttcatggacttgagctctgttttagagcctggcaggactccaaagacggataaatcagctatactcgacgatgcaatccgggttgtgaatcagcttagaggtgaagctcatgagcttcaagaaaccaaccaaaagcttctagaagagatcaagagtctaaaggcggataaaaacgagctacgagaggaaaagctggtgttgaaggcggagaaggagaagatggagcaacagttaaaatctatggtggttccatcaccaggtttcatgccctcccagcatccagcagctttccattcccataagatggcggtggcttacccttacggctactatcctccaaacatgccaatgtggtcacccttacctcctgctgaccgtgatacgtctcgtgatctcaaaaatcttcctcctgttgcttaatcttcttcatgttgattcatcattgatcattgttatcaatcccttaggaatttttgttccttcagatgattctttaatcagtagttttgcagtaaccatttggagattagagaattttatgatttgaataaaatgtcagtttcctggtgg

SEQ ID NO: 3182 - protein, 375 aa, Arabidopsis thaliana
  peptide (1)..(375): Ceres Seq. ID no. 12482453
  misc_feature (218)..(269): Pfam Name: Pfam Description:  Helix-loop-helix DNA-binding domain
  misc_feature (56)..(375): NCBI GI NO: 22331274 NR Description: bHLH protein; protein id: At3g23210
  misc_feature (85)..(375): NCBI GI NO: 20127030 NR Description: putative bHLH transcription factor
  misc_feature (137)..(375): NCBI GI NO: 18414212 NR Description: bHLH protein; protein id: At4g14410
  misc_feature (137)..(375): NCBI GI NO: 30682847 NR Description: bHLH protein [Arabidopsis thaliana]
  misc_feature (187)..(375): NCBI GI NO: 15239706 NR Description: bHLH protein; protein id: At5g54680
  misc_feature (187)..(375): NCBI GI NO: 21592325 NR Description: bHLH transcription factor, putative
  misc_feature (203)..(375): NCBI GI NO: 15223710 NR Description: bHLH protein; protein id: At1g51070
  misc_feature (189)..(375): NCBI GI NO: 29367409 NR Description: helix-loop-helix-like protein
  misc_feature (189)..(375): NCBI GI NO: 38636768 NR Description: helix-loop-helix-like protein
  misc_feature (217)..(355): NCBI GI NO: 15230975 NR Description: bHLH protein; protein id: At3g19860
NKIWFKIPKFSQIFNIYFPITKDIYLLKFSREYSICVFETDFCRFSRSAFSVLLLMYPSIEDDDDLLAALCFDQSNGVEDPYGYMQTNEDNIFQDFGSCGVNLMQPQQEQFDSFNGNLEQVCSSFRGGNNGVVYSSSIGSAQLDLAASFSGVLQQETHQVCGFRGQNDDSAVPHLQQQQGQVFSGVVEINSSSSVGAVKEEFEEECSGKRRRTGSCSKPGTKACREKLRREKLNDKFMDLSSVLEPGRTPKTDKSAILDDAIRVVNQLRGEAHELQETNQKLLEEIKSLKADKNELREEKLVLKAEKEKMEQQLKSMVVPSPGFMPSQHPAAFHSHKMAVAYPYGYYPPNMPMWSPLPPADRDTSRDLKNLPPVA

SEQ ID NO: 3183 - protein, 320 aa, Arabidopsis thaliana
  peptide (1)..(320): Ceres Seq. ID no. 12482454
  misc_feature (163)..(214): Pfam Name: Pfam Description:  Helix-loop-helix DNA-binding domain
  misc_feature (1)..(320): NCBI GI NO: 22331274 NR Description: bHLH protein; protein id: At3g23210
  misc_feature (30)..(320): NCBI GI NO: 20127030 NR Description: putative bHLH transcription factor
  misc_feature (82)..(320): NCBI GI NO: 18414212 NR Description: bHLH protein; protein id: At4g14410
  misc_feature (82)..(320): NCBI GI NO: 30682847 NR Description: bHLH protein [Arabidopsis thaliana]
  misc_feature (132)..(320): NCBI GI NO: 15239706 NR Description: bHLH protein; protein id: At5g54680
  misc_feature (132)..(320): NCBI GI NO: 21592325 NR Description: bHLH transcription factor, putative
  misc_feature (148)..(320): NCBI GI NO: 15223710 NR Description: bHLH protein; protein id: At1g51070
  misc_feature (134)..(320): NCBI GI NO: 29367409 NR Description: helix-loop-helix-like protein
  misc_feature (134)..(320): NCBI GI NO: 38636768 NR Description: helix-loop-helix-like protein
  misc_feature (162)..(300): NCBI GI NO: 15230975 NR Description: bHLH protein; protein id: At3g19860
MYPSIEDDDDLLAALCFDQSNGVEDPYGYMQTNEDNIFQDFGSCGVNLMQPQQEQFDSFNGNLEQVCSSFRGGNNGVVYSSSIGSAQLDLAASFSGVLQQETHQVCGFRGQNDDSAVPHLQQQQGQVFSGVVEINSSSSVGAVKEEFEEECSGKRRRTGSCSKPGTKACREKLRREKLNDKFMDLSSVLEPGRTPKTDKSAILDDAIRVVNQLRGEAHELQETNQKLLEEIKSLKADKNELREEKLVLKAEKEKMEQQLKSMVVPSPGFMPSQHPAAFHSHKMAVAYPYGYYPPNMPMWSPLPPADRDTSRDLKNLPPVA

SEQ ID NO: 3184 - protein, 291 aa, Arabidopsis thaliana
  peptide (1)..(291): Ceres Seq. ID no. 12482455
  misc_feature (134)..(185): Pfam Name: Pfam Description:  Helix-loop-helix DNA-binding domain
  misc_feature (1)..(291): NCBI GI NO: 22331274 NR Description: bHLH protein; protein id: At3g23210
  misc_feature (1)..(291): NCBI GI NO: 20127030 NR Description: putative bHLH transcription factor
  misc_feature (53)..(291): NCBI GI NO: 18414212 NR Description: bHLH protein; protein id: At4g14410
  misc_feature (53)..(291): NCBI GI NO: 30682847 NR Description: bHLH protein [Arabidopsis thaliana]
  misc_feature (103)..(291): NCBI GI NO: 15239706 NR Description: bHLH protein; protein id: At5g54680
  misc_feature (103)..(291): NCBI GI NO: 21592325 NR Description: bHLH transcription factor, putative
  misc_feature (119)..(291): NCBI GI NO: 15223710 NR Description: bHLH protein; protein id: At1g51070
  misc_feature (105)..(291): NCBI GI NO: 29367409 NR Description: helix-loop-helix-like protein
  misc_feature (105)..(291): NCBI GI NO: 38636768 NR Description: helix-loop-helix-like protein
  misc_feature (133)..(271): NCBI GI NO: 15230975 NR Description: bHLH protein; protein id: At3g19860
MQTNEDNIFQDFGSCGVNLMQPQQEQFDSFNGNLEQVCSSFRGGNNGVVYSSSIGSAQLDLAASFSGVLQQETHQVCGFRGQNDDSAVPHLQQQQGQVFSGVVEINSSSSVGAVKEEFEEECSGKRRRTGSCSKPGTKACREKLRREKLNDKFMDLSSVLEPGRTPKTDKSAILDDAIRVVNQLRGEAHELQETNQKLLEEIKSLKADKNELREEKLVLKAEKEKMEQQLKSMVVPSPGFMPSQHPAAFHSHKMAVAYPYGYYPPNMPMWSPLPPADRDTSRDLKNLPPVA

SEQ ID NO: 3185 - DNA, 1273 bp, Arabidopsis thaliana
  misc_feature (1)..(1273): Ceres Seq. ID no. 12326735
cttagagccttttaaaagtaaccaacgccatgaatatcttccaagactggcctgagcctatagtccgtgtccaatccttatctgaaagcaacctcggagccataccaaatcgctacgtcaagcctctatctcagcgtccaaacataacccctcacaacaaacacaaccctcagaccaccaccatccccatcattgacttaggtcgcctatacacggacgacctaactctacaagccaaaacgcttgatgaaatctcaaaggcttgtagagaattgggatttttccaagtggtgaaccacgggatgagtcctcagctcatggaccaagctaaagcaacatggagagaattctttaatctccccatggaactcaaaaatatgcatgctaattcgccgaaaacttacgagggatatggaagccgactaggcgtagaaaagggtgctattcttgattggagcgactactattatctccattaccagccttcgtctttgaaggattacaccaagtggccttccttgcctcttcattgccgagaaatattggaggattattgcaaggaaatggtgaaactatgcgagaacttgatgaaaatcttatccaaaaacttgggattacaagaagacagacttcaaaatgcatttggtggtaaagaggaatcaggtggatgtttaagggttaattattacccaaaatgccctcaaccggagctgactctcggtatctctccgcactctgatcccggcggtttgaccattctcttgccggacgaacaagtcgccagtcttcaggtccgtggatccgacgacgcttggatcacagtcgaaccagctcctcatgctttcatcgttaacatgggtgaccaaattcagatgctgagcaattcaatatacaaaagcgtagaacacagagtgatcgtgaaccctgaaaatgagaggttgtcattggcatttttctacaacccaaagggcaatgttcctatcgagccattgaaggagctagtgaccgtagattcacctgctctctactcctccaccacatacgatcgttaccgtcaattcattcgtacgcaaggcccacgtagcaaatgtcatattgacgaacttaaatcccctcgatagtgcgtacatttgatttgttaatagtgaactatgcgttcttgttgtataaataatgaacaatgcttctttttatctgttataagtactgtaatatttattgtgtttgttatgtgagcatgtttatattatgttttaggatatgggtttgatgc

SEQ ID NO: 3186 - protein, 363 aa, Arabidopsis thaliana
  peptide (1)..(363): Ceres Seq. ID no. 12326736
  misc_feature (211)..(312): Pfam Name: II Pfam Description: 2OG-Fe
  misc_feature (1)..(363): NCBI GI NO: 15228785 NR Description: leucoanthocyanidin dioxygenase -like protein
  misc_feature (1)..(363): NCBI GI NO: 15229694 NR Description: putative leucoanthocyanidin dioxygenase
  misc_feature (1)..(363): NCBI GI NO: 15239179 NR Description: leucoanthocyanidin dioxygenase-like protein
  misc_feature (6)..(363): NCBI GI NO: 21537324 NR Description: leucoanthocyanidin dioxygenase-like protein
  misc_feature (5)..(286): NCBI GI NO: 34907994 NR Description: leucoanthocyanidin dioxygenase-like protein
  misc_feature (278)..(360): NCBI GI NO: 34907994 NR Description: leucoanthocyanidin dioxygenase-like protein
  misc_feature (7)..(359): NCBI GI NO: 15224472 NR Description: putative anthocyanidin synthase
  misc_feature (7)..(359): NCBI GI NO: 21554535 NR Description: putative anthocyanidin synthase
  misc_feature (25)..(341): NCBI GI NO: 38345872 NR Description: OSJNBa0064M23.14
  misc_feature (15)..(341): NCBI GI NO: 37536444 NR Description: unknown protein
MNIFQDWPEPIVRVQSLSESNLGAIPNRYVKPLSQRPNITPHNKHNPQTTTIPIIDLGRLYTDDLTLQAKTLDEISKACRELGFFQVVNHGMSPQLMDQAKATWREFFNLPMELKNMHANSPKTYEGYGSRLGVEKGAILDWSDYYYLHYQPSSLKDYTKWPSLPLHCREILEDYCKEMVKLCENLMKILSKNLGLQEDRLQNAFGGKEESGGCLRVNYYPKCPQPELTLGISPHSDPGGLTILLPDEQVASLQVRGSDDAWITVEPAPHAFIVNMGDQIQMLSNSIYKSVEHRVIVNPENERLSLAFFYNPKGNVPIEPLKELVTVDSPALYSSTTYDRYRQFIRTQGPRSKCHIDELKSPR

SEQ ID NO: 3187 - protein, 272 aa, Arabidopsis thaliana
  peptide (1)..(272): Ceres Seq. ID no. 12326737
  misc_feature (120)..(221): Pfam Name: II Pfam Description: 2OG-Fe
  misc_feature (1)..(272): NCBI GI NO: 15228785 NR Description: leucoanthocyanidin dioxygenase -like protein
  misc_feature (1)..(272): NCBI GI NO: 15229694 NR Description: putative leucoanthocyanidin dioxygenase
  misc_feature (1)..(272): NCBI GI NO: 15239179 NR Description: leucoanthocyanidin dioxygenase-like protein
  misc_feature (1)..(272): NCBI GI NO: 21537324 NR Description: leucoanthocyanidin dioxygenase-like protein
  misc_feature (1)..(195): NCBI GI NO: 34907994 NR Description: leucoanthocyanidin dioxygenase-like protein
  misc_feature (187)..(269): NCBI GI NO: 34907994 NR Description: leucoanthocyanidin dioxygenase-like protein
  misc_feature (1)..(268): NCBI GI NO: 15224472 NR Description: putative anthocyanidin synthase
  misc_feature (1)..(268): NCBI GI NO: 21554535 NR Description: putative anthocyanidin synthase
  misc_feature (1)..(250): NCBI GI NO: 38345872 NR Description: OSJNBa0064M23.14
  misc_feature (1)..(250): NCBI GI NO: 37536444 NR Description: unknown protein
MSPQLMDQAKATWREFFNLPMELKNMHANSPKTYEGYGSRLGVEKGAILDWSDYYYLHYQPSSLKDYTKWPSLPLHCREILEDYCKEMVKLCENLMKILSKNLGLQEDRLQNAFGGKEESGGCLRVNYYPKCPQPELTLGISPHSDPGGLTILLPDEQVASLQVRGSDDAWITVEPAPHAFIVNMGDQIQMLSNSIYKSVEHRVIVNPENERLSLAFFYNPKGNVPIEPLKELVTVDSPALYSSTTYDRYRQFIRTQGPRSKCHIDELKSPR

SEQ ID NO: 3188 - protein, 267 aa, Arabidopsis thaliana
  peptide (1)..(267): Ceres Seq. ID no. 12326738
  misc_feature (115)..(216): Pfam Name: II Pfam Description: 2OG-Fe
  misc_feature (1)..(267): NCBI GI NO: 15228785 NR Description: leucoanthocyanidin dioxygenase -like protein
  misc_feature (1)..(267): NCBI GI NO: 15229694 NR Description: putative leucoanthocyanidin dioxygenase
  misc_feature (1)..(267): NCBI GI NO: 15239179 NR Description: leucoanthocyanidin dioxygenase-like protein
  misc_feature (1)..(267): NCBI GI NO: 21537324 NR Description: leucoanthocyanidin dioxygenase-like protein
  misc_feature (1)..(190): NCBI GI NO: 34907994 NR Description: leucoanthocyanidin dioxygenase-like protein
  misc_feature (182)..(264): NCBI GI NO: 34907994 NR Description: leucoanthocyanidin dioxygenase-like protein
  misc_feature (1)..(263): NCBI GI NO: 15224472 NR Description: putative anthocyanidin synthase
  misc_feature (1)..(263): NCBI GI NO: 21554535 NR Description: putative anthocyanidin synthase
  misc_feature (1)..(245): NCBI GI NO: 38345872 NR Description: OSJNBa0064M23.14
  misc_feature (1)..(245): NCBI GI NO: 37536444 NR Description: unknown protein
MDQAKATWREFFNLPMELKNMHANSPKTYEGYGSRLGVEKGAILDWSDYYYLHYQPSSLKDYTKWPSLPLHCREILEDYCKEMVKLCENLMKILSKNLGLQEDRLQNAFGGKEESGGCLRVNYYPKCPQPELTLGISPHSDPGGLTILLPDEQVASLQVRGSDDAWITVEPAPHAFIVNMGDQIQMLSNSIYKSVEHRVIVNPENERLSLAFFYNPKGNVPIEPLKELVTVDSPALYSSTTYDRYRQFIRTQGPRSKCHIDELKSPR

SEQ ID NO: 3189 - DNA, 845 bp, Arabidopsis thaliana
  misc_feature (1)..(845): Ceres Seq. ID no. 12579572
acaccttttctccagagttccgacaagaagaagaacgccgagaacaggaagcttatcttcaaaagagccgagcaatactccaaggaatatgccgagaaggagaaggagttgatctcgttgaaacgcgaggccaagcttaagggaggtttctatgttgaccctgaagctaagctcttgttcatcatccgtatccgtggtatcaatgccattgaccctaagactaagaagattctccagctcttgcgtttgagacagattttcaatggtgttttccttaaagtcaacaaggctacgatgaacatgcttcgccgtgttgagccctatgtcacttacggattccctaacttgaagagtgtcaaggaattgatctacaagagaggttacggaaagcttaaccaccagaggatagctttgactgacaactctattgtagagcaggctcttggaaagcatggtatcatttgcactgaggatttgatccacgagattctaacagtaggacctcatttcaaggaagccaacaacttcctttggccattccagcttaaggcaccactaggtggcctcaagaagaagagaaatcactacgtggaaggtggtgatgccggaaaccgtgagaacttcatcaatgagcttatcaggaggatgaattagaatgttatcgttttcaatgtcaaacttctctgcgttttcattatgtgcctcctggattttgatcttctttctcaagttaaaagacattttgaatcttctcttttgttctctttggatcttaatttgtgctttgattactgcaagtgattctacatttctctttaataggattattaagaaactgtttcttc

SEQ ID NO: 3190 - protein, 217 aa, Arabidopsis thaliana
  peptide (1)..(217): Ceres Seq. ID no. 12579573
  misc_feature (57)..(109): Pfam Name: Pfam Description:  Ribosomal protein L30p/L7e
  misc_feature (9)..(217): NCBI GI NO: 15226212 NR Description: putative ribosomal protein L7
  misc_feature (9)..(217): NCBI GI NO: 30689617 NR Description: 60S ribosomal protein L7 (RPL7C)
  misc_feature (9)..(217): NCBI GI NO: 30689623 NR Description: 60S ribosomal protein L7 (RPL7C)
  misc_feature (9)..(217): NCBI GI NO: 27311547 NR Description: Unknown protein [Arabidopsis thaliana]
  misc_feature (9)..(217): NCBI GI NO: 15231288 NR Description: ribosomal protein, putative; protein id: At3g13580
  misc_feature (9)..(217): NCBI GI NO: 445613 NR Description: ribosomal protein L7
  misc_feature (7)..(217): NCBI GI NO: 38637548 NR Description: putative 60S ribosomal protein L7
  misc_feature (7)..(217): NCBI GI NO: 38346542 NR Description: OSJNBa0035M09.3
  misc_feature (9)..(216): NCBI GI NO: 28630259 NR Description: ribosomal protein L7 [Branchiostoma lanceolatum]
  misc_feature (7)..(217): NCBI GI NO: 307388 NR Description: ribosomal protein L7
TPFLQSSDKKKNAENRKLIFKRAEQYSKEYAEKEKELISLKREAKLKGGFYVDPEAKLLFIIRIRGINAIDPKTKKILQLLRLRQIFNGVFLKVNKATMNMLRRVEPYVTYGFPNLKSVKELIYKRGYGKLNHQRIALTDNSIVEQALGKHGIICTEDLIHEILTVGPHFKEANNFLWPFQLKAPLGGLKKKRNHYVEGGDAGNRENFINELIRRMN

SEQ ID NO: 3191 - protein, 119 aa, Arabidopsis thaliana
  peptide (1)..(119): Ceres Seq. ID no. 12579574
  misc_feature (1)..(119): NCBI GI NO: 15226212 NR Description: putative ribosomal protein L7
  misc_feature (1)..(119): NCBI GI NO: 30689617 NR Description: 60S ribosomal protein L7 (RPL7C)
  misc_feature (1)..(119): NCBI GI NO: 30689623 NR Description: 60S ribosomal protein L7 (RPL7C)
  misc_feature (1)..(119): NCBI GI NO: 27311547 NR Description: Unknown protein [Arabidopsis thaliana]
  misc_feature (1)..(119): NCBI GI NO: 15231288 NR Description: ribosomal protein, putative; protein id: At3g13580
  misc_feature (1)..(119): NCBI GI NO: 445613 NR Description: ribosomal protein L7
  misc_feature (1)..(119): NCBI GI NO: 38637548 NR Description: putative 60S ribosomal protein L7
  misc_feature (1)..(119): NCBI GI NO: 38346542 NR Description: OSJNBa0035M09.3
  misc_feature (1)..(118): NCBI GI NO: 28630259 NR Description: ribosomal protein L7 [Branchiostoma lanceolatum]
  misc_feature (1)..(119): NCBI GI NO: 307388 NR Description: ribosomal protein L7
MNMLRRVEPYVTYGFPNLKSVKELIYKRGYGKLNHQRIALTDNSIVEQALGKHGIICTEDLIHEILTVGPHFKEANNFLWPFQLKAPLGGLKKKRNHYVEGGDAGNRENFINELIRRMN

SEQ ID NO: 3192 - protein, 117 aa, Arabidopsis thaliana
  peptide (1)..(117): Ceres Seq. ID no. 12579575
  misc_feature (1)..(117): NCBI GI NO: 15226212 NR Description: putative ribosomal protein L7
  misc_feature (1)..(117): NCBI GI NO: 30689617 NR Description: 60S ribosomal protein L7 (RPL7C)
  misc_feature (1)..(117): NCBI GI NO: 30689623 NR Description: 60S ribosomal protein L7 (RPL7C)
  misc_feature (1)..(117): NCBI GI NO: 27311547 NR Description: Unknown protein [Arabidopsis thaliana]
  misc_feature (1)..(117): NCBI GI NO: 15231288 NR Description: ribosomal protein, putative; protein id: At3g13580
  misc_feature (1)..(117): NCBI GI NO: 445613 NR Description: ribosomal protein L7
  misc_feature (1)..(117): NCBI GI NO: 38637548 NR Description: putative 60S ribosomal protein L7
  misc_feature (1)..(117): NCBI GI NO: 38346542 NR Description: OSJNBa0035M09.3
  misc_feature (1)..(116): NCBI GI NO: 28630259 NR Description: ribosomal protein L7 [Branchiostoma lanceolatum]
  misc_feature (1)..(117): NCBI GI NO: 307388 NR Description: ribosomal protein L7
MLRRVEPYVTYGFPNLKSVKELIYKRGYGKLNHQRIALTDNSIVEQALGKHGIICTEDLIHEILTVGPHFKEANNFLWPFQLKAPLGGLKKKRNHYVEGGDAGNRENFINELIRRMN

SEQ ID NO: 3193 - DNA, 836 bp, Arabidopsis thaliana
  misc_feature (1)..(836): Ceres Seq. ID no. 12562066
aaaatcagcctcttcgttttctttctcctcctgtctgttgatttaaagacccaaatctgacgcttctctctctctttctggtatctgcgtttgattcggagaagaaaaaaaaaaaaaaggcaaagagagagcttcaatggagttagcttctttccttggtagagctctgtttgtttccgtatttcttctctccgcatggcaagagttcaatgattttggtgaagatggtggccgatcagctaaatctttgaaaccaaaattcaatgcctttgtaaaccatgtgacaactcacactggccagcaattgccaccagtcgatatgaagattcttgttgctgctgctatagccttgaagggtattgggggactattgtttgtctttggcagctcattgggagcttatctcttgcttctgcatcaagccgttgccaccccaattctgtatgatttctacaactacgatgttgacagaaaggaattcggccaactattttcaaaatttacacagagcttggctcttcttggaggactgctcttcttcattggaatgaaaaactcaaggaaacacggtaggcaactcaggaaaaaggctccaaaggcaaaagcaaactgaagaagccatatctttcatcggttttattcggtctgtattttattttcattttggaatccaggatgggtttaaagagtctatctgatgaggccattgaaaggcaaaatctctgcaaatcattttgcttacttcaagaagcttttatgacacttttttgtagaaatatttatggattattgtttcttagagacaccacttcaatgttaatgttccaacttatttc

SEQ ID NO: 3194 - protein, 158 aa, Arabidopsis thaliana
  peptide (1)..(158): Ceres Seq. ID no. 12562067
  misc_feature (1)..(138): Pfam Name: Pfam Description:  HR-like lesion-inducing
  misc_feature (1)..(158): NCBI GI NO: 15236497 NR Description: elicitor like protein; protein id: At4g14420
  misc_feature (1)..(158): NCBI GI NO: 7489144 NR Description: hypothetical protein (clone NF22) - common tobacco
  misc_feature (1)..(158): NCBI GI NO: 27261473 NR Description: Unknown protein
  misc_feature (1)..(128): NCBI GI NO: 7489143 NR Description: hypothetical protein (clone ND1) - common tobacco
  misc_feature (1)..(158): NCBI GI NO: 38346190 NR Description: OSJNBa0027O01.6
  misc_feature (1)..(157): NCBI GI NO: 15219714 NR Description: unknown protein; protein id: At1g04340
  misc_feature (1)..(157): NCBI GI NO: 21592798 NR Description: Nicotiana lesion-inducing like
  misc_feature (24)..(157): NCBI GI NO: 37534824 NR Description: putative RNA-binding protein
  misc_feature (1)..(157): NCBI GI NO: 15239873 NR Description: Nicotiana lesion-inducing like
  misc_feature (1)..(156): NCBI GI NO: 40287494 NR Description: putative lesion-inducing protein [Capsicum annuum]
MELASFLGRALFVSVFLLSAWQEFNDFGEDGGRSAKSLKPKFNAFVNHVTTHTGQQLPPVDMKILVAAAIALKGIGGLLFVFGSSLGAYLLLLHQAVATPILYDFYNYDVDRKEFGQLFSKFTQSLALLGGLLFFIGMKNSRKHGRQLRKKAPKAKAN

SEQ ID NO: 3195 - protein, 97 aa, Arabidopsis thaliana
  peptide (1)..(97): Ceres Seq. ID no. 12562068
  misc_feature (1)..(77): Pfam Name: Pfam Description:  HR-like lesion-inducing
  misc_feature (1)..(97): NCBI GI NO: 15236497 NR Description: elicitor like protein; protein id: At4g14420
  misc_feature (1)..(97): NCBI GI NO: 7489144 NR Description: hypothetical protein (clone NF22) - common tobacco
  misc_feature (1)..(97): NCBI GI NO: 27261473 NR Description: Unknown protein
  misc_feature (1)..(67): NCBI GI NO: 7489143 NR Description: hypothetical protein (clone ND1) - common tobacco
  misc_feature (1)..(97): NCBI GI NO: 38346190 NR Description: OSJNBa0027O01.6
  misc_feature (1)..(96): NCBI GI NO: 15219714 NR Description: unknown protein; protein id: At1g04340
  misc_feature (1)..(96): NCBI GI NO: 21592798 NR Description: Nicotiana lesion-inducing like
  misc_feature (1)..(96): NCBI GI NO: 37534824 NR Description: putative RNA-binding protein
  misc_feature (1)..(96): NCBI GI NO: 15239873 NR Description: Nicotiana lesion-inducing like
  misc_feature (1)..(95): NCBI GI NO: 40287494 NR Description: putative lesion-inducing protein [Capsicum annuum]
MKILVAAAIALKGIGGLLFVFGSSLGAYLLLLHQAVATPILYDFYNYDVDRKEFGQLFSKFTQSLALLGGLLFFIGMKNSRKHGRQLRKKAPKAKAN

SEQ ID NO: 3196 - DNA, 2318 bp, Arabidopsis thaliana
  misc_feature (1)..(2318): Ceres Seq. ID no. 12328608
attttttggcttcaatttttgcgttttctctgcaactcgccgtcaagggtagaagaattaggggttcctgttcttaactgcttgaagatgacgtcttatggagatagactgaagtcgacctccattaatggagttaagttatacaatgtttcttctgctcccaatgttcctacttggcttaatcctaagaagcaacgagctctccgcaaaaaccctcattatatgcaaagagtggagctgattcaggagttgaagtttgagactgccactactagaatcaaagcgactccagacggagagtatctgattgcttcaggcatatatccaccacaggtaaaagtttatgagctaaatcagcttgctttgaagtttgagaggcatttggactcggaaatagttgatttcgagatattggatgatgacttctcaaagcttgccttcttatgtgctgatcgttctattaatttacacgccaaatacgggaaacaccacactttacgaattccaaggatggggagagatatgacatatgattcctggtcttgtgatcttctttgcgctgcttcctcacctgatctatatagaatcaatttggagcagggaagatttctttctcctctcagcactcaatccccagcgcttaatgtcgtttctcgaagcaacctccatggattagttgcttgtggtggtgaggatggtgctgtggaattttttgatatgagaatgaaatcatctgctgctagaattaacgcggtcacacatggtggtgatgctgctgcggaggttactgctatagagtttgatgacagtgaaggtcttcaagtagctgtcgggagtagcgcgggaaaggtattcatatacgacttgcgtacttcaactcccataagagtgaaggatcacatgtacgagagcccaattttgaatattaagtggcaacggactcttaatactcaacaacctaagttgattactaccgacaaacacattgttagaatatgggatccaaacacgggagaaggtatgaccagcattgaaccgactcaaggaggaataaacgacatttgtgtgttccgtggaagcggacttatgcttcttgctttagactctagcctaatcccatcttacttcatacctgaactcggtcctgcccccaaatggtgttctcctcttgaaaatctaacggaagagttggaggaaagtgcacagacaactatttatgataattacaaatttttggcaatggaagatctggagaagttgcagctaactcatttgattggaacagatcttttgaaagcatctatgcatggatattttattaattaccatttgtacaaaaaggctttagcagtgattgaaccttttgcatttgatgattacttagaacgtaggaagcaagagaagttagaagagcagcgtacgcagagaatcacaaaaaagagacggttgccaaaggttaaccgagaccttgcagcaaggcttcatggggacgaatcagaggaggaaaataaaactgccgaggatggggaggccaccaagaaagtgctgaaaaagaagaaacccatacttactgacgagcatttcgtagatggtcggtttggttcgatgttccaaaatccggacttccaaattgataaggactcatatgaatatggtgtcctacaccctgttgcttcttcgaagaagcaaccttctctgttagatgaacactttgaagctgtatcagatgatgacgagaacagtgattctgatgcatcacagccttcagatgacgaggccgacgatggagacgcaactaggccaagcaagaaagcgagaactccgaagttgtatgaagtgaaagatgagcggcatgccgcagcttatcacaaccgcacttcactggctaaagaagatagtcttcctatgggcgagcgtgtcaaggctatagagaaccggcgtggcaactttggaggctcgaaagatatcaaattcggtcctggaggatcacgggagttttctttcaaggcgagagggtcatcaaagtacaaagaagatagagacgatgagtatgaagatgggcaaagaaacaagaggagaggagttcagtctcttggactgaaatcaacaaatattagaggcggtttcagaggtagaggaggtggtggttttagagggagaggaggcggcggttcccggggaaaaggtggccgtggtggtgggcgtggaagaggccggcaatgataaatgtagcttttcaggggctttattagatttgaaaaatgtgtcacctactattgagaatcttgaaacttaattgatcacatatacaattttgg

SEQ ID NO: 3197 - protein, 740 aa, Arabidopsis thaliana
  peptide (1)..(740): Ceres Seq. ID no. 12328609
  misc_feature (37)..(617): NCBI GI NO: 33416707 NR Description: Unknown (protein for MGC:69094) [Xenopus laevis]
  misc_feature (37)..(698): NCBI GI NO: 38049298 NR Description: similar to FLJ14075 protein [Mus musculus]
  misc_feature (37)..(707): NCBI GI NO: 13477303 NR Description: Similar to hypothetical protein FLJ14075
  misc_feature (37)..(597): NCBI GI NO: 28502998 NR Description: Similar to hypothetical protein FLJ14075
  misc_feature (715)..(740): NCBI GI NO: 28502998 NR Description: Similar to hypothetical protein FLJ14075
  misc_feature (706)..(738): NCBI GI NO: 28502998 NR Description: Similar to hypothetical protein FLJ14075
  misc_feature (37)..(502): NCBI GI NO: 27694778 NR Description: Similar to hypothetical protein FLJ14075
  misc_feature (37)..(609): NCBI GI NO: 19075209 NR Description: conserved hypothetical protein.
  misc_feature (37)..(646): NCBI GI NO: 17540118 NR Description: Putative nuclear protein
  misc_feature (37)..(706): NCBI GI NO: 6321584 NR Description: Essential Nucleolar Protein 2; Enp2p
IFWLQFLRFLCNSPSRVEELGVPVLNCLKMTSYGDRLKSTSINGVKLYNVSSAPNVPTWLNPKKQRALRKNPHYMQRVELIQELKFETATTRIKATPDGEYLIASGIYPPQVKVYELNQLALKFERHLDSEIVDFEILDDDFSKLAFLCADRSINLHAKYGKHHTLRIPRMGRDMTYDSWSCDLLCAASSPDLYRINLEQGRFLSPLSTQSPALNVVSRSNLHGLVACGGEDGAVEFFDMRMKSSAARINAVTHGGDAAAEVTAIEFDDSEGLQVAVGSSAGKVFIYDLRTSTPIRVKDHMYESPILNIKWQRTLNTQQPKLITTDKHIVRIWDPNTGEGMTSIEPTQGGINDICVFRGSGLMLLALDSSLIPSYFIPELGPAPKWCSPLENLTEELEESAQTTIYDNYKFLAMEDLEKLQLTHLIGTDLLKASMHGYFINYHLYKKALAVIEPFAFDDYLERRKQEKLEEQRTQRITKKRRLPKVNRDLAARLHGDESEEENKTAEDGEATKKVLKKKKPILTDEHFVDGRFGSMFQNPDFQIDKDSYEYGVLHPVASSKKQPSLLDEHFEAVSDDDENSDSDASQPSDDEADDGDATRPSKKARTPKLYEVKDERHAAAYHNRTSLAKEDSLPMGERVKAIENRRGNFGGSKDIKFGPGGSREFSFKARGSSKYKEDRDDEYEDGQRNKRRGVQSLGLKSTNIRGGFRGRGGGGFRGRGGGGSRGKGGRGGGRGRGRQ

SEQ ID NO: 3198 - protein, 711 aa, Arabidopsis thaliana
  peptide (1)..(711): Ceres Seq. ID no. 12328610
  misc_feature (8)..(588): NCBI GI NO: 33416707 NR Description: Unknown (protein for MGC:69094) [Xenopus laevis]
  misc_feature (8)..(669): NCBI GI NO: 38049298 NR Description: similar to FLJ14075 protein [Mus musculus]
  misc_feature (8)..(678): NCBI GI NO: 13477303 NR Description: Similar to hypothetical protein FLJ14075
  misc_feature (8)..(568): NCBI GI NO: 28502998 NR Description: Similar to hypothetical protein FLJ14075
  misc_feature (686)..(711): NCBI GI NO: 28502998 NR Description: Similar to hypothetical protein FLJ14075
  misc_feature (677)..(709): NCBI GI NO: 28502998 NR Description: Similar to hypothetical protein FLJ14075
  misc_feature (8)..(473): NCBI GI NO: 27694778 NR Description: Similar to hypothetical protein FLJ14075
  misc_feature (8)..(580): NCBI GI NO: 19075209 NR Description: conserved hypothetical protein.
  misc_feature (8)..(617): NCBI GI NO: 17540118 NR Description: Putative nuclear protein
  misc_feature (8)..(677): NCBI GI NO: 6321584 NR Description: Essential Nucleolar Protein 2; Enp2p
MTSYGDRLKSTSINGVKLYNVSSAPNVPTWLNPKKQRALRKNPHYMQRVELIQELKFETATTRIKATPDGEYLIASGIYPPQVKVYELNQLALKFERHLDSEIVDFEILDDDFSKLAFLCADRSINLHAKYGKHHTLRIPRMGRDMTYDSWSCDLLCAASSPDLYRINLEQGRFLSPLSTQSPALNVVSRSNLHGLVACGGEDGAVEFFDMRMKSSAARINAVTHGGDAAAEVTAIEFDDSEGLQVAVGSSAGKVFIYDLRTSTPIRVKDHMYESPILNIKWQRTLNTQQPKLITTDKHIVRIWDPNTGEGMTSIEPTQGGINDICVFRGSGLMLLALDSSLIPSYFIPELGPAPKWCSPLENLTEELEESAQTTIYDNYKFLAMEDLEKLQLTHLIGTDLLKASMHGYFINYHLYKKALAVIEPFAFDDYLERRKQEKLEEQRTQRITKKRRLPKVNRDLAARLHGDESEEENKTAEDGEATKKVLKKKKPILTDEHFVDGRFGSMFQNPDFQIDKDSYEYGVLHPVASSKKQPSLLDEHFEAVSDDDENSDSDASQPSDDEADDGDATRPSKKARTPKLYEVKDERHAAAYHNRTSLAKEDSLPMGERVKAIENRRGNFGGSKDIKFGPGGSREFSFKARGSSKYKEDRDDEYEDGQRNKRRGVQSLGLKSTNIRGGFRGRGGGGFRGRGGGGSRGKGGRGGGRGRGRQ

SEQ ID NO: 3199 - protein, 666 aa, Arabidopsis thaliana
  peptide (1)..(666): Ceres Seq. ID no. 12328611
  misc_feature (1)..(543): NCBI GI NO: 33416707 NR Description: Unknown (protein for MGC:69094) [Xenopus laevis]
  misc_feature (1)..(624): NCBI GI NO: 38049298 NR Description: similar to FLJ14075 protein [Mus musculus]
  misc_feature (1)..(633): NCBI GI NO: 13477303 NR Description: Similar to hypothetical protein FLJ14075
  misc_feature (1)..(523): NCBI GI NO: 28502998 NR Description: Similar to hypothetical protein FLJ14075
  misc_feature (641)..(666): NCBI GI NO: 28502998 NR Description: Similar to hypothetical protein FLJ14075
  misc_feature (632)..(664): NCBI GI NO: 28502998 NR Description: Similar to hypothetical protein FLJ14075
  misc_feature (1)..(428): NCBI GI NO: 27694778 NR Description: Similar to hypothetical protein FLJ14075
  misc_feature (1)..(535): NCBI GI NO: 19075209 NR Description: conserved hypothetical protein.
  misc_feature (1)..(572): NCBI GI NO: 17540118 NR Description: Putative nuclear protein
  misc_feature (1)..(632): NCBI GI NO: 6321584 NR Description: Essential Nucleolar Protein 2; Enp2p
MQRVELIQELKFETATTRIKATPDGEYLIASGIYPPQVKVYELNQLALKFERHLDSEIVDFEILDDDFSKLAFLCADRSINLHAKYGKHHTLRIPRMGRDMTYDSWSCDLLCAASSPDLYRINLEQGRFLSPLSTQSPALNVVSRSNLHGLVACGGEDGAVEFFDMRMKSSAARINAVTHGGDAAAEVTAIEFDDSEGLQVAVGSSAGKVFIYDLRTSTPIRVKDHMYESPILNIKWQRTLNTQQPKLITTDKHIVRIWDPNTGEGMTSIEPTQGGINDICVFRGSGLMLLALDSSLIPSYFIPELGPAPKWCSPLENLTEELEESAQTTIYDNYKFLAMEDLEKLQLTHLIGTDLLKASMHGYFINYHLYKKALAVIEPFAFDDYLERRKQEKLEEQRTQRITKKRRLPKVNRDLAARLHGDESEEENKTAEDGEATKKVLKKKKPILTDEHFVDGRFGSMFQNPDFQIDKDSYEYGVLHPVASSKKQPSLLDEHFEAVSDDDENSDSDASQPSDDEADDGDATRPSKKARTPKLYEVKDERHAAAYHNRTSLAKEDSLPMGERVKAIENRRGNFGGSKDIKFGPGGSREFSFKARGSSKYKEDRDDEYEDGQRNKRRGVQSLGLKSTNIRGGFRGRGGGGFRGRGGGGSRGKGGRGGGRGRGRQ

SEQ ID NO: 3200 - DNA, 1521 bp, Arabidopsis thaliana
  misc_feature (1)..(1521): Ceres Seq. ID no. 13494689
gagtttttcattcatctatcggttgtttccattctcaggtttcagtcgaaaattccctctctttcttttcgatttgatctgggtttcattgtacatagctcgatcttcaagtttcgtcatctgggtcttgtaaagttttagacttttagggttgttttacttgtgaagtttctctcttttctaatggattctctgggtaattgatcgattagggtttaagattttagcggtggggaaagctgtttggttctagaattctatcttgattaacgtcacttgcagctttctcacaggttttggaattgtactaggttttgattgataatcatagattggtagtgatttgggagtttcttgattgtgtaatcatggcggaggctattggtgctgtatctttggtgggtcatcgaccttcaattgtgaggattacagtgaagaatgaattgaaaacgcagaaatcacagagcattgttcgctttccggtgaaggtagattatagtgcgaaaggtgttctctctcatttgatgacgcagagtgtgaaaaagaatcgaatgtcggtgtttccgatcagggctcttgctatggaattgacgaaagagaagaagaaagacgatcggttaccgaaaacttggaattatcttgattctggtgctgatgataagcctagtttatggcctcctgagaacaaagctgataagccttcattgcataatcctttacttaggcaagagcggatgggttgtggttggttaggtgctatatttgagtgggaaggagtattgattgaagacaatcctgacttggataaccaatcatggcttactttagctcaagaagaagggaaatctcctcctccggcttttatgctcagacgtgtcgaagggatgaagaacgagcaggccatatctgaggttctgtgttggtcgagagatcctgttcaagtgagaaggatggctaagcgtaaagaagagatctttaaagctctacatggaggagtgtatagactaagagatgggtcgcaggaatttgtcaatgtcttgatgaataataagatccctatggctttggtatcgactcgtcctcgggaaacattggagaatgcagttggatcgataggtatcagaaagttcttcagtgtgatagttgcatcggaagatgtttacagaggtaaaccagatcctgagatgttcatttacgcagcacagcttcttgatttcataccggaacgttgcattgtatttggaaactcaaaccagaccatagaggcagctcacgatgggaggatgaaatgtgtggctgtggcgagtaaacacccgatttatgagcttggtgcagctgagctggtggtaagaagactagacgagttatcgattatcgatttgaagaaacttgctgataccgatttgacagagttcgaaccggaattggagatggaaaaggaagatgagcgtgagctgccttcatcggctgtagcagttgatgatttctgatggaagtgatcttctgtaatgttgtacagtt

SEQ ID NO: 3201 - protein, 373 aa, Arabidopsis thaliana
  peptide (1)..(373): Ceres Seq. ID no. 13494690
  misc_feature (127)..(314): Pfam Name: Pfam Description:  haloacid dehalogenase-like hydrolase
  misc_feature (1)..(373): NCBI GI NO: 15234236 NR Description: haloacid dehalogenase-like hydrolase family
  misc_feature (101)..(356): NCBI GI NO: 10444400 NR Description: genetic modifier [Zea mays]
  misc_feature (101)..(356): NCBI GI NO: 18542168 NR Description: putative genetic modifier [Zea mays]
  misc_feature (43)..(346): NCBI GI NO: 38345597 NR Description: OSJNBb0012E24.15
  misc_feature (129)..(371): NCBI GI NO: 18399067 NR Description: haloacid dehalogenase-like hydrolase family
  misc_feature (129)..(371): NCBI GI NO: 21592870 NR Description: unknown [Arabidopsis thaliana]
  misc_feature (129)..(371): NCBI GI NO: 14532506 NR Description: AT3g10970/F9F8_21 [Arabidopsis thaliana]
  misc_feature (176)..(371): NCBI GI NO: 6016697 NR Description: unknown protein [Arabidopsis thaliana]
  misc_feature (128)..(332): NCBI GI NO: 37521914 NR Description: hypothetical protein glr2345
  misc_feature (131)..(331): NCBI GI NO: 21672855 NR Description: hydrolase, haloacid dehalogenase-like family
MAEAIGAVSLVGHRPSIVRITVKNELKTQKSQSIVRFPVKVDYSAKGVLSHLMTQSVKKNRMSVFPIRALAMELTKEKKKDDRLPKTWNYLDSGADDKPSLWPPENKADKPSLHNPLLRQERMGCGWLGAIFEWEGVLIEDNPDLDNQSWLTLAQEEGKSPPPAFMLRRVEGMKNEQAISEVLCWSRDPVQVRRMAKRKEEIFKALHGGVYRLRDGSQEFVNVLMNNKIPMALVSTRPRETLENAVGSIGIRKFFSVIVASEDVYRGKPDPEMFIYAAQLLDFIPERCIVFGNSNQTIEAAHDGRMKCVAVASKHPIYELGAAELVVRRLDELSIIDLKKLADTDLTEFEPELEMEKEDERELPSSAVAVDDF

SEQ ID NO: 3202 - protein, 321 aa, Arabidopsis thaliana
  peptide (1)..(321): Ceres Seq. ID no. 13494691
  misc_feature (75)..(262): Pfam Name: Pfam Description:  haloacid dehalogenase-like hydrolase
  misc_feature (1)..(321): NCBI GI NO: 15234236 NR Description: haloacid dehalogenase-like hydrolase family
  misc_feature (49)..(304): NCBI GI NO: 10444400 NR Description: genetic modifier [Zea mays]
  misc_feature (49)..(304): NCBI GI NO: 18542168 NR Description: putative genetic modifier [Zea mays]
  misc_feature (1)..(294): NCBI GI NO: 38345597 NR Description: OSJNBb0012E24.15
  misc_feature (77)..(319): NCBI GI NO: 18399067 NR Description: haloacid dehalogenase-like hydrolase family
  misc_feature (77)..(319): NCBI GI NO: 21592870 NR Description: unknown [Arabidopsis thaliana]
  misc_feature (77)..(319): NCBI GI NO: 14532506 NR Description: AT3g10970/F9F8_21 [Arabidopsis thaliana]
  misc_feature (124)..(319): NCBI GI NO: 6016697 NR Description: unknown protein [Arabidopsis thaliana]
  misc_feature (76)..(280): NCBI GI NO: 37521914 NR Description: hypothetical protein glr2345
  misc_feature (79)..(279): NCBI GI NO: 21672855 NR Description: hydrolase, haloacid dehalogenase-like family
MTQSVKKNRMSVFPIRALAMELTKEKKKDDRLPKTWNYLDSGADDKPSLWPPENKADKPSLHNPLLRQERMGCGWLGAIFEWEGVLIEDNPDLDNQSWLTLAQEEGKSPPPAFMLRRVEGMKNEQAISEVLCWSRDPVQVRRMAKRKEEIFKALHGGVYRLRDGSQEFVNVLMNNKIPMALVSTRPRETLENAVGSIGIRKFFSVIVASEDVYRGKPDPEMFIYAAQLLDFIPERCIVFGNSNQTIEAAHDGRMKCVAVASKHPIYELGAAELVVRRLDELSIIDLKKLADTDLTEFEPELEMEKEDERELPSSAVAVDDF

SEQ ID NO: 3203 - protein, 312 aa, Arabidopsis thaliana
  peptide (1)..(312): Ceres Seq. ID no. 13494692
  misc_feature (66)..(253): Pfam Name: Pfam Description:  haloacid dehalogenase-like hydrolase
  misc_feature (1)..(312): NCBI GI NO: 15234236 NR Description: haloacid dehalogenase-like hydrolase family
  misc_feature (40)..(295): NCBI GI NO: 10444400 NR Description: genetic modifier [Zea mays]
  misc_feature (40)..(295): NCBI GI NO: 18542168 NR Description: putative genetic modifier [Zea mays]
  misc_feature (1)..(285): NCBI GI NO: 38345597 NR Description: OSJNBb0012E24.15
  misc_feature (68)..(310): NCBI GI NO: 18399067 NR Description: haloacid dehalogenase-like hydrolase family
  misc_feature (68)..(310): NCBI GI NO: 21592870 NR Description: unknown [Arabidopsis thaliana]
  misc_feature (68)..(310): NCBI GI NO: 14532506 NR Description: AT3g10970/F9F8_21 [Arabidopsis thaliana]
  misc_feature (115)..(310): NCBI GI NO: 6016697 NR Description: unknown protein [Arabidopsis thaliana]
  misc_feature (67)..(271): NCBI GI NO: 37521914 NR Description: hypothetical protein glr2345
  misc_feature (70)..(270): NCBI GI NO: 21672855 NR Description: hydrolase, haloacid dehalogenase-like family
MSVFPIRALAMELTKEKKKDDRLPKTWNYLDSGADDKPSLWPPENKADKPSLHNPLLRQERMGCGWLGAIFEWEGVLIEDNPDLDNQSWLTLAQEEGKSPPPAFMLRRVEGMKNEQAISEVLCWSRDPVQVRRMAKRKEEIFKALHGGVYRLRDGSQEFVNVLMNNKIPMALVSTRPRETLENAVGSIGIRKFFSVIVASEDVYRGKPDPEMFIYAAQLLDFIPERCIVFGNSNQTIEAAHDGRMKCVAVASKHPIYELGAAELVVRRLDELSIIDLKKLADTDLTEFEPELEMEKEDERELPSSAVAVDDF

SEQ ID NO: 3204 - DNA, 1127 bp, Arabidopsis thaliana
  misc_feature (1)..(1127): Ceres Seq. ID no. 13488517
atattttcattgattttgcatattaatgcatatgttttcataaaaaaagaaaaacgagtgtaaagttattgatagtttctgttacttattaatttttaaggttatgtgtattattaccaattggaggactatatagtcgcaagtctcaaccctataaaagaaaacattcttcgatcatcttcccgcctcgagtatctctctctctctctctcttctctgttttctttattgattgcatagacaaaaatacacacatacacaacagaaagaaagatggagacgacgatgaagaagaaagggagagtgaaagcgacaataacgtcacagaaagaagaagaaggaacagtgagaaaaggaccatggactatggaagaagatttcatcctctttaattacatccttaatcatggtgaaggtctttggaactctgtcgccaaagcctctggtctaaaacgtactggaaaaagttgtcggctccggtggctgaactatctccgaccagatgtgcggcgagggaacataaccgaagaagaacagcttttgatcattcagcttcatgctaagcttggaaacaggtggtcgaagattgcgaagcatcttccgggaagaacggacaacgagataaagaacttctggaggacaaagattcagagacacatgaaagtgtcatcggaaaatatgatgaatcatcaacatcattgttcgggaaactcacagagctcggggatgacgacgcaaggcagctccggcaaagccatagacacggctgagagcttctctcaggcgaagacgacgacgtttaatgtggtggaacaacagtcaaacgagaattactggaacgttgaagatctgtggcccgtccacttgcttaatggtgaccaccatgtgatttaagatatatatatagacctcctatacatttatatgccccagctgggtttttttgtatggtacgttatttggtttttctattgctgaaatgtcgttgcatttaatttacatacgaaaagtgcattaaatcattaaatcttcaatacatatggaggtggtgtttgagtaacttctggtcgttaaagcatatatactactgtactctttttttttctttcaaattgttgttgtttttg

SEQ ID NO: 3205 - protein, 206 aa, Arabidopsis thaliana
  peptide (1)..(206): Ceres Seq. ID no. 13488518
  misc_feature (27)..(74): Pfam Name: Pfam Description:  Myb-like DNA-binding domain
  misc_feature (1)..(206): NCBI GI NO: 15232137 NR Description: myb family transcription factor
  misc_feature (1)..(206): NCBI GI NO: 21618026 NR Description: putative transcription factor
  misc_feature (89)..(206): NCBI GI NO: 11358545 NR Description: myb-related transcription factor MYB57
  misc_feature (25)..(202): NCBI GI NO: 82306 NR Description: myb-related protein 305 - garden snapdragon
  misc_feature (17)..(202): NCBI GI NO: 40643882 NR Description: MYB8 protein [Gerbera hybrid cv. 'Terra Regina']
  misc_feature (25)..(200): NCBI GI NO: 82311 NR Description: myb-related protein 340 - garden snapdragon
  misc_feature (12)..(204): NCBI GI NO: 7438338 NR Description: Myb26 protein - garden pea
  misc_feature (5)..(174): NCBI GI NO: 30688935 NR Description: myb family transcription factor (ATMYB3)
  misc_feature (22)..(187): NCBI GI NO: 15242669 NR Description: myb family transcription factor
  misc_feature (22)..(187): NCBI GI NO: 21554734 NR Description: putative transcription factor MYB24
METTMKKKGRVKATITSQKEEEGTVRKGPWTMEEDFILFNYILNHGEGLWNSVAKASGLKRTGKSCRLRWLNYLRPDVRRGNITEEEQLLIIQLHAKLGNRWSKIAKHLPGRTDNEIKNFWRTKIQRHMKVSSENMMNHQHHCSGNSQSSGMTTQGSSGKAIDTAESFSQAKTTTFNVVEQQSNENYWNVEDLWPVHLLNGDHHVI

SEQ ID NO: 3206 - protein, 202 aa, Arabidopsis thaliana
  peptide (1)..(202): Ceres Seq. ID no. 13488519
  misc_feature (23)..(70): Pfam Name: Pfam Description:  Myb-like DNA-binding domain
  misc_feature (1)..(202): NCBI GI NO: 15232137 NR Description: myb family transcription factor
  misc_feature (1)..(202): NCBI GI NO: 21618026 NR Description: putative transcription factor
  misc_feature (85)..(202): NCBI GI NO: 11358545 NR Description: myb-related transcription factor MYB57
  misc_feature (21)..(198): NCBI GI NO: 82306 NR Description: myb-related protein 305 - garden snapdragon
  misc_feature (13)..(198): NCBI GI NO: 40643882 NR Description: MYB8 protein [Gerbera hybrid cv. 'Terra Regina']
  misc_feature (21)..(196): NCBI GI NO: 82311 NR Description: myb-related protein 340 - garden snapdragon
  misc_feature (8)..(200): NCBI GI NO: 7438338 NR Description: Myb26 protein - garden pea
  misc_feature (1)..(170): NCBI GI NO: 30688935 NR Description: myb family transcription factor (ATMYB3)
  misc_feature (18)..(183): NCBI GI NO: 15242669 NR Description: myb family transcription factor
  misc_feature (18)..(183): NCBI GI NO: 21554734 NR Description: putative transcription factor MYB24
MKKKGRVKATITSQKEEEGTVRKGPWTMEEDFILFNYILNHGEGLWNSVAKASGLKRTGKSCRLRWLNYLRPDVRRGNITEEEQLLIIQLHAKLGNRWSKIAKHLPGRTDNEIKNFWRTKIQRHMKVSSENMMNHQHHCSGNSQSSGMTTQGSSGKAIDTAESFSQAKTTTFNVVEQQSNENYWNVEDLWPVHLLNGDHHVI

SEQ ID NO: 3207 - protein, 175 aa, Arabidopsis thaliana
  peptide (1)..(175): Ceres Seq. ID no. 13488520
  misc_feature (1)..(43): Pfam Name: Pfam Description:  Myb-like DNA-binding domain
  misc_feature (1)..(175): NCBI GI NO: 15232137 NR Description: myb family transcription factor
  misc_feature (1)..(175): NCBI GI NO: 21618026 NR Description: putative transcription factor
  misc_feature (58)..(175): NCBI GI NO: 11358545 NR Description: myb-related transcription factor MYB57
  misc_feature (1)..(171): NCBI GI NO: 82306 NR Description: myb-related protein 305 - garden snapdragon
  misc_feature (1)..(171): NCBI GI NO: 40643882 NR Description: MYB8 protein [Gerbera hybrid cv. 'Terra Regina']
  misc_feature (1)..(169): NCBI GI NO: 82311 NR Description: myb-related protein 340 - garden snapdragon
  misc_feature (1)..(173): NCBI GI NO: 7438338 NR Description: Myb26 protein - garden pea
  misc_feature (1)..(143): NCBI GI NO: 30688935 NR Description: myb family transcription factor (ATMYB3)
  misc_feature (1)..(156): NCBI GI NO: 15242669 NR Description: myb family transcription factor
  misc_feature (1)..(156): NCBI GI NO: 21554734 NR Description: putative transcription factor MYB24
MEEDFILFNYILNHGEGLWNSVAKASGLKRTGKSCRLRWLNYLRPDVRRGNITEEEQLLIIQLHAKLGNRWSKIAKHLPGRTDNEIKNFWRTKIQRHMKVSSENMMNHQHHCSGNSQSSGMTTQGSSGKAIDTAESFSQAKTTTFNVVEQQSNENYWNVEDLWPVHLLNGDHHVI

SEQ ID NO: 3208 - DNA, 1604 bp, Arabidopsis thaliana
  misc_feature (1)..(1604): Ceres Seq. ID no. 13489191
atttttgtctcatttttttactcaaacgaacattttcgtggctccagagctacactcaaaagccattcagcggaaggggttaggatttttggcggcgagatctctctgtttctggtagcttagcaatggccttatcttctctcctcagatctgccgccacttccgccgcagctcctcgtgtcgagctttatccatcgtcatcgtacaatcattctcaggtcacgtcaagtcttggattcagtcatagcctgacctcgtctagattttctggtgctgcagtttcaaccggaaaatacagtgcgaagagggttcaacccatcaaggccacagctacggaagcacctcctgctgttcataggtcaaggagcagtggaaagacaaaggttgggatcaacggttttggtcgaattggaagattggtcctccgcatcgcaacctttagggatgatatcgaggttgtagcagtcaacgatccattcatagatgccaagtacatggcttacatgttcaagtatgattctactcatggaaattacaaaggaactatcaatgtaattgatgattcaactttggagatcaatggaaaacaagtcaaagttgtcagcaagagagacccagctgaaatcccgtgggctgatcttggagctgagtatgttgttgagtcttcaggggtattcaccaccgttggacaagcttcatcacatttgaagggtggtgctaagaaggtcatcatttctgcaccttcagcggacgcgcccatgtttgttgttggagtaaatgaaaagacatacctgcctaacatggatatagtctccaatgcaagttgtaccaccaattgtcttgcacctcttgccaaggtggtgcatgaggaatttggtattcttgaaggcttgatgacaacagtccacgcgaccacagctactcagaaaactgtggacggcccatcaatgaaggactggagaggaggccgaggcgcaagtcaaaacatcattcctagctcaacaggcgctgcaaaggctgttggtaaggtccttccggaactcaatggaaaactaacaggaatggccttccgtgtcccaacaccaaatgtctctgttgtggatttaacttgtcgacttgagaaggatgcatcgtatgaagacgtcaaggcagccataaagtttgcatcagaaggaccacttaggggcattcttggatatacagaagaagatgtcgtctctaatgattttcttggagattcaaggtcaagtatctttgatgctaatgctgggattggattaagcaagtccttcatgaaacttgtctcctggtatgacaacgaatggggttacagcaaccgagtccttgacctgatagaacacatggcgttagttgcagccagccgctaaaaccatatcccgccaacgttcgttaggtagtttttgttacattgggggttcgattactgaaccttccggttttggctccaagttttatgtaaaaccatacgatatctaataatatggggaagattttttttgttgtacgaagaaatattgttagcagctagtcgaaaccttttctatatataaaaattggtttccaaagattggaattttctggct

SEQ ID NO: 3209 - protein, 420 aa, Arabidopsis thaliana
  peptide (1)..(420): Ceres Seq. ID no. 13489192
  misc_feature (235)..(396): Pfam Name: Pfam Description:  Glyceraldehyde 3-phosphate dehydrogenase
  misc_feature (1)..(420): NCBI GI NO: 27754473 NR Description: putative glyceraldehyde-3-phosphate dehydrogenase
  misc_feature (1)..(420): NCBI GI NO: 15219206 NR Description: glyceraldehyde-3-phosphate dehydrogenase -related
  misc_feature (1)..(420): NCBI GI NO: 21618027 NR Description: putative glyceraldehyde-3-phosphate dehydrogenase
  misc_feature (1)..(420): NCBI GI NO: 25284351 NR Description: hypothetical protein F3O9
  misc_feature (1)..(419): NCBI GI NO: 15219406 NR Description: glyceraldehyde-3-phosphate dehydrogenase -related
  misc_feature (1)..(419): NCBI GI NO: 18072805 NR Description: glyceraldehyde-3-phosphate dehydrogenase
  misc_feature (1)..(420): NCBI GI NO: 2129471 NR Description: glyceraldehyde-3-phosphate dehydrogenase
  misc_feature (1)..(420): NCBI GI NO: 2129472 NR Description: glyceraldehyde-3-phosphate dehydrogenase
  misc_feature (58)..(420): NCBI GI NO: 3059140 NR Description: NAD-dependent glyceraldehyde-3-phosphate dehydrogenase
  misc_feature (58)..(420): NCBI GI NO: 3059122 NR Description: glyeraldehyde-3-phosphate dehydrogenase
MALSSLLRSAATSAAAPRVELYPSSSYNHSQVTSSLGFSHSLTSSRFSGAAVSTGKYSAKRVQPIKATATEAPPAVHRSRSSGKTKVGINGFGRIGRLVLRIATFRDDIEVVAVNDPFIDAKYMAYMFKYDSTHGNYKGTINVIDDSTLEINGKQVKVVSKRDPAEIPWADLGAEYVVESSGVFTTVGQASSHLKGGAKKVIISAPSADAPMFVVGVNEKTYLPNMDIVSNASCTTNCLAPLAKVVHEEFGILEGLMTTVHATTATQKTVDGPSMKDWRGGRGASQNIIPSSTGAAKAVGKVLPELNGKLTGMAFRVPTPNVSVVDLTCRLEKDASYEDVKAAIKFASEGPLRGILGYTEEDVVSNDFLGDSRSSIFDANAGIGLSKSFMKLVSWYDNEWGYSNRVLDLIEHMALVAASR

SEQ ID NO: 3210 - protein, 297 aa, Arabidopsis thaliana
  peptide (1)..(297): Ceres Seq. ID no. 13489193
  misc_feature (112)..(273): Pfam Name: Pfam Description:  Glyceraldehyde 3-phosphate dehydrogenase
  misc_feature (1)..(297): NCBI GI NO: 27754473 NR Description: putative glyceraldehyde-3-phosphate dehydrogenase
  misc_feature (1)..(297): NCBI GI NO: 15219206 NR Description: glyceraldehyde-3-phosphate dehydrogenase -related
  misc_feature (1)..(297): NCBI GI NO: 21618027 NR Description: putative glyceraldehyde-3-phosphate dehydrogenase
  misc_feature (1)..(297): NCBI GI NO: 25284351 NR Description: hypothetical protein F3O9
  misc_feature (1)..(296): NCBI GI NO: 15219406 NR Description: glyceraldehyde-3-phosphate dehydrogenase -related
  misc_feature (1)..(296): NCBI GI NO: 18072805 NR Description: glyceraldehyde-3-phosphate dehydrogenase
  misc_feature (1)..(297): NCBI GI NO: 2129471 NR Description: glyceraldehyde-3-phosphate dehydrogenase
  misc_feature (1)..(297): NCBI GI NO: 2129472 NR Description: glyceraldehyde-3-phosphate dehydrogenase
  misc_feature (1)..(297): NCBI GI NO: 3059140 NR Description: NAD-dependent glyceraldehyde-3-phosphate dehydrogenase
  misc_feature (1)..(297): NCBI GI NO: 3059122 NR Description: glyeraldehyde-3-phosphate dehydrogenase
MAYMFKYDSTHGNYKGTINVIDDSTLEINGKQVKVVSKRDPAEIPWADLGAEYVVESSGVFTTVGQASSHLKGGAKKVIISAPSADAPMFVVGVNEKTYLPNMDIVSNASCTTNCLAPLAKVVHEEFGILEGLMTTVHATTATQKTVDGPSMKDWRGGRGASQNIIPSSTGAAKAVGKVLPELNGKLTGMAFRVPTPNVSVVDLTCRLEKDASYEDVKAAIKFASEGPLRGILGYTEEDVVSNDFLGDSRSSIFDANAGIGLSKSFMKLVSWYDNEWGYSNRVLDLIEHMALVAASR

SEQ ID NO: 3211 - protein, 294 aa, Arabidopsis thaliana
  peptide (1)..(294): Ceres Seq. ID no. 13489194
  misc_feature (109)..(270): Pfam Name: Pfam Description:  Glyceraldehyde 3-phosphate dehydrogenase
  misc_feature (1)..(294): NCBI GI NO: 27754473 NR Description: putative glyceraldehyde-3-phosphate dehydrogenase
  misc_feature (1)..(294): NCBI GI NO: 15219206 NR Description: glyceraldehyde-3-phosphate dehydrogenase -related
  misc_feature (1)..(294): NCBI GI NO: 21618027 NR Description: putative glyceraldehyde-3-phosphate dehydrogenase
  misc_feature (1)..(294): NCBI GI NO: 25284351 NR Description: hypothetical protein F3O9
  misc_feature (1)..(293): NCBI GI NO: 15219406 NR Description: glyceraldehyde-3-phosphate dehydrogenase -related
  misc_feature (1)..(293): NCBI GI NO: 18072805 NR Description: glyceraldehyde-3-phosphate dehydrogenase
  misc_feature (1)..(294): NCBI GI NO: 2129471 NR Description: glyceraldehyde-3-phosphate dehydrogenase
  misc_feature (1)..(294): NCBI GI NO: 2129472 NR Description: glyceraldehyde-3-phosphate dehydrogenase
  misc_feature (1)..(294): NCBI GI NO: 3059140 NR Description: NAD-dependent glyceraldehyde-3-phosphate dehydrogenase
  misc_feature (1)..(294): NCBI GI NO: 3059122 NR Description: glyeraldehyde-3-phosphate dehydrogenase
MFKYDSTHGNYKGTINVIDDSTLEINGKQVKVVSKRDPAEIPWADLGAEYVVESSGVFTTVGQASSHLKGGAKKVIISAPSADAPMFVVGVNEKTYLPNMDIVSNASCTTNCLAPLAKVVHEEFGILEGLMTTVHATTATQKTVDGPSMKDWRGGRGASQNIIPSSTGAAKAVGKVLPELNGKLTGMAFRVPTPNVSVVDLTCRLEKDASYEDVKAAIKFASEGPLRGILGYTEEDVVSNDFLGDSRSSIFDANAGIGLSKSFMKLVSWYDNEWGYSNRVLDLIEHMALVAASR

SEQ ID NO: 3212 - DNA, 1539 bp, Arabidopsis thaliana
  misc_feature (1)..(1539): Ceres Seq. ID no. 12481869
atggacaatagcagaaccagacaaaacatgaatggttctgctaattggtcacaacaatccggaagaacatctacttcctctttggaagatcttgagataccaaagttcagatcttttgctccttcttcaatctctatctctccttctcttgtctctccttccacttgtttcagtccctctctttttctcgattcccctgcttttgtctcctcctctgctaacgttctagcttctccaaccacaggagctttaatcacaaacgtaactaaccagaaaggtataaatgaaggagacaagagcaacaacaacaactttaacttattcgatttctcattccacacacaatcatcaggagtttctgctccgaccacaactacaactacaactacaactacaacaacaacaaacagttctatctttcaatctcaggaacaacagaagaagaaccagtcagaacaatggagccaaaccgagactcgtccaaacaatcaagctgtatcttacaatggaagagagcaaaggaaaggagaggatggttacaattggagaaagtacggacaaaaacaggtgaaaggaagtgagaatcctcggagttactataagtgtactttccctaattgtccaacgaagaagaaagtggagagatctttggaaggtcagatcacagagattgtgtataaaggaagccacaaccatcctaaacctcagtctactagaagatcttcttcgtcttcttcgacttttcattcagctgtgtacaatgccagtttggatcataatcgtcaagcttcttctgatcagcctaattccaataatagctttcatcagtctgattcctttgggatgcaacaagaggataatactacttctgattctgttggtgacgatgagttcgaacaaggctcatcgattgtcagcagagacgaagaagattgtgggagtgaacctgaagcaaagagatggaaaggggacaatgaaacaaatggtgggaatggtggtggaagcaagacagtgagagagccgagaatcgtagtgcagacaacgagtgatattgacattcttgacgacggttacagatggagaaaatacggccagaaagtcgttaagggaaacccaaatccaagaagctactacaagtgcacaaccatcggttgtccagtgaggaaacatgtggagagagcatcacacgacatgagagcagtaatcacaacctacgaagggaaacacaaccacgatgttcctgcagctcgtggtagcggttacgccacaaacagagcaccacaggattcgtcttcagtcccgattagaccagctgctattgctggtcactccaactacactacttcttctcaagcaccatatacacttcagatgctgcacaacaacaacactaataccgggccttttggttacgccatgaacaacaataacaacaacagcaaccttcaaacgcaacaaaactttgttggtggtggattctctagagcaaaggaagaaccaaacgaggagacctcatttttcgattcgtttatgccctga

SEQ ID NO: 3213 - protein, 512 aa, Arabidopsis thaliana
  peptide (1)..(512): Ceres Seq. ID no. 12481870
  misc_feature (354)..(413): Pfam Name: Pfam Description:  WRKY DNA -binding domain
  misc_feature (1)..(512): NCBI GI NO: 29839571 NR Description: Probable WRKY transcription factor 33
  misc_feature (1)..(512): NCBI GI NO: 30687530 NR Description: WRKY family transcription factor
  misc_feature (1)..(512): NCBI GI NO: 32454266 NR Description: WRKY transcription factor 33 [Capsella rubella]
  misc_feature (33)..(511): NCBI GI NO: 1076685 NR Description: SPF1 protein - sweet potato
  misc_feature (30)..(511): NCBI GI NO: 34484314 NR Description: WRKY-type transcription factor [Solanum chacoense]
  misc_feature (2)..(511): NCBI GI NO: 14530681 NR Description: WRKY DNA-binding protein [Nicotiana tabacum]
  misc_feature (42)..(511): NCBI GI NO: 5360683 NR Description: NtWRKY1 [Nicotiana tabacum]
  misc_feature (32)..(511): NCBI GI NO: 7488948 NR Description: DNA-binding protein WRKY1 - parsley
  misc_feature (32)..(511): NCBI GI NO: 3420906 NR Description: zinc finger protein; WRKY1
  misc_feature (32)..(511): NCBI GI NO: 5917653 NR Description: zinc-finger type transcription factor WRKY1
MDNSRTRQNMNGSANWSQQSGRTSTSSLEDLEIPKFRSFAPSSISISPSLVSPSTCFSPSLFLDSPAFVSSSANVLASPTTGALITNVTNQKGINEGDKSNNNNFNLFDFSFHTQSSGVSAPTTTTTTTTTTTTTNSSIFQSQEQQKKNQSEQWSQTETRPNNQAVSYNGREQRKGEDGYNWRKYGQKQVKGSENPRSYYKCTFPNCPTKKKVERSLEGQITEIVYKGSHNHPKPQSTRRSSSSSSTFHSAVYNASLDHNRQASSDQPNSNNSFHQSDSFGMQQEDNTTSDSVGDDEFEQGSSIVSRDEEDCGSEPEAKRWKGDNETNGGNGGGSKTVREPRIVVQTTSDIDILDDGYRWRKYGQKVVKGNPNPRSYYKCTTIGCPVRKHVERASHDMRAVITTYEGKHNHDVPAARGSGYATNRAPQDSSSVPIRPAAIAGHSNYTTSSQAPYTLQMLHNNNTNTGPFGYAMNNNNNNSNLQTQQNFVGGGFSRAKEEPNEETSFFDSFMP

SEQ ID NO: 3214 - protein, 503 aa, Arabidopsis thaliana
  peptide (1)..(503): Ceres Seq. ID no. 12481871
  misc_feature (345)..(404): Pfam Name: Pfam Description:  WRKY DNA -binding domain
  misc_feature (1)..(503): NCBI GI NO: 29839571 NR Description: Probable WRKY transcription factor 33
  misc_feature (1)..(503): NCBI GI NO: 30687530 NR Description: WRKY family transcription factor
  misc_feature (1)..(503): NCBI GI NO: 32454266 NR Description: WRKY transcription factor 33 [Capsella rubella]
  misc_feature (24)..(502): NCBI GI NO: 1076685 NR Description: SPF1 protein - sweet potato
  misc_feature (21)..(502): NCBI GI NO: 34484314 NR Description: WRKY-type transcription factor [Solanum chacoense]
  misc_feature (1)..(502): NCBI GI NO: 14530681 NR Description: WRKY DNA-binding protein [Nicotiana tabacum]
  misc_feature (33)..(502): NCBI GI NO: 5360683 NR Description: NtWRKY1 [Nicotiana tabacum]
  misc_feature (23)..(502): NCBI GI NO: 7488948 NR Description: DNA-binding protein WRKY1 - parsley
  misc_feature (23)..(502): NCBI GI NO: 3420906 NR Description: zinc finger protein; WRKY1
  misc_feature (23)..(502): NCBI GI NO: 5917653 NR Description: zinc-finger type transcription factor WRKY1
MNGSANWSQQSGRTSTSSLEDLEIPKFRSFAPSSISISPSLVSPSTCFSPSLFLDSPAFVSSSANVLASPTTGALITNVTNQKGINEGDKSNNNNFNLFDFSFHTQSSGVSAPTTTTTTTTTTTTTNSSIFQSQEQQKKNQSEQWSQTETRPNNQAVSYNGREQRKGEDGYNWRKYGQKQVKGSENPRSYYKCTFPNCPTKKKVERSLEGQITEIVYKGSHNHPKPQSTRRSSSSSSTFHSAVYNASLDHNRQASSDQPNSNNSFHQSDSFGMQQEDNTTSDSVGDDEFEQGSSIVSRDEEDCGSEPEAKRWKGDNETNGGNGGGSKTVREPRIVVQTTSDIDILDDGYRWRKYGQKVVKGNPNPRSYYKCTTIGCPVRKHVERASHDMRAVITTYEGKHNHDVPAARGSGYATNRAPQDSSSVPIRPAAIAGHSNYTTSSQAPYTLQMLHNNNTNTGPFGYAMNNNNNNSNLQTQQNFVGGGFSRAKEEPNEETSFFDSFMP

SEQ ID NO: 3215 - DNA, 794 bp, Arabidopsis thaliana
  misc_feature (1)..(794): Ceres Seq. ID no. 12326724
cccaaattacaaagacgaaggagtaatggcaattacggcgactagattggtctcactgactctcttatggattgtcgtcctcttcgtcacacttgctctcattcagatcaaattgactgatgttgcagatcctagtgtcaatgagaagattcttgatgctaagctcaatcaggtgggagaggatttagaaggagttacacacaaagtttactttgacattcagatcaatggttcaccagcagggcgcattctcatcggcctttttggaaatatagttcctaaaactgcagagaactttcggtcactttgcacgggagagaaaggagttggaaacatggggaaacctctttatttcaaaggaagtagcttccataggatcattcctggcttcatgattcagggtggagattttacacgaggcgatggacgaggtggagagtcgatatatggagataaatttgcagatgagaactttaaactcaaacacactgggccaggatttttatcaatggcaaactcgggaccagactccaacggttcacagttcttcatcacaacagtcaccacgagttggttggacggacatcacgttgtgtttgggaaggtattgtctggcatggaagtagtgcgcaagatcgaagcccagggacaagacagtggagtgcccaaagctaatgttattatttttgctagtggagaagtttctttgtaatatcgtcttcaagttttttcttcatccgaatgaacaagagaccaagattcacaaaaacaaagaaaatcaatcaaattctttg

SEQ ID NO: 3216 - protein, 236 aa, Arabidopsis thaliana
  peptide (1)..(236): Ceres Seq. ID no. 12326725
  misc_feature (9)..(236): NCBI GI NO: 18410386 NR Description: cyclophilin-like protein; protein id: At3g55920
  misc_feature (9)..(236): NCBI GI NO: 11270308 NR Description: peptidylprolyl isomerase (EC 5.2.1.8) F27K19.100
  misc_feature (61)..(236): NCBI GI NO: 32351008 NR Description: cyclophilin [Triticum aestivum]
  misc_feature (57)..(236): NCBI GI NO: 15227674 NR Description: cyclophilin; protein id: At2g29960
  misc_feature (57)..(236): NCBI GI NO: 11270326 NR Description: peptidylprolyl isomerase (EC 5.2.1.8) CYP5
  misc_feature (57)..(236): NCBI GI NO: 21554007 NR Description: cyclophilin [Arabidopsis thaliana]
  misc_feature (60)..(236): NCBI GI NO: 15237739 NR Description: cyclophilin ROC7; protein id: At5g58710
  misc_feature (26)..(234): NCBI GI NO: 5731960 NR Description: cyclophilin B [Dictyostelium discoideum]
  misc_feature (68)..(234): NCBI GI NO: 17566266 NR Description: CYcloPhilin family CYP-7 (18.4 kD) (cyp-7)
  misc_feature (68)..(234): NCBI GI NO: 863016 NR Description: cyclophilin
PNYKDEGVMAITATRLVSLTLLWIVVLFVTLALIQIKLTDVADPSVNEKILDAKLNQVGEDLEGVTHKVYFDIQINGSPAGRILIGLFGNIVPKTAENFRSLCTGEKGVGNMGKPLYFKGSSFHRIIPGFMIQGGDFTRGDGRGGESIYGDKFADENFKLKHTGPGFLSMANSGPDSNGSQFFITTVTTSWLDGHHVVFGKVLSGMEVVRKIEAQGQDSGVPKANVIIFASGEVSL

SEQ ID NO: 3217 - protein, 228 aa, Arabidopsis thaliana
  peptide (1)..(228): Ceres Seq. ID no. 12326726
  misc_feature (1)..(228): NCBI GI NO: 18410386 NR Description: cyclophilin-like protein; protein id: At3g55920
  misc_feature (1)..(228): NCBI GI NO: 11270308 NR Description: peptidylprolyl isomerase (EC 5.2.1.8) F27K19.100
  misc_feature (53)..(228): NCBI GI NO: 32351008 NR Description: cyclophilin [Triticum aestivum]
  misc_feature (49)..(228): NCBI GI NO: 15227674 NR Description: cyclophilin; protein id: At2g29960
  misc_feature (49)..(228): NCBI GI NO: 11270326 NR Description: peptidylprolyl isomerase (EC 5.2.1.8) CYP5
  misc_feature (49)..(228): NCBI GI NO: 21554007 NR Description: cyclophilin [Arabidopsis thaliana]
  misc_feature (52)..(228): NCBI GI NO: 15237739 NR Description: cyclophilin ROC7; protein id: At5g58710
  misc_feature (18)..(226): NCBI GI NO: 5731960 NR Description: cyclophilin B [Dictyostelium discoideum]
  misc_feature (60)..(226): NCBI GI NO: 17566266 NR Description: CYcloPhilin family CYP-7 (18.4 kD) (cyp-7)
  misc_feature (60)..(226): NCBI GI NO: 863016 NR Description: cyclophilin
MAITATRLVSLTLLWIVVLFVTLALIQIKLTDVADPSVNEKILDAKLNQVGEDLEGVTHKVYFDIQINGSPAGRILIGLFGNIVPKTAENFRSLCTGEKGVGNMGKPLYFKGSSFHRIIPGFMIQGGDFTRGDGRGGESIYGDKFADENFKLKHTGPGFLSMANSGPDSNGSQFFITTVTTSWLDGHHVVFGKVLSGMEVVRKIEAQGQDSGVPKANVIIFASGEVSL

SEQ ID NO: 3218 - protein, 125 aa, Arabidopsis thaliana
  peptide (1)..(125): Ceres Seq. ID no. 12326727
  misc_feature (1)..(125): NCBI GI NO: 18410386 NR Description: cyclophilin-like protein; protein id: At3g55920
  misc_feature (1)..(125): NCBI GI NO: 11270308 NR Description: peptidylprolyl isomerase (EC 5.2.1.8) F27K19.100
  misc_feature (1)..(125): NCBI GI NO: 32351008 NR Description: cyclophilin [Triticum aestivum]
  misc_feature (1)..(125): NCBI GI NO: 15227674 NR Description: cyclophilin; protein id: At2g29960
  misc_feature (1)..(125): NCBI GI NO: 11270326 NR Description: peptidylprolyl isomerase (EC 5.2.1.8) CYP5
  misc_feature (1)..(125): NCBI GI NO: 21554007 NR Description: cyclophilin [Arabidopsis thaliana]
  misc_feature (1)..(125): NCBI GI NO: 15237739 NR Description: cyclophilin ROC7; protein id: At5g58710
  misc_feature (1)..(123): NCBI GI NO: 5731960 NR Description: cyclophilin B [Dictyostelium discoideum]
  misc_feature (1)..(123): NCBI GI NO: 17566266 NR Description: CYcloPhilin family CYP-7 (18.4 kD) (cyp-7)
  misc_feature (1)..(123): NCBI GI NO: 863016 NR Description: cyclophilin
MGKPLYFKGSSFHRIIPGFMIQGGDFTRGDGRGGESIYGDKFADENFKLKHTGPGFLSMANSGPDSNGSQFFITTVTTSWLDGHHVVFGKVLSGMEVVRKIEAQGQDSGVPKANVIIFASGEVSL

SEQ ID NO: 3219 - DNA, 900 bp, Arabidopsis thaliana
  misc_feature (1)..(900): Ceres Seq. ID no. 12330525
aaagctaaattagaaacctgacgatctctctctctctctctctctcgatcggataatatttgagctttgtggttggaggatctgagttagtcatgttcatgatcgattggttctatggcgttctcgcttcgttagggttatggcagaaagaggctaagatcttgtttctgggactcgataatgctggtaaaaccactctgcttcacatgttgaaagacgagagattggtacagcatcagcctacgcagcatccaacttctgaagaactcagcattgggaaaatcaagtttaaggcttttgatttgggtggtcaccagattgctcgcagggtctggaaggattactatgctaaggtggacgctgtggtctacctagttgatgcttacgacaaagagagatttgcagaatcaaaaaaggaacttgatgcacttctctcagacgaatccctagccagcgttccattcctcattctaggaaacaagatagacataccgtatgctgcatcagaggacgagctccgttaccatctcggcctctccaacttcactacaggaaagggtaaagtgaatctaacggattcgaacgttaggccattggaggttttcatgtgcagcattgtcaggaaaatgggttacggagaaggtttcaaatgggtttctcaatacatcaagtaagacaaacacacgctgtgttattattaagccgtaagcttgcttctataaatcctgttttttgtatcgtcttgcttcgttttttcctctctttaattgtgttgtaagaaaatgtcttaaaccgtacctagctttttctcgtttgtctgatcctcgactggtttgttcttgtagtgaattttttacacgtttcgtaatttattcaaataagggaagaaaaaaagattag

SEQ ID NO: 3220 - protein, 193 aa, Arabidopsis thaliana
  peptide (1)..(193): Ceres Seq. ID no. 12330526
  misc_feature (5)..(192): Pfam Name: Pfam Description:  ADP-ribosylation factor family
  misc_feature (1)..(193): NCBI GI NO: 15235226 NR Description: SAR1/GTP-binding secretory factor
  misc_feature (1)..(193): NCBI GI NO: 3334321 NR Description: GTP-binding protein SAR1A
  misc_feature (1)..(192): NCBI GI NO: 15228793 NR Description: Sar1-like GTP binding protein
  misc_feature (1)..(193): NCBI GI NO: 34894960 NR Description: putative GTP-binding protein
  misc_feature (1)..(192): NCBI GI NO: 25294172 NR Description: ras-like small monomeric GTP-binding protein
  misc_feature (1)..(192): NCBI GI NO: 15223516 NR Description: GTP-binding protein (SAR1B); protein id: At1g56330
  misc_feature (1)..(193): NCBI GI NO: 34902852 NR Description: unnamed protein product
  misc_feature (1)..(193): NCBI GI NO: 25294173 NR Description: small GTP-binding protein Sar1BNt
  misc_feature (1)..(193): NCBI GI NO: 1549222 NR Description: NtSar1 protein [Nicotiana tabacum]
  misc_feature (1)..(193): NCBI GI NO: 7438457 NR Description: GTP-binding protein - curled-leaved tobacco
MFMIDWFYGVLASLGLWQKEAKILFLGLDNAGKTTLLHMLKDERLVQHQPTQHPTSEELSIGKIKFKAFDLGGHQIARRVWKDYYAKVDAVVYLVDAYDKERFAESKKELDALLSDESLASVPFLILGNKIDIPYAASEDELRYHLGLSNFTTGKGKVNLTDSNVRPLEVFMCSIVRKMGYGEGFKWVSQYIK

SEQ ID NO: 3221 - protein, 191 aa, Arabidopsis thaliana
  peptide (1)..(191): Ceres Seq. ID no. 12330527
  misc_feature (3)..(190): Pfam Name: Pfam Description:  ADP-ribosylation factor family
  misc_feature (1)..(191): NCBI GI NO: 15235226 NR Description: SAR1/GTP-binding secretory factor
  misc_feature (1)..(191): NCBI GI NO: 3334321 NR Description: GTP-binding protein SAR1A
  misc_feature (1)..(190): NCBI GI NO: 15228793 NR Description: Sar1-like GTP binding protein
  misc_feature (1)..(191): NCBI GI NO: 34894960 NR Description: putative GTP-binding protein
  misc_feature (1)..(190): NCBI GI NO: 25294172 NR Description: ras-like small monomeric GTP-binding protein
  misc_feature (1)..(190): NCBI GI NO: 15223516 NR Description: GTP-binding protein (SAR1B); protein id: At1g56330
  misc_feature (1)..(191): NCBI GI NO: 34902852 NR Description: unnamed protein product
  misc_feature (1)..(191): NCBI GI NO: 25294173 NR Description: small GTP-binding protein Sar1BNt
  misc_feature (1)..(191): NCBI GI NO: 1549222 NR Description: NtSar1 protein [Nicotiana tabacum]
  misc_feature (1)..(191): NCBI GI NO: 7438457 NR Description: GTP-binding protein - curled-leaved tobacco
MIDWFYGVLASLGLWQKEAKILFLGLDNAGKTTLLHMLKDERLVQHQPTQHPTSEELSIGKIKFKAFDLGGHQIARRVWKDYYAKVDAVVYLVDAYDKERFAESKKELDALLSDESLASVPFLILGNKIDIPYAASEDELRYHLGLSNFTTGKGKVNLTDSNVRPLEVFMCSIVRKMGYGEGFKWVSQYIK

SEQ ID NO: 3222 - protein, 155 aa, Arabidopsis thaliana
  peptide (1)..(155): Ceres Seq. ID no. 12330528
  misc_feature (1)..(154): Pfam Name: Pfam Description:  ADP-ribosylation factor family
  misc_feature (1)..(155): NCBI GI NO: 15235226 NR Description: SAR1/GTP-binding secretory factor
  misc_feature (1)..(155): NCBI GI NO: 3334321 NR Description: GTP-binding protein SAR1A
  misc_feature (1)..(154): NCBI GI NO: 15228793 NR Description: Sar1-like GTP binding protein
  misc_feature (1)..(155): NCBI GI NO: 34894960 NR Description: putative GTP-binding protein
  misc_feature (1)..(154): NCBI GI NO: 25294172 NR Description: ras-like small monomeric GTP-binding protein
  misc_feature (1)..(154): NCBI GI NO: 15223516 NR Description: GTP-binding protein (SAR1B); protein id: At1g56330
  misc_feature (1)..(155): NCBI GI NO: 34902852 NR Description: unnamed protein product
  misc_feature (1)..(155): NCBI GI NO: 25294173 NR Description: small GTP-binding protein Sar1BNt
  misc_feature (1)..(155): NCBI GI NO: 1549222 NR Description: NtSar1 protein [Nicotiana tabacum]
  misc_feature (1)..(155): NCBI GI NO: 7438457 NR Description: GTP-binding protein - curled-leaved tobacco
MLKDERLVQHQPTQHPTSEELSIGKIKFKAFDLGGHQIARRVWKDYYAKVDAVVYLVDAYDKERFAESKKELDALLSDESLASVPFLILGNKIDIPYAASEDELRYHLGLSNFTTGKGKVNLTDSNVRPLEVFMCSIVRKMGYGEGFKWVSQYIK

SEQ ID NO: 3223 - DNA, 1040 bp, Arabidopsis thaliana
  misc_feature (1)..(1040): Ceres Seq. ID no. 12329774
tttttcgttttcttctccgtttctcgctcatcgcttactgaaaccagaaacaagtttagggtttttgcggaggtttcaaagttaacaatggcggaagagcacaagcacgaggaatcgatcatggagaagatctctgagaagatccatggtcacgatgactcttcttcttcttcttccgattcggatgacgataagaactctgcgtctctcaaaaccaagatttatcgtcttttcggaagagaacagcctcttcacaagcttttcggtggcggaaaacctgccgacattttcctgtggaggaacaagaaagtatcaggaggagtattgggtgctgcaactgtttcctggatcttattcgagttacttgagtacaatcttctcacactcttcggccacatttcaattcttgctctcgcagtattgtttttgtggtctagtgctactaccttcattcacaagtcacctcctcatatccctgaagtttacatccccgaggatgttattcttcagcttgcttctggattaaggattgaaatcaatcgtggattttactgttcttagggacattgcatcaggatagatcttaagaagtttctgttggtgattgctggtttatgggttttgtccaaagttggtagctcctgcaacttcttgaccttaatctacatcgcaactgtacttctcttcacgattcccgtgctttacgagaagtatgaagataaagtagatgactttggtgaaaaggcgatgagggagatgaagaagcaatacgtggagttcgacgtgaaggttttgagtaaggtgatgagcaaaattcctaaaggagccttagcctttatcaagaagaaagattagagagtgtaagtttctctcatcatcattatccgagattattcaagattgatatataaatctcgaagcattgtttttttggctgttggttaataaccctttattctctcaaatatctgctatatggattttattcgggttttaaccaaattttttagcaatattgaatctgattgaaatttgaattc

SEQ ID NO: 3224 - protein, 186 aa, Arabidopsis thaliana
  peptide (1)..(186): Ceres Seq. ID no. 12329775
  misc_feature (30)..(186): NCBI GI NO: 15222616 NR Description: hypothetical protein; protein id: At1g64090
  misc_feature (30)..(186): NCBI GI NO: 15238125 NR Description: putative protein; protein id: At5g41600
  misc_feature (33)..(186): NCBI GI NO: 34909318 NR Description: OSJNBb0021A09.5
  misc_feature (28)..(186): NCBI GI NO: 15237093 NR Description: putative protein; protein id: At4g11220
  misc_feature (31)..(186): NCBI GI NO: 15236556 NR Description: putative protein; protein id: At4g23630
  misc_feature (30)..(186): NCBI GI NO: 18406991 NR Description: expressed protein; protein id: At2g46170
  misc_feature (67)..(186): NCBI GI NO: 34904202 NR Description: P0492F05.25
  misc_feature (38)..(65): NCBI GI NO: 34904202 NR Description: P0492F05.25
  misc_feature (37)..(186): NCBI GI NO: 15234108 NR Description: hypothetical protein; protein id: At4g01230.1
  misc_feature (30)..(186): NCBI GI NO: 15233147 NR Description: putative protein; protein id: At3g61560.1
FFVFFSVSRSSLTETRNKFRVFAEVSKLTMAEEHKHEESIMEKISEKIHGHDDSSSSSSDSDDDKNSASLKTKIYRLFGREQPLHKLFGGGKPADIFLWRNKKVSGGVLGAATVSWILFELLEYNLLTLFGHISILALAVLFLWSSATTFIHKSPPHIPEVYIPEDVILQLASGLRIEINRGFYCS

SEQ ID NO: 3225 - protein, 157 aa, Arabidopsis thaliana
  peptide (1)..(157): Ceres Seq. ID no. 12329776
  misc_feature (1)..(157): NCBI GI NO: 15222616 NR Description: hypothetical protein; protein id: At1g64090
  misc_feature (1)..(157): NCBI GI NO: 15238125 NR Description: putative protein; protein id: At5g41600
  misc_feature (4)..(157): NCBI GI NO: 34909318 NR Description: OSJNBb0021A09.5
  misc_feature (1)..(157): NCBI GI NO: 15237093 NR Description: putative protein; protein id: At4g11220
  misc_feature (2)..(157): NCBI GI NO: 15236556 NR Description: putative protein; protein id: At4g23630
  misc_feature (1)..(157): NCBI GI NO: 18406991 NR Description: expressed protein; protein id: At2g46170
  misc_feature (38)..(157): NCBI GI NO: 34904202 NR Description: P0492F05.25
  misc_feature (9)..(36): NCBI GI NO: 34904202 NR Description: P0492F05.25
  misc_feature (8)..(157): NCBI GI NO: 15234108 NR Description: hypothetical protein; protein id: At4g01230.1
  misc_feature (1)..(157): NCBI GI NO: 15233147 NR Description: putative protein; protein id: At3g61560.1
MAEEHKHEESIMEKISEKIHGHDDSSSSSSDSDDDKNSASLKTKIYRLFGREQPLHKLFGGGKPADIFLWRNKKVSGGVLGAATVSWILFELLEYNLLTLFGHISILALAVLFLWSSATTFIHKSPPHIPEVYIPEDVILQLASGLRIEINRGFYCS

SEQ ID NO: 3226 - protein, 146 aa, Arabidopsis thaliana
  peptide (1)..(146): Ceres Seq. ID no. 12329777
  misc_feature (1)..(146): NCBI GI NO: 15222616 NR Description: hypothetical protein; protein id: At1g64090
  misc_feature (1)..(146): NCBI GI NO: 15238125 NR Description: putative protein; protein id: At5g41600
  misc_feature (1)..(146): NCBI GI NO: 34909318 NR Description: OSJNBb0021A09.5
  misc_feature (1)..(146): NCBI GI NO: 15237093 NR Description: putative protein; protein id: At4g11220
  misc_feature (1)..(146): NCBI GI NO: 15236556 NR Description: putative protein; protein id: At4g23630
  misc_feature (1)..(146): NCBI GI NO: 18406991 NR Description: expressed protein; protein id: At2g46170
  misc_feature (27)..(146): NCBI GI NO: 34904202 NR Description: P0492F05.25
  misc_feature (1)..(25): NCBI GI NO: 34904202 NR Description: P0492F05.25
  misc_feature (1)..(146): NCBI GI NO: 15234108 NR Description: hypothetical protein; protein id: At4g01230.1
  misc_feature (1)..(146): NCBI GI NO: 15233147 NR Description: putative protein; protein id: At3g61560.1
MEKISEKIHGHDDSSSSSSDSDDDKNSASLKTKIYRLFGREQPLHKLFGGGKPADIFLWRNKKVSGGVLGAATVSWILFELLEYNLLTLFGHISILALAVLFLWSSATTFIHKSPPHIPEVYIPEDVILQLASGLRIEINRGFYCS

SEQ ID NO: 3227 - DNA, 1013 bp, Arabidopsis thaliana
  misc_feature (1)..(1013): Ceres Seq. ID no. 13575559
atgagaatctatttttccatatgctctccacactcccaccaaacaaatcccaagaatcaacaaaagaaaaaacattcaccttctcttacgcgactctcgccggaaacagatcgctccgccgtgaactcggaagccatggggtcacttttgcagggttttactaaatcactcgccatgactttcctctccgagattggtgacaaaacgttcttcgctgctgctattttggcgatgcggtatcctaggaggcttgtattagctggttgtttatcagctttgattgtcatgactatattatctgctacacttggttgggctgctccaaatctgatctctcggaaatggactcatcatataacaacattcttgttctttggctttgggttatggtctttgtgggatggttttaaagaaggaggaggttctgaagaattggcagaagttgaagcagaactggattctgatttgaagaagactaatgatcaatcgaaaaacagtaagattgaagatgaacagaaaaagcagaaaagaccattccttactgcattcttctctcccatttttctcaaggcgttttcgattaacttctttggtgaatggggtgacaagagtcagcttgcgaccattggtttggctgcagatgaaaatccactcggcgtggtccttggcggaattgtggcacaaacattgtgtaccacagctgctgtgcttggtggcaagagcttagcatctcaaatatccgaacgaattgtggctctttccggtggaatgcttttcattatcttcggcattcagtcgcttcttactccggttgatgcttgatacatctatatggtatcccatcaatgtcttgaaactgcaggtttcttgggtttgaatgcttttttgggcgagatgaaaccgaaacacgtcactcccttacaattgcttagatacatttacattagtgattacagaatcagaaagattcatctgtaacaccatttgacttcaataaagttttgtttatttgc

SEQ ID NO: 3228 - protein, 273 aa, Arabidopsis thaliana
  peptide (1)..(273): Ceres Seq. ID no. 13575560
  misc_feature (53)..(128): Pfam Name: Pfam Description:  Uncharacterized protein family UPF0016
  misc_feature (46)..(273): NCBI GI NO: 15221462 NR Description: transmembrane protein -related
  misc_feature (46)..(273): NCBI GI NO: 15222613 NR Description: transmembrane protein -related
  misc_feature (46)..(273): NCBI GI NO: 21593636 NR Description: transmembrane protein, putative
  misc_feature (14)..(272): NCBI GI NO: 21357589 NR Description: CG4196-PC [Drosophila melanogaster]
  misc_feature (6)..(270): NCBI GI NO: 6755853 NR Description: TPA regulated locus [Mus musculus]
  misc_feature (29)..(270): NCBI GI NO: 7684611 NR Description: TPARDL [Mus musculus]
  misc_feature (48)..(270): NCBI GI NO: 18421551 NR Description: transmembrane protein FT27/PFT27-related
  misc_feature (30)..(215): NCBI GI NO: 34877387 NR Description: similar to probable transmembrane protein FT27 - mouse
  misc_feature (211)..(270): NCBI GI NO: 34877387 NR Description: similar to probable transmembrane protein FT27 - mouse
  misc_feature (42)..(273): NCBI GI NO: 20385488 NR Description: transmembrane protein HTP-1 [Danio rerio]
MRIYFSICSPHSHQTNPKNQQKKKHSPSLTRLSPETDRSAVNSEAMGSLLQGFTKSLAMTFLSEIGDKTFFAAAILAMRYPRRLVLAGCLSALIVMTILSATLGWAAPNLISRKWTHHITTFLFFGFGLWSLWDGFKEGGGSEELAEVEAELDSDLKKTNDQSKNSKIEDEQKKQKRPFLTAFFSPIFLKAFSINFFGEWGDKSQLATIGLAADENPLGVVLGGIVAQTLCTTAAVLGGKSLASQISERIVALSGGMLFIIFGIQSLLTPVDA

SEQ ID NO: 3229 - protein, 228 aa, Arabidopsis thaliana
  peptide (1)..(228): Ceres Seq. ID no. 13575561
  misc_feature (8)..(83): Pfam Name: Pfam Description:  Uncharacterized protein family UPF0016
  misc_feature (1)..(228): NCBI GI NO: 15221462 NR Description: transmembrane protein -related
  misc_feature (1)..(228): NCBI GI NO: 15222613 NR Description: transmembrane protein -related
  misc_feature (1)..(228): NCBI GI NO: 21593636 NR Description: transmembrane protein, putative
  misc_feature (1)..(227): NCBI GI NO: 21357589 NR Description: CG4196-PC [Drosophila melanogaster]
  misc_feature (1)..(225): NCBI GI NO: 6755853 NR Description: TPA regulated locus [Mus musculus]
  misc_feature (1)..(225): NCBI GI NO: 7684611 NR Description: TPARDL [Mus musculus]
  misc_feature (3)..(225): NCBI GI NO: 18421551 NR Description: transmembrane protein FT27/PFT27-related
  misc_feature (1)..(170): NCBI GI NO: 34877387 NR Description: similar to probable transmembrane protein FT27 - mouse
  misc_feature (166)..(225): NCBI GI NO: 34877387 NR Description: similar to probable transmembrane protein FT27 - mouse
  misc_feature (1)..(228): NCBI GI NO: 20385488 NR Description: transmembrane protein HTP-1 [Danio rerio]
MGSLLQGFTKSLAMTFLSEIGDKTFFAAAILAMRYPRRLVLAGCLSALIVMTILSATLGWAAPNLISRKWTHHITTFLFFGFGLWSLWDGFKEGGGSEELAEVEAELDSDLKKTNDQSKNSKIEDEQKKQKRPFLTAFFSPIFLKAFSINFFGEWGDKSQLATIGLAADENPLGVVLGGIVAQTLCTTAAVLGGKSLASQISERIVALSGGMLFIIFGIQSLLTPVDA

SEQ ID NO: 3230 - protein, 215 aa, Arabidopsis thaliana
  peptide (1)..(215): Ceres Seq. ID no. 13575562
  misc_feature (1)..(70): Pfam Name: Pfam Description:  Uncharacterized protein family UPF0016
  misc_feature (1)..(215): NCBI GI NO: 15221462 NR Description: transmembrane protein -related
  misc_feature (1)..(215): NCBI GI NO: 15222613 NR Description: transmembrane protein -related
  misc_feature (1)..(215): NCBI GI NO: 21593636 NR Description: transmembrane protein, putative
  misc_feature (1)..(214): NCBI GI NO: 21357589 NR Description: CG4196-PC [Drosophila melanogaster]
  misc_feature (1)..(212): NCBI GI NO: 6755853 NR Description: TPA regulated locus [Mus musculus]
  misc_feature (1)..(212): NCBI GI NO: 7684611 NR Description: TPARDL [Mus musculus]
  misc_feature (1)..(212): NCBI GI NO: 18421551 NR Description: transmembrane protein FT27/PFT27-related
  misc_feature (1)..(157): NCBI GI NO: 34877387 NR Description: similar to probable transmembrane protein FT27 - mouse
  misc_feature (153)..(212): NCBI GI NO: 34877387 NR Description: similar to probable transmembrane protein FT27 - mouse
  misc_feature (1)..(215): NCBI GI NO: 20385488 NR Description: transmembrane protein HTP-1 [Danio rerio]
MTFLSEIGDKTFFAAAILAMRYPRRLVLAGCLSALIVMTILSATLGWAAPNLISRKWTHHITTFLFFGFGLWSLWDGFKEGGGSEELAEVEAELDSDLKKTNDQSKNSKIEDEQKKQKRPFLTAFFSPIFLKAFSINFFGEWGDKSQLATIGLAADENPLGVVLGGIVAQTLCTTAAVLGGKSLASQISERIVALSGGMLFIIFGIQSLLTPVDA

SEQ ID NO: 3231 - DNA, 786 bp, Arabidopsis thaliana
  misc_feature (1)..(786): Ceres Seq. ID no. 12561786
gtgaagtctcttatatataagtatcgagagaattagggttttctagtctagtgtttccgggagcagcctgagcaggaggaagaagacgaagaagaagaggagcagctactaccatggttctcaagacggagctttgtcgtttcagtggacagaagatttacccaggaagaggaattaggtttatccgatctgattctcaggttttcttgtttcttaactcaaaatgtaagaggtacttccataacaagttgaagccatccaagcttgcatggactgccatgtacagaaagcaacacaagaaggatgcagcacaagaggctgtgaagagaaggagacgtgccaccaagaagccatactcaaggtccattgttggtgctaccttggaagtaattcagaagaagagagctgagaagcctgaagttcgtgatgcagccagggaagctgctctgcgtgagatcaaggaaagaatcaaaaagaccaaagatgaaaagaaggctaagaaggtggaatttgcttctaagcaacagaaggtcaaggctaatttccccaaagctgctgctgcatccaagggtcctaaggtgggaggtggtggtggcaaacgctgaagagcttaaagccatcttttctcactctgcgtcttttctgctagtagctacttttagtagttgatgttcatttctgaatatttgcaaaacataaaccttgttatttcgtttttgtctctcacttttgctactcttataatatcagacttgagaattttgctgcttatgaactttatttcac

SEQ ID NO: 3232 - protein, 163 aa, Arabidopsis thaliana
  peptide (1)..(163): Ceres Seq. ID no. 12561787
  misc_feature (1)..(163): NCBI GI NO: 15231730 NR Description: 60S ribosomal protein - like
  misc_feature (1)..(163): NCBI GI NO: 18404176 NR Description: 60S ribosomal protein L24; protein id: At2g36620
  misc_feature (5)..(163): NCBI GI NO: 25295112 NR Description: 60S ribosomal protein L24
  misc_feature (1)..(162): NCBI GI NO: 6094040 NR Description: 60S ribosomal protein L24
  misc_feature (1)..(163): NCBI GI NO: 1710521 NR Description: 60S RIBOSOMAL PROTEIN L24
  misc_feature (1)..(158): NCBI GI NO: 10180025 NR Description: 60S ribosomal protein L24 [Prunus avium]
  misc_feature (4)..(163): NCBI GI NO: 34900364 NR Description: putative 60S ribosomal protein L24
  misc_feature (3)..(158): NCBI GI NO: 40642996 NR Description: ribosomal protein L24 [Crassostrea gigas]
  misc_feature (1)..(158): NCBI GI NO: 28174943 NR Description: Similar to ribosomal protein L24 [Mus musculus]
  misc_feature (7)..(158): NCBI GI NO: 31236377 NR Description: ENSANGP00000012247 [Anopheles gambiae]
MVLKTELCRFSGQKIYPGRGIRFIRSDSQVFLFLNSKCKRYFHNKLKPSKLAWTAMYRKQHKKDAAQEAVKRRRRATKKPYSRSIVGATLEVIQKKRAEKPEVRDAAREAALREIKERIKKTKDEKKAKKVEFASKQQKVKANFPKAAAASKGPKVGGGGGKR

SEQ ID NO: 3233 - protein, 108 aa, Arabidopsis thaliana
  peptide (1)..(108): Ceres Seq. ID no. 12561788
  misc_feature (1)..(108): NCBI GI NO: 15231730 NR Description: 60S ribosomal protein - like
  misc_feature (1)..(108): NCBI GI NO: 18404176 NR Description: 60S ribosomal protein L24; protein id: At2g36620
  misc_feature (1)..(108): NCBI GI NO: 25295112 NR Description: 60S ribosomal protein L24
  misc_feature (1)..(107): NCBI GI NO: 6094040 NR Description: 60S ribosomal protein L24
  misc_feature (1)..(108): NCBI GI NO: 1710521 NR Description: 60S RIBOSOMAL PROTEIN L24
  misc_feature (1)..(103): NCBI GI NO: 10180025 NR Description: 60S ribosomal protein L24 [Prunus avium]
  misc_feature (1)..(108): NCBI GI NO: 34900364 NR Description: putative 60S ribosomal protein L24
  misc_feature (1)..(103): NCBI GI NO: 40642996 NR Description: ribosomal protein L24 [Crassostrea gigas]
  misc_feature (1)..(103): NCBI GI NO: 28174943 NR Description: Similar to ribosomal protein L24 [Mus musculus]
  misc_feature (1)..(103): NCBI GI NO: 31236377 NR Description: ENSANGP00000012247 [Anopheles gambiae]
MYRKQHKKDAAQEAVKRRRRATKKPYSRSIVGATLEVIQKKRAEKPEVRDAAREAALREIKERIKKTKDEKKAKKVEFASKQQKVKANFPKAAAASKGPKVGGGGGKR

SEQ ID NO: 3234 - DNA, 1729 bp, Arabidopsis thaliana
  misc_feature (1)..(1729): Ceres Seq. ID no. 12371173
aacaacaccaaaagaaaagggaaaaaaaaaacagaggaactaataaacggaccatgagctccacagagacatacgagccgttattgacacgactccactcggattctcagataactgaacggtcttcgccagagatagaggagtttctccgccgtcgtggatccacagtgacaccacggtggtggctaaagctggcagtgtgggagtcaaagcttctatggacactctctggagcctctatagtggtctctgttctgaattacatgctcagcttcgtcaccgtcatgttcaccggtcatctcggttctcttcagctcgccggcgcttccatcgccaccgtcggaatccaaggcctagcttacggtatcatgttaggaatggcgagcgcggtccaaacagtgtgtggtcaagcgtacggagcgagacagtactcatcaatgggaataatctgccaacgagccatggtcttgcaccttgcagctgcagtcttcctcacgttcctctactggtactcgggtccaatccttaaaacaatgggccaatccgtagccatagcacacgagggtcagatctttgcacgtggaatgattccacaaatttacgcatttgccctcgcttgcccgatgcagaggtttcttcaggctcagaacatagtgaaccctttggcttacatgtccttaggagttttcttgctccacacgttactcacgtggctggttaccaacgtgctggatttcggcttgcttggggcggctctgattctcagtttctcatggtggctgctagtagctgtgaatggtatgtatatcttgatgagcccgaattgtaaggagacatggacagggttttcaacgagggcatttagagggatatggccttacttcaagctcacggtagcttcagcagttatgctatgtttggagatatggtacaaccaagggctagtgattatctctggtttactctccaatccgacaatttctctagacgctatttcgatttgcatgtattacttgaattgggatatgcagttcatgcttggtctaagtgcagcaatcagtgtgcgagtgagcaatgagctaggagcgggaaatccacgagtggctatgttatcagtagtggttgtcaacatcacgactgttctcatcagctcagttctctgtgtcatcgtgcttgtgttccgcgttggccttagcaaagccttcaccagcgatgcagaagttatagcagccgtctctgacctctttcctcttctcgccgtttccattttcttaaacggaatccagccaattctctctggggttgctattgggagtgggtggcaagcagtggtggcttatgtgaatcttgttacgtactatgtcattggtcttcctattggctgtgtccttggcttcaaaaccagtcttggagttgctgggatctggtgggggatgattgcaggagtcatacttcaaaccctaactttgattgttcttacacttaaaactaattggacttccgaggtagaaaatgcagctcagagagtaaagacttcggcaactgagaatcaagagatggctaacgcaggtgtttaagataacagcaacagtgactctgttttttttcccctcttttggtgaaaagagatataagatgaaataagtaaccttttgattcttatgaagttatttgaggattcgttaactacagagaaaaataatggacgacctacttagttctcttctgc

SEQ ID NO: 3235 - protein, 524 aa, Arabidopsis thaliana
  peptide (1)..(524): Ceres Seq. ID no. 12371174
  misc_feature (18)..(524): NCBI GI NO: 15231620 NR Description: MATE efflux family protein, putative
  misc_feature (24)..(519): NCBI GI NO: 15233127 NR Description: integral membrane protein, putative
  misc_feature (24)..(519): NCBI GI NO: 20466556 NR Description: integral membrane protein, putative
  misc_feature (45)..(509): NCBI GI NO: 15081773 NR Description: At1g61890/F8K4_9 [Arabidopsis thaliana]
  misc_feature (45)..(509): NCBI GI NO: 18407368 NR Description: expressed protein; protein id: At1g61890
  misc_feature (14)..(521): NCBI GI NO: 18415793 NR Description: putative protein; protein id: At4g21910.1
  misc_feature (14)..(521): NCBI GI NO: 21553843 NR Description: unknown [Arabidopsis thaliana]
  misc_feature (68)..(509): NCBI GI NO: 15221073 NR Description: unknown protein; protein id: At1g11670.1
  misc_feature (68)..(509): NCBI GI NO: 22655139 NR Description: unknown protein [Arabidopsis thaliana]
  misc_feature (53)..(518): NCBI GI NO: 15220246 NR Description: unknown protein; protein id: At1g47530
QHQKKREKKNRGTNKRTMSSTETYEPLLTRLHSDSQITERSSPEIEEFLRRRGSTVTPRWWLKLAVWESKLLWTLSGASIVVSVLNYMLSFVTVMFTGHLGSLQLAGASIATVGIQGLAYGIMLGMASAVQTVCGQAYGARQYSSMGIICQRAMVLHLAAAVFLTFLYWYSGPILKTMGQSVAIAHEGQIFARGMIPQIYAFALACPMQRFLQAQNIVNPLAYMSLGVFLLHTLLTWLVTNVLDFGLLGAALILSFSWWLLVAVNGMYILMSPNCKETWTGFSTRAFRGIWPYFKLTVASAVMLCLEIWYNQGLVIISGLLSNPTISLDAISICMYYLNWDMQFMLGLSAAISVRVSNELGAGNPRVAMLSVVVVNITTVLISSVLCVIVLVFRVGLSKAFTSDAEVIAAVSDLFPLLAVSIFLNGIQPILSGVAIGSGWQAVVAYVNLVTYYVIGLPIGCVLGFKTSLGVAGIWWGMIAGVILQTLTLIVLTLKTNWTSEVENAAQRVKTSATENQEMANAGV

SEQ ID NO: 3236 - protein, 507 aa, Arabidopsis thaliana
  peptide (1)..(507): Ceres Seq. ID no. 12371175
  misc_feature (1)..(507): NCBI GI NO: 15231620 NR Description: MATE efflux family protein, putative
  misc_feature (7)..(502): NCBI GI NO: 15233127 NR Description: integral membrane protein, putative
  misc_feature (7)..(502): NCBI GI NO: 20466556 NR Description: integral membrane protein, putative
  misc_feature (28)..(492): NCBI GI NO: 15081773 NR Description: At1g61890/F8K4_9 [Arabidopsis thaliana]
  misc_feature (28)..(492): NCBI GI NO: 18407368 NR Description: expressed protein; protein id: At1g61890
  misc_feature (1)..(504): NCBI GI NO: 18415793 NR Description: putative protein; protein id: At4g21910.1
  misc_feature (1)..(504): NCBI GI NO: 21553843 NR Description: unknown [Arabidopsis thaliana]
  misc_feature (51)..(492): NCBI GI NO: 15221073 NR Description: unknown protein; protein id: At1g11670.1
  misc_feature (51)..(492): NCBI GI NO: 22655139 NR Description: unknown protein [Arabidopsis thaliana]
  misc_feature (36)..(501): NCBI GI NO: 15220246 NR Description: unknown protein; protein id: At1g47530
MSSTETYEPLLTRLHSDSQITERSSPEIEEFLRRRGSTVTPRWWLKLAVWESKLLWTLSGASIVVSVLNYMLSFVTVMFTGHLGSLQLAGASIATVGIQGLAYGIMLGMASAVQTVCGQAYGARQYSSMGIICQRAMVLHLAAAVFLTFLYWYSGPILKTMGQSVAIAHEGQIFARGMIPQIYAFALACPMQRFLQAQNIVNPLAYMSLGVFLLHTLLTWLVTNVLDFGLLGAALILSFSWWLLVAVNGMYILMSPNCKETWTGFSTRAFRGIWPYFKLTVASAVMLCLEIWYNQGLVIISGLLSNPTISLDAISICMYYLNWDMQFMLGLSAAISVRVSNELGAGNPRVAMLSVVVVNITTVLISSVLCVIVLVFRVGLSKAFTSDAEVIAAVSDLFPLLAVSIFLNGIQPILSGVAIGSGWQAVVAYVNLVTYYVIGLPIGCVLGFKTSLGVAGIWWGMIAGVILQTLTLIVLTLKTNWTSEVENAAQRVKTSATENQEMANAGV

SEQ ID NO: 3237 - protein, 437 aa, Arabidopsis thaliana
  peptide (1)..(437): Ceres Seq. ID no. 12371176
  misc_feature (1)..(437): NCBI GI NO: 15231620 NR Description: MATE efflux family protein, putative
  misc_feature (1)..(432): NCBI GI NO: 15233127 NR Description: integral membrane protein, putative
  misc_feature (1)..(432): NCBI GI NO: 20466556 NR Description: integral membrane protein, putative
  misc_feature (1)..(422): NCBI GI NO: 15081773 NR Description: At1g61890/F8K4_9 [Arabidopsis thaliana]
  misc_feature (1)..(422): NCBI GI NO: 18407368 NR Description: expressed protein; protein id: At1g61890
  misc_feature (1)..(434): NCBI GI NO: 18415793 NR Description: putative protein; protein id: At4g21910.1
  misc_feature (1)..(434): NCBI GI NO: 21553843 NR Description: unknown [Arabidopsis thaliana]
  misc_feature (1)..(422): NCBI GI NO: 15221073 NR Description: unknown protein; protein id: At1g11670.1
  misc_feature (1)..(422): NCBI GI NO: 22655139 NR Description: unknown protein [Arabidopsis thaliana]
  misc_feature (1)..(431): NCBI GI NO: 15220246 NR Description: unknown protein; protein id: At1g47530
MLSFVTVMFTGHLGSLQLAGASIATVGIQGLAYGIMLGMASAVQTVCGQAYGARQYSSMGIICQRAMVLHLAAAVFLTFLYWYSGPILKTMGQSVAIAHEGQIFARGMIPQIYAFALACPMQRFLQAQNIVNPLAYMSLGVFLLHTLLTWLVTNVLDFGLLGAALILSFSWWLLVAVNGMYILMSPNCKETWTGFSTRAFRGIWPYFKLTVASAVMLCLEIWYNQGLVIISGLLSNPTISLDAISICMYYLNWDMQFMLGLSAAISVRVSNELGAGNPRVAMLSVVVVNITTVLISSVLCVIVLVFRVGLSKAFTSDAEVIAAVSDLFPLLAVSIFLNGIQPILSGVAIGSGWQAVVAYVNLVTYYVIGLPIGCVLGFKTSLGVAGIWWGMIAGVILQTLTLIVLTLKTNWTSEVENAAQRVKTSATENQEMANAGV

SEQ ID NO: 3238 - DNA, 1302 bp, Arabidopsis thaliana
  misc_feature (1)..(1302): Ceres Seq. ID no. 12604854
gtgaacttaacgtctctctctattcctctgcttctctctttctccctgtgaaaaaatggactcggtggctctctactgcaccgctggtctcattgccggcgccgtctactggttcatatgcgtcctaggtccagcagaacgaaaaggcaaacgagcctctgatctctccggcggctcaatctccgcagaaaaagtcaaagacaactataaccaatactggtctttcttccgcaaaccaaaagagatcgaatcagccgagaaagtacctgacttcgtcgacacgttctacaatcttgtcactgatatctacgagtggggatggggacaatctttccatttctctcctcatgtccctggaaaatccgacaaagacgccacaagaatccacgaagaaatggccgtcgatctcatcaaagtgaaaccgggacaaaagattcttgacgctggttgcggcgtgggtgggccgatgagagccatcgcggcccattccaaggcccaagtcactggaatcactatcaacgagtaccaagtgcaacgagccaagcttcacaacaagaaagctggacttgattctctctgcaacgtcgtttgtggtaactttttaaagatgccgttcgatgaaaacacgtttgacggagcttactcgatcgaagctacgtgtcacgctcctaagctcgaagaagtatactcggagatcttcagagtgatgaaaccaggatctttgttcgtgtcctacgaatgggtcaccactgaaaaatacagagacgatgacgaagaacacaaggacgtgattcaagggatcgagagaggagacgcacttcctggactaagaagctacgctgatatagccgtgacggcgaagaaagttgggtttgaggtagtgaaggagaaagatttggctaaaccaccgtctaaaccgtggtggaaccggttaaagatgggaaggattgcttattggagaaaccatgttgtggttgtgattctttctgctattggggttgctcctaaaggaactgttgatgttcataagatgttgtttaagactgctgattatttgaccagaggtggtgagactggaatcttctctccgatgcatatgattctctgtagaaaaccagagaaagcttctgaatgaatgattgagaatcttcttccttgttctcgtttttcttcttctttctttctaagttcatgttttgccccttaagaatctctttgtcgtcgtattaatgttatcactttgttgtttattgtatttttttttttcaatttgatttgtttaaattgatgatggatcactgg

SEQ ID NO: 3239 - protein, 359 aa, Arabidopsis thaliana
  peptide (1)..(359): Ceres Seq. ID no. 12604855
  misc_feature (82)..(281): Pfam Name: Pfam Description:  ubiE/COQ5 methyltransferase family
  misc_feature (1)..(359): NCBI GI NO: 15222955 NR Description: S-adenosyl-methionine-sterol-C-methyltransferase
  misc_feature (1)..(359): NCBI GI NO: 2246456 NR Description: S-adenosyl-methionine-sterol-C-methyltransferase
  misc_feature (1)..(359): NCBI GI NO: 15217917 NR Description: sterol-C-methyltransferase; protein id: At1g20330
  misc_feature (1)..(359): NCBI GI NO: 22136020 NR Description: 24-sterol C-methyltransferase
  misc_feature (1)..(359): NCBI GI NO: 23397216 NR Description: putative sterol-C-methyltransferase
  misc_feature (1)..(359): NCBI GI NO: 1061040 NR Description: sterol-C-methyltransferase [Arabidopsis thaliana]
  misc_feature (1)..(359): NCBI GI NO: 21555010 NR Description: sterol-C-methyltransferase [Arabidopsis thaliana]
  misc_feature (1)..(356): NCBI GI NO: 7443718 NR Description: probable sterol 24-C-methyltransferase (EC 2
  misc_feature (9)..(356): NCBI GI NO: 7443717 NR Description: probable sterol 24-C-methyltransferase (EC 2
  misc_feature (1)..(354): NCBI GI NO: 3560533 NR Description: 24-methylene lophenol C24(1)methyltransferase
MDSVALYCTAGLIAGAVYWFICVLGPAERKGKRASDLSGGSISAEKVKDNYNQYWSFFRKPKEIESAEKVPDFVDTFYNLVTDIYEWGWGQSFHFSPHVPGKSDKDATRIHEEMAVDLIKVKPGQKILDAGCGVGGPMRAIAAHSKAQVTGITINEYQVQRAKLHNKKAGLDSLCNVVCGNFLKMPFDENTFDGAYSIEATCHAPKLEEVYSEIFRVMKPGSLFVSYEWVTTEKYRDDDEEHKDVIQGIERGDALPGLRSYADIAVTAKKVGFEVVKEKDLAKPPSKPWWNRLKMGRIAYWRNHVVVVILSAIGVAPKGTVDVHKMLFKTADYLTRGGETGIFSPMHMILCRKPEKASE

SEQ ID NO: 3240 - protein, 246 aa, Arabidopsis thaliana
  peptide (1)..(246): Ceres Seq. ID no. 12604856
  misc_feature (1)..(168): Pfam Name: Pfam Description:  ubiE/COQ5 methyltransferase family
  misc_feature (1)..(246): NCBI GI NO: 15222955 NR Description: S-adenosyl-methionine-sterol-C-methyltransferase
  misc_feature (1)..(246): NCBI GI NO: 2246456 NR Description: S-adenosyl-methionine-sterol-C-methyltransferase
  misc_feature (1)..(246): NCBI GI NO: 15217917 NR Description: sterol-C-methyltransferase; protein id: At1g20330
  misc_feature (1)..(246): NCBI GI NO: 22136020 NR Description: 24-sterol C-methyltransferase
  misc_feature (1)..(246): NCBI GI NO: 23397216 NR Description: putative sterol-C-methyltransferase
  misc_feature (1)..(246): NCBI GI NO: 1061040 NR Description: sterol-C-methyltransferase [Arabidopsis thaliana]
  misc_feature (1)..(246): NCBI GI NO: 21555010 NR Description: sterol-C-methyltransferase [Arabidopsis thaliana]
  misc_feature (1)..(243): NCBI GI NO: 7443718 NR Description: probable sterol 24-C-methyltransferase (EC 2
  misc_feature (1)..(243): NCBI GI NO: 7443717 NR Description: probable sterol 24-C-methyltransferase (EC 2
  misc_feature (1)..(241): NCBI GI NO: 3560533 NR Description: 24-methylene lophenol C24(1)methyltransferase
MAVDLIKVKPGQKILDAGCGVGGPMRAIAAHSKAQVTGITINEYQVQRAKLHNKKAGLDSLCNVVCGNFLKMPFDENTFDGAYSIEATCHAPKLEEVYSEIFRVMKPGSLFVSYEWVTTEKYRDDDEEHKDVIQGIERGDALPGLRSYADIAVTAKKVGFEVVKEKDLAKPPSKPWWNRLKMGRIAYWRNHVVVVILSAIGVAPKGTVDVHKMLFKTADYLTRGGETGIFSPMHMILCRKPEKASE

SEQ ID NO: 3241 - protein, 222 aa, Arabidopsis thaliana
  peptide (1)..(222): Ceres Seq. ID no. 12604857
  misc_feature (1)..(144): Pfam Name: Pfam Description:  ubiE/COQ5 methyltransferase family
  misc_feature (1)..(222): NCBI GI NO: 15222955 NR Description: S-adenosyl-methionine-sterol-C-methyltransferase
  misc_feature (1)..(222): NCBI GI NO: 2246456 NR Description: S-adenosyl-methionine-sterol-C-methyltransferase
  misc_feature (1)..(222): NCBI GI NO: 15217917 NR Description: sterol-C-methyltransferase; protein id: At1g20330
  misc_feature (1)..(222): NCBI GI NO: 22136020 NR Description: 24-sterol C-methyltransferase
  misc_feature (1)..(222): NCBI GI NO: 23397216 NR Description: putative sterol-C-methyltransferase
  misc_feature (1)..(222): NCBI GI NO: 1061040 NR Description: sterol-C-methyltransferase [Arabidopsis thaliana]
  misc_feature (1)..(222): NCBI GI NO: 21555010 NR Description: sterol-C-methyltransferase [Arabidopsis thaliana]
  misc_feature (1)..(219): NCBI GI NO: 7443718 NR Description: probable sterol 24-C-methyltransferase (EC 2
  misc_feature (1)..(219): NCBI GI NO: 7443717 NR Description: probable sterol 24-C-methyltransferase (EC 2
  misc_feature (1)..(217): NCBI GI NO: 3560533 NR Description: 24-methylene lophenol C24(1)methyltransferase
MRAIAAHSKAQVTGITINEYQVQRAKLHNKKAGLDSLCNVVCGNFLKMPFDENTFDGAYSIEATCHAPKLEEVYSEIFRVMKPGSLFVSYEWVTTEKYRDDDEEHKDVIQGIERGDALPGLRSYADIAVTAKKVGFEVVKEKDLAKPPSKPWWNRLKMGRIAYWRNHVVVVILSAIGVAPKGTVDVHKMLFKTADYLTRGGETGIFSPMHMILCRKPEKASE

SEQ ID NO: 3242 - DNA, 718 bp, Arabidopsis thaliana
  misc_feature (1)..(718): Ceres Seq. ID no. 12337883
cttcgtctctgtctccaaaatcgaatcaaaatctctaaagtttcaatttttttgttctgttctttttttttttttaaagaatggcttcaatttctgcaactttgccttcgccattgttactcacacagagaaaatccaatctcacatcgattcaaaaactcccattttctctaactcgaggtacgaatgatctttctccattatctcttactcgaaaccctagcagcatcagtctgatggtgaaagctagtggagaaagctcagattcatcgactgatctcgacgttgttagtacgattcagaatgtttgggataagtctgaagataggttaggtcttattggtttgggttttgctggtattgtagctctttgggcatcattgaatctcatcacggcaattgacaaatttgcccgttatctcgagcggattcgaactagttggtatcttgttctccacgtggttcacatatcgatatctcttgttcaaaccggacagacaggagctttcgaaaattgtcaagaaatcagtagcggatatacttggccagtgaaccttgtgtgtgtgataatacttcatctttggaagatgatttgtttgcaagtttgtaaaattacatgacagggtggttgttgtttctagtccaataatgtcatgcatttgaaacctgtaaatactttattgttggtttttggttgtgagcaaaatcaatcttttct

SEQ ID NO: 3243 - protein, 179 aa, Arabidopsis thaliana
  peptide (1)..(179): Ceres Seq. ID no. 12337884
  misc_feature (1)..(109): NCBI GI NO: 18403896 NR Description: expressed protein; protein id: At1g52220
  misc_feature (1)..(109): NCBI GI NO: 21554231 NR Description: unknown [Arabidopsis thaliana]
  misc_feature (1)..(109): NCBI GI NO: 34909746 NR Description: contains ESTsAU066201
  misc_feature (1)..(109): NCBI GI NO: 18407178 NR Description: expressed protein; protein id: At2g46820
  misc_feature (1)..(109): NCBI GI NO: 21555057 NR Description: unknown [Arabidopsis thaliana]
  misc_feature (48)..(109): NCBI GI NO: 34393236 NR Description: unknown protein
  misc_feature (46)..(108): NCBI GI NO: 38175474 NR Description: unknown protein
MASISATLPSPLLLTQRKSNLTSIQKLPFSLTRGTNDLSPLSLTRNPSSISLMVKASGESSDSSTDLDVVSTIQNVWDKSEDRLGLIGLGFAGIVALWASLNLITAIDKFARYLERIRTSWYLVLHVVHISISLVQTGQTGAFENCQEISSGYTWPVNLVCVIILHLWKMICLQVCKIT

SEQ ID NO: 3244 - protein, 127 aa, Arabidopsis thaliana
  peptide (1)..(127): Ceres Seq. ID no. 12337885
  misc_feature (1)..(57): NCBI GI NO: 18403896 NR Description: expressed protein; protein id: At1g52220
  misc_feature (1)..(57): NCBI GI NO: 21554231 NR Description: unknown [Arabidopsis thaliana]
  misc_feature (1)..(57): NCBI GI NO: 34909746 NR Description: contains ESTsAU066201
  misc_feature (1)..(57): NCBI GI NO: 18407178 NR Description: expressed protein; protein id: At2g46820
  misc_feature (1)..(57): NCBI GI NO: 21555057 NR Description: unknown [Arabidopsis thaliana]
  misc_feature (1)..(57): NCBI GI NO: 34393236 NR Description: unknown protein
  misc_feature (1)..(56): NCBI GI NO: 38175474 NR Description: unknown protein
MVKASGESSDSSTDLDVVSTIQNVWDKSEDRLGLIGLGFAGIVALWASLNLITAIDKFARYLERIRTSWYLVLHVVHISISLVQTGQTGAFENCQEISSGYTWPVNLVCVIILHLWKMICLQVCKIT

SEQ ID NO: 3245 - DNA, 1390 bp, Arabidopsis thaliana
  misc_feature (1)..(1390): Ceres Seq. ID no. 12329134
gcctaggatctgttcttcccaaaacgactcatgccgtccattcgattcggaatatagttgtagaggagatttcatttctaatcaatttcttcggtgatgagttccaccgcggcatcttccaccgtcggaggaggcggatcgtctgagatttccggtgtcaaaaaaacctccaagcgaccaaaatattctaggtttactcagcaagagcttccagcgtgcaagccaattcttactccaagatgggtgatcttgacatttcttgtcgctggggttgtcttcattccccttggagtgatctgcttatttgcttctcagggagtagtcgagattgttgatcgatatgacacagactgtattccaacatcttctagaaacaacatggtcgcttacatacagggtgaaggagataagatctgtaagagaacaataacggtgacaaaagctatgaagcatcctgtctatgtatactaccaacttgagaatttctaccaaaaccatagacggtatgtgaaaagtcgaaacgatgcacaactaagaagtccaaaagaagagcatgatgtgaagacctgtgcacctgaggataatgtgggtggagaaccaattgtgccatgtggtcttgttgcttggagtttgttcaacgatacttatagcttttcaagaaatagccaacaacttcttgtgaataagaaaggtatctcatggaagagtgacagagaaaacaagtttgggaaaaatgtcttccctaaaaattttcagaaaggagcaccaataggcggtggaactcttaatatttctaaaccgttgagtgagcaagaagacctcatagtctggatgcgaaccgcggctttgccaacgtttaggaagctgtatgggaagattgagacagacctacacgcgggtgataccataacggtcttgttgcagaacaactacaacacttacagcttcaatgggcagaagaagctagtgctgtcaacaactagctggctcggcggaaggaatgatttcctcgggattgcttatctgactgtaggcagtatttgcttgttcttggctgttacatttgccgtattgtatctagttaagccaaggcaactcggagacccctcgtacctttcgtggaacagaagtgctggaggtttacagtaatagagcccttcgagcatcaggcgttgatccctccatcgtcaaacggcgtggttttggcttagctaacaaaagagaaaaaacgaaaataagtatatagttcgtttataattttgatattgttgaaaacaaacgtttgtgttttgtcctgttgttgttaagatactagccagtaaatggtgtttagaaaataatgtaaatgaattacagttggaaattgcaaaataagcagagaattttgtcc

SEQ ID NO: 3246 - protein, 350 aa, Arabidopsis thaliana
  peptide (1)..(350): Ceres Seq. ID no. 12329135
  misc_feature (75)..(338): Pfam Name: ligand-effect modulator 3 Pfam Description: LEM3
  misc_feature (1)..(350): NCBI GI NO: 18412377 NR Description: membrane protein common family
  misc_feature (33)..(350): NCBI GI NO: 25347301 NR Description: T8K14.13 [imported] - Arabidopsis thaliana
  misc_feature (44)..(348): NCBI GI NO: 25347303 NR Description: protein F3O9.16 [imported] - Arabidopsis thaliana
  misc_feature (31)..(75): NCBI GI NO: 25347303 NR Description: protein F3O9.16 [imported] - Arabidopsis thaliana
  misc_feature (1)..(348): NCBI GI NO: 18404877 NR Description: membrane protein common family
  misc_feature (2)..(348): NCBI GI NO: 18399730 NR Description: membrane protein common family
  misc_feature (50)..(348): NCBI GI NO: 15219220 NR Description: membrane protein common family
  misc_feature (25)..(346): NCBI GI NO: 18422638 NR Description: membrane protein common family
  misc_feature (25)..(346): NCBI GI NO: 21554054 NR Description: unknown [Arabidopsis thaliana]
  misc_feature (25)..(332): NCBI GI NO: 9757735 NR Description: gb|AAD25612
MSSTAASSTVGGGGSSEISGVKKTSKRPKYSRFTQQELPACKPILTPRWVILTFLVAGVVFIPLGVICLFASQGVVEIVDRYDTDCIPTSSRNNMVAYIQGEGDKICKRTITVTKAMKHPVYVYYQLENFYQNHRRYVKSRNDAQLRSPKEEHDVKTCAPEDNVGGEPIVPCGLVAWSLFNDTYSFSRNSQQLLVNKKGISWKSDRENKFGKNVFPKNFQKGAPIGGGTLNISKPLSEQEDLIVWMRTAALPTFRKLYGKIETDLHAGDTITVLLQNNYNTYSFNGQKKLVLSTTSWLGGRNDFLGIAYLTVGSICLFLAVTFAVLYLVKPRQLGDPSYLSWNRSAGGLQ

SEQ ID NO: 3247 - protein, 256 aa, Arabidopsis thaliana
  peptide (1)..(256): Ceres Seq. ID no. 12329136
  misc_feature (1)..(244): Pfam Name: ligand-effect modulator 3 Pfam Description: LEM3
  misc_feature (1)..(256): NCBI GI NO: 18412377 NR Description: membrane protein common family
  misc_feature (1)..(256): NCBI GI NO: 25347301 NR Description: T8K14.13 [imported] - Arabidopsis thaliana
  misc_feature (1)..(254): NCBI GI NO: 25347303 NR Description: protein F3O9.16 [imported] - Arabidopsis thaliana
  misc_feature (1)..(254): NCBI GI NO: 18404877 NR Description: membrane protein common family
  misc_feature (1)..(254): NCBI GI NO: 18399730 NR Description: membrane protein common family
  misc_feature (1)..(254): NCBI GI NO: 15219220 NR Description: membrane protein common family
  misc_feature (1)..(252): NCBI GI NO: 18422638 NR Description: membrane protein common family
  misc_feature (1)..(252): NCBI GI NO: 21554054 NR Description: unknown [Arabidopsis thaliana]
  misc_feature (1)..(238): NCBI GI NO: 9757735 NR Description: gb|AAD25612
  misc_feature (1)..(247): NCBI GI NO: 19570056 NR Description: similar to membrane protein common family
MVAYIQGEGDKICKRTITVTKAMKHPVYVYYQLENFYQNHRRYVKSRNDAQLRSPKEEHDVKTCAPEDNVGGEPIVPCGLVAWSLFNDTYSFSRNSQQLLVNKKGISWKSDRENKFGKNVFPKNFQKGAPIGGGTLNISKPLSEQEDLIVWMRTAALPTFRKLYGKIETDLHAGDTITVLLQNNYNTYSFNGQKKLVLSTTSWLGGRNDFLGIAYLTVGSICLFLAVTFAVLYLVKPRQLGDPSYLSWNRSAGGLQ

SEQ ID NO: 3248 - protein, 234 aa, Arabidopsis thaliana
  peptide (1)..(234): Ceres Seq. ID no. 12329137
  misc_feature (1)..(222): Pfam Name: ligand-effect modulator 3 Pfam Description: LEM3
  misc_feature (1)..(234): NCBI GI NO: 18412377 NR Description: membrane protein common family
  misc_feature (1)..(234): NCBI GI NO: 25347301 NR Description: T8K14.13 [imported] - Arabidopsis thaliana
  misc_feature (1)..(232): NCBI GI NO: 25347303 NR Description: protein F3O9.16 [imported] - Arabidopsis thaliana
  misc_feature (1)..(232): NCBI GI NO: 18404877 NR Description: membrane protein common family
  misc_feature (1)..(232): NCBI GI NO: 18399730 NR Description: membrane protein common family
  misc_feature (1)..(232): NCBI GI NO: 15219220 NR Description: membrane protein common family
  misc_feature (1)..(230): NCBI GI NO: 18422638 NR Description: membrane protein common family
  misc_feature (1)..(230): NCBI GI NO: 21554054 NR Description: unknown [Arabidopsis thaliana]
  misc_feature (1)..(216): NCBI GI NO: 9757735 NR Description: gb|AAD25612
  misc_feature (1)..(225): NCBI GI NO: 19570056 NR Description: similar to membrane protein common family
MKHPVYVYYQLENFYQNHRRYVKSRNDAQLRSPKEEHDVKTCAPEDNVGGEPIVPCGLVAWSLFNDTYSFSRNSQQLLVNKKGISWKSDRENKFGKNVFPKNFQKGAPIGGGTLNISKPLSEQEDLIVWMRTAALPTFRKLYGKIETDLHAGDTITVLLQNNYNTYSFNGQKKLVLSTTSWLGGRNDFLGIAYLTVGSICLFLAVTFAVLYLVKPRQLGDPSYLSWNRSAGGLQ

SEQ ID NO: 3249 - DNA, 1284 bp, Arabidopsis thaliana
  misc_feature (1)..(1284): Ceres Seq. ID no. 12579452
aagaataaaagaagtaacggaatatattgaactcatcagaagctgaatcggagaagaagaattaacgatgacggcgacgaacaagcaggtggtattgaaaaactacgtgagtggtttccctaaggaatccgatttcgatttcaaaaccaccaccgtcgaatttaaacttccgggagggtctaactcagttctggtgaagaatctctacttgtcatgcgatccttacatgaggattcgcatggggaaacctgatccttccactgctgctcttgctcaagcttacgctcccggcaagccaatctttgggtatggagtgtctagagttatagaatctgggcatccagattacaagaaaggtgacttactctgggggatagttggatgggaggagtatagtgttattactccaatgactcacatgcatttcaagatccaacataccgatattccattatcttactacactggacttctcggtatgcctggtatgactgcctatgctgggttttatgaagtttgttctccaaaggaaggagagacagtttatgtgtcagctgcatctggtgctgttggtcagcttgtgggacaatttgctaagatgatgggctgttatgttgttggaagcgccggaagtacagagaaggttgatcttctgaagaccaagtttgggtttgatgatgcatttaactacaaggaagaaccagaccttagtgctgccctcaaaaggtgtttccctacaggcattgacatatactttgaaaacgtaggaggcaaaatgctagacgcagtgctattaaacatgaacccacacggacgtatcgctgtgtgtggaatgatctcacagtacaatcttgaaaaccaagaaggtgtacacaacctatccaacataatctacaaaagaatccgcattcaaggctttgcagtgtttgatttctacgagaaatactcaaagttcttggattttgtgcttccgcacattaaagaagggaagatcacgtacgtggaagatgtagctgatgggcttgagaaaggtcctgaagctcttgtgggactcttccatggtaagaacgttggaaaacaagttgttgttattgctcgtgagtgaatatatatatctatgggagtaatgttgtatgtatccaaaagattttgtatgggtgttcgaatccaagcctgaggttttggtttataaatactagattactagtaattcaagtaattttttaatatgtatcaatttgttcgttcgttatggttttgaatcattttctgtgtgacttgttt

SEQ ID NO: 3250 - protein, 345 aa, Arabidopsis thaliana
  peptide (1)..(345): Ceres Seq. ID no. 12579453
  misc_feature (126)..(342): Pfam Name: Pfam Description:  Zinc-binding dehydrogenase
  misc_feature (1)..(345): NCBI GI NO: 22326861 NR Description: quinone oxidoreductase - like protein
  misc_feature (1)..(345): NCBI GI NO: 17529140 NR Description: putative quinone oxidoreductase
  misc_feature (1)..(345): NCBI GI NO: 11358742 NR Description: quinone oxidoreductase-like protein
  misc_feature (1)..(345): NCBI GI NO: 15237888 NR Description: quinone oxidoreductase -like protein
  misc_feature (1)..(345): NCBI GI NO: 21539447 NR Description: quinone oxidoreductase-like protein
  misc_feature (1)..(345): NCBI GI NO: 15237890 NR Description: quinone oxidoreductase - like protein
  misc_feature (1)..(345): NCBI GI NO: 21554121 NR Description: quinone oxidoreductase-like protein
  misc_feature (1)..(345): NCBI GI NO: 1362014 NR Description: probable NADPH2:quinone reductase (EC 1
  misc_feature (2)..(345): NCBI GI NO: 15228456 NR Description: putative NADP-dependent oxidoreductase
  misc_feature (1)..(345): NCBI GI NO: 21593645 NR Description: allyl alcohol dehydrogenase, putative
MTATNKQVVLKNYVSGFPKESDFDFKTTTVEFKLPGGSNSVLVKNLYLSCDPYMRIRMGKPDPSTAALAQAYAPGKPIFGYGVSRVIESGHPDYKKGDLLWGIVGWEEYSVITPMTHMHFKIQHTDIPLSYYTGLLGMPGMTAYAGFYEVCSPKEGETVYVSAASGAVGQLVGQFAKMMGCYVVGSAGSTEKVDLLKTKFGFDDAFNYKEEPDLSAALKRCFPTGIDIYFENVGGKMLDAVLLNMNPHGRIAVCGMISQYNLENQEGVHNLSNIIYKRIRIQGFAVFDFYEKYSKFLDFVLPHIKEGKITYVEDVADGLEKGPEALVGLFHGKNVGKQVVVIARE

SEQ ID NO: 3251 - protein, 292 aa, Arabidopsis thaliana
  peptide (1)..(292): Ceres Seq. ID no. 12579454
  misc_feature (73)..(289): Pfam Name: Pfam Description:  Zinc-binding dehydrogenase
  misc_feature (1)..(292): NCBI GI NO: 22326861 NR Description: quinone oxidoreductase - like protein
  misc_feature (1)..(292): NCBI GI NO: 17529140 NR Description: putative quinone oxidoreductase
  misc_feature (1)..(292): NCBI GI NO: 11358742 NR Description: quinone oxidoreductase-like protein
  misc_feature (1)..(292): NCBI GI NO: 15237888 NR Description: quinone oxidoreductase -like protein
  misc_feature (1)..(292): NCBI GI NO: 21539447 NR Description: quinone oxidoreductase-like protein
  misc_feature (1)..(292): NCBI GI NO: 15237890 NR Description: quinone oxidoreductase - like protein
  misc_feature (1)..(292): NCBI GI NO: 21554121 NR Description: quinone oxidoreductase-like protein
  misc_feature (1)..(292): NCBI GI NO: 1362014 NR Description: probable NADPH2:quinone reductase (EC 1
  misc_feature (1)..(292): NCBI GI NO: 15228456 NR Description: putative NADP-dependent oxidoreductase
  misc_feature (1)..(292): NCBI GI NO: 21593645 NR Description: allyl alcohol dehydrogenase, putative
MRIRMGKPDPSTAALAQAYAPGKPIFGYGVSRVIESGHPDYKKGDLLWGIVGWEEYSVITPMTHMHFKIQHTDIPLSYYTGLLGMPGMTAYAGFYEVCSPKEGETVYVSAASGAVGQLVGQFAKMMGCYVVGSAGSTEKVDLLKTKFGFDDAFNYKEEPDLSAALKRCFPTGIDIYFENVGGKMLDAVLLNMNPHGRIAVCGMISQYNLENQEGVHNLSNIIYKRIRIQGFAVFDFYEKYSKFLDFVLPHIKEGKITYVEDVADGLEKGPEALVGLFHGKNVGKQVVVIARE

SEQ ID NO: 3252 - protein, 288 aa, Arabidopsis thaliana
  peptide (1)..(288): Ceres Seq. ID no. 12579455
  misc_feature (69)..(285): Pfam Name: Pfam Description:  Zinc-binding dehydrogenase
  misc_feature (1)..(288): NCBI GI NO: 22326861 NR Description: quinone oxidoreductase - like protein
  misc_feature (1)..(288): NCBI GI NO: 17529140 NR Description: putative quinone oxidoreductase
  misc_feature (1)..(288): NCBI GI NO: 11358742 NR Description: quinone oxidoreductase-like protein
  misc_feature (1)..(288): NCBI GI NO: 15237888 NR Description: quinone oxidoreductase -like protein
  misc_feature (1)..(288): NCBI GI NO: 21539447 NR Description: quinone oxidoreductase-like protein
  misc_feature (1)..(288): NCBI GI NO: 15237890 NR Description: quinone oxidoreductase - like protein
  misc_feature (1)..(288): NCBI GI NO: 21554121 NR Description: quinone oxidoreductase-like protein
  misc_feature (1)..(288): NCBI GI NO: 1362014 NR Description: probable NADPH2:quinone reductase (EC 1
  misc_feature (1)..(288): NCBI GI NO: 15228456 NR Description: putative NADP-dependent oxidoreductase
  misc_feature (1)..(288): NCBI GI NO: 21593645 NR Description: allyl alcohol dehydrogenase, putative
MGKPDPSTAALAQAYAPGKPIFGYGVSRVIESGHPDYKKGDLLWGIVGWEEYSVITPMTHMHFKIQHTDIPLSYYTGLLGMPGMTAYAGFYEVCSPKEGETVYVSAASGAVGQLVGQFAKMMGCYVVGSAGSTEKVDLLKTKFGFDDAFNYKEEPDLSAALKRCFPTGIDIYFENVGGKMLDAVLLNMNPHGRIAVCGMISQYNLENQEGVHNLSNIIYKRIRIQGFAVFDFYEKYSKFLDFVLPHIKEGKITYVEDVADGLEKGPEALVGLFHGKNVGKQVVVIARE

SEQ ID NO: 3253 - DNA, 1458 bp, Arabidopsis thaliana
  misc_feature (1)..(1458): Ceres Seq. ID no. 13602851
aaagtattattccgaatgtaaatagtggaacaaaaagaacagctgggaggattttgtttaaaaggacactacacttcccagctttccctcactgcccgaaaagaacactgcagaaacactttcctctgttcacagagaaagagagagatgatgctttacagcaacaatagttggagatcgaattccattttaatacttctacttggtctctccattgtggccgccgcagactccgccggcaaaacttcaccggtcgaagacggcttggtggttaacggcgactttgagacaccgccgtcaaacggcttccctgatgacgcaatcatcgaggacacctccgagatcccgagctggcgatccgatggtacggtggagctaatcaagtccggtcaaaaacaaggcgggatgatcttgatcgtgcctgagggccgtcacgctgttagattaggaaacgatgcagagatcagccaagaacttacggtggagaaaggctctatctactccgtcacgttcagtgcagcccgcacatgtgcacaactcgagtcgctgaatgtttcggtagcttcttctgatgaacctatcgcatcgcaaaccattgacttgcaaacggtgtacagcgttcaaggatgggatccatatgcatgggcgtttgaagcggttgtggatcgcgtccggttggtttttaagaaccctggcatggaggatgatcctacttgtggacctatcattgacgacattgccgttaagaagctctttactcctgataaacccaaaggcaatgcagtgattaatggagattttgaagaaggtccatggatgtttaggaacactaccttaggtgttctgcttccaacaaacctcgatgaagaaatatcgtctcttcctggatggaccgtcgaatcgaaccgagcagtacggtttattgactcagaccatttctcggtccccgaggggaagcgagctttggaacttttatcgggcaaagaaggcataatttctcaaatggttgagacaaaggcgaacattccgtacaagatgtctttctctttgggacacgcaggggacaagtgtaaggaacctttggctgtaatggcttttgctggagatcaagcacagaactttcattatatggcgcaagcaaactcgagtttcgaaagatcggagttgaacttcactgcgaaagctgaacgtacgaggatcgccttctacagcatttattacaatacgaggacggacgatatgacttcattgtgtggacctgtgattgatgacgttaaggtttggttctccgggtctagtagaattggatttagttttccgctttttattcttctttctttggttttcatctagattgttccggttcagaaattgtattggtagaccgggaattaagacgggattccacgttgtatgatgtatcgttgtatgatggatcggttcaaggtacaagaaatg

SEQ ID NO: 3254 - protein, 401 aa, Arabidopsis thaliana
  peptide (1)..(401): Ceres Seq. ID no. 13602852
  misc_feature (55)..(382): Pfam Name: Pfam Description:  Protein of unknown function, DUF642
  misc_feature (1)..(401): NCBI GI NO: 15226760 NR Description: expressed protein [Arabidopsis thaliana]
  misc_feature (2)..(396): NCBI GI NO: 18397308 NR Description: expressed protein [Arabidopsis thaliana]
  misc_feature (7)..(401): NCBI GI NO: 34909656 NR Description: OJ1414_E05.5
  misc_feature (21)..(378): NCBI GI NO: 7488898 NR Description: hypothetical protein - castor bean
  misc_feature (38)..(378): NCBI GI NO: 18418018 NR Description: expressed protein [Arabidopsis thaliana]
  misc_feature (104)..(401): NCBI GI NO: 34913458 NR Description: P0702H08.18
  misc_feature (14)..(378): NCBI GI NO: 15239438 NR Description: expressed protein [Arabidopsis thaliana]
  misc_feature (14)..(378): NCBI GI NO: 15809822 NR Description: AT5g25460/F18G18_200 [Arabidopsis thaliana]
  misc_feature (38)..(378): NCBI GI NO: 23397043 NR Description: unknown protein [Arabidopsis thaliana]
  misc_feature (38)..(378): NCBI GI NO: 15239049 NR Description: expressed protein [Arabidopsis thaliana]
MMLYSNNSWRSNSILILLLGLSIVAAADSAGKTSPVEDGLVVNGDFETPPSNGFPDDAIIEDTSEIPSWRSDGTVELIKSGQKQGGMILIVPEGRHAVRLGNDAEISQELTVEKGSIYSVTFSAARTCAQLESLNVSVASSDEPIASQTIDLQTVYSVQGWDPYAWAFEAVVDRVRLVFKNPGMEDDPTCGPIIDDIAVKKLFTPDKPKGNAVINGDFEEGPWMFRNTTLGVLLPTNLDEEISSLPGWTVESNRAVRFIDSDHFSVPEGKRALELLSGKEGIISQMVETKANIPYKMSFSLGHAGDKCKEPLAVMAFAGDQAQNFHYMAQANSSFERSELNFTAKAERTRIAFYSIYYNTRTDDMTSLCGPVIDDVKVWFSGSSRIGFSFPLFILLSLVFI

SEQ ID NO: 3255 - protein, 400 aa, Arabidopsis thaliana
  peptide (1)..(400): Ceres Seq. ID no. 13602853
  misc_feature (54)..(381): Pfam Name: Pfam Description:  Protein of unknown function, DUF642
  misc_feature (1)..(400): NCBI GI NO: 15226760 NR Description: expressed protein [Arabidopsis thaliana]
  misc_feature (1)..(395): NCBI GI NO: 18397308 NR Description: expressed protein [Arabidopsis thaliana]
  misc_feature (6)..(400): NCBI GI NO: 34909656 NR Description: OJ1414_E05.5
  misc_feature (20)..(377): NCBI GI NO: 7488898 NR Description: hypothetical protein - castor bean
  misc_feature (37)..(377): NCBI GI NO: 18418018 NR Description: expressed protein [Arabidopsis thaliana]
  misc_feature (103)..(400): NCBI GI NO: 34913458 NR Description: P0702H08.18
  misc_feature (13)..(377): NCBI GI NO: 15239438 NR Description: expressed protein [Arabidopsis thaliana]
  misc_feature (13)..(377): NCBI GI NO: 15809822 NR Description: AT5g25460/F18G18_200 [Arabidopsis thaliana]
  misc_feature (37)..(377): NCBI GI NO: 23397043 NR Description: unknown protein [Arabidopsis thaliana]
  misc_feature (37)..(377): NCBI GI NO: 15239049 NR Description: expressed protein [Arabidopsis thaliana]
MLYSNNSWRSNSILILLLGLSIVAAADSAGKTSPVEDGLVVNGDFETPPSNGFPDDAIIEDTSEIPSWRSDGTVELIKSGQKQGGMILIVPEGRHAVRLGNDAEISQELTVEKGSIYSVTFSAARTCAQLESLNVSVASSDEPIASQTIDLQTVYSVQGWDPYAWAFEAVVDRVRLVFKNPGMEDDPTCGPIIDDIAVKKLFTPDKPKGNAVINGDFEEGPWMFRNTTLGVLLPTNLDEEISSLPGWTVESNRAVRFIDSDHFSVPEGKRALELLSGKEGIISQMVETKANIPYKMSFSLGHAGDKCKEPLAVMAFAGDQAQNFHYMAQANSSFERSELNFTAKAERTRIAFYSIYYNTRTDDMTSLCGPVIDDVKVWFSGSSRIGFSFPLFILLSLVFI

SEQ ID NO: 3256 - protein, 315 aa, Arabidopsis thaliana
  peptide (1)..(315): Ceres Seq. ID no. 13602854
  misc_feature (1)..(296): Pfam Name: Pfam Description:  Protein of unknown function, DUF642
  misc_feature (1)..(315): NCBI GI NO: 15226760 NR Description: expressed protein [Arabidopsis thaliana]
  misc_feature (1)..(310): NCBI GI NO: 18397308 NR Description: expressed protein [Arabidopsis thaliana]
  misc_feature (1)..(315): NCBI GI NO: 34909656 NR Description: OJ1414_E05.5
  misc_feature (1)..(292): NCBI GI NO: 7488898 NR Description: hypothetical protein - castor bean
  misc_feature (1)..(292): NCBI GI NO: 18418018 NR Description: expressed protein [Arabidopsis thaliana]
  misc_feature (18)..(315): NCBI GI NO: 34913458 NR Description: P0702H08.18
  misc_feature (1)..(292): NCBI GI NO: 15239438 NR Description: expressed protein [Arabidopsis thaliana]
  misc_feature (1)..(292): NCBI GI NO: 15809822 NR Description: AT5g25460/F18G18_200 [Arabidopsis thaliana]
  misc_feature (1)..(292): NCBI GI NO: 23397043 NR Description: unknown protein [Arabidopsis thaliana]
  misc_feature (1)..(292): NCBI GI NO: 15239049 NR Description: expressed protein [Arabidopsis thaliana]
MILIVPEGRHAVRLGNDAEISQELTVEKGSIYSVTFSAARTCAQLESLNVSVASSDEPIASQTIDLQTVYSVQGWDPYAWAFEAVVDRVRLVFKNPGMEDDPTCGPIIDDIAVKKLFTPDKPKGNAVINGDFEEGPWMFRNTTLGVLLPTNLDEEISSLPGWTVESNRAVRFIDSDHFSVPEGKRALELLSGKEGIISQMVETKANIPYKMSFSLGHAGDKCKEPLAVMAFAGDQAQNFHYMAQANSSFERSELNFTAKAERTRIAFYSIYYNTRTDDMTSLCGPVIDDVKVWFSGSSRIGFSFPLFILLSLVFI

SEQ ID NO: 3257 - DNA, 2400 bp, Arabidopsis thaliana
  misc_feature (1)..(2400): Ceres Seq. ID no. 12330240
acgtctgagaaaacaactcattcaaagtttgaaaactcatgggctcgctggagccgacccaggaacggcaaaaatctagaagcgccaagttttcttcaactctttaacgtcgttgttgtcttcgtcaccaagtaaaccctagatccacaatttcaacggaaatttcattcttcttcttcttcctcgcgaatctgttttttttttgatattcgattctactttccctttccatcaaaaaacatttcgtcgacgatttcacgcgatgtccttctccgattctggatcgtcctcttatggcggagattacaagaatttcagacaaatcaccagagaaagattactttgtgaaatgcttaggccagaaagaaatggaagctctaaattaacttggaaggtacttgtaatggacaagttcactgtgaagataatgtcatctgcttgcaaaatgtctgagatcacacaaggaggcatttctttggttgaggttataactaaacataggcaacctatgacagcaatggaagtcatatactttattcaaccgaccgaagagaatgtcactgcgtttttatcagatatgactggaaaatcaccactttacaagaaggcttttgttttctttagttctcctgtttcgagaagcttagttaatgtcattaagaaggacatgagagcaatgaaacgaattgggggattgaaagagatgaacttggagtatattagcatggacatccagggctttgttacaaataatgaaaatgctttagaagagcttttctgtgacgacgaaaaccatcaaagagcagatgcttgcttaaatgtggtagctaaaagaattgctacagttttggcctcactaaaggaatatccctttgttcgctaccgcggagccaaagctcttgatgccacaacaatgacaacttaccgagagttgattcctacaaagcttgctgctagtgtatggaattgtcttgcaagatacaaacagacaatcgaagattttcctcagactgaaacatgcgaactacttatcttggatcgatccatagaccagatcgcacctctcattcatgagtggacatatgatgcgatgtgccacgatttgcttaatatggaaggaaataaatacacacacgaggttccgagtaaaactggtgataaacctgagaagaaagaggttcttctagatgaggaagattccatttgggtggagcttcgtgatgctcatattgcagatgcaagtgaaagattgcatgaaaagatgacaaacttcgtgtcgaagaacaaagctgcgcaattgaaacacagttcaaaagactttggtgacctttcatcaaaagacttgcagaagatggttcacgctttgcctcagtacagtgagcaaattgacaagctttctctacatgttgagatcgctagaacgataaacagaactatcatggaacaaggtctaagagatctcgggcagctcgagcaggaccttgtttttggggatgctggaagaaaggacgttatcaaatttctgagcaccaaccatattataagccacgaaagcaagctgaggttaattatgattgttgctgcaatatatcccaagaagttcgaaggtgaaaagggacgtaagatgatggagctagcaaaattgtcgggcgatgatgtagtagctgtgaacaatatgagattacttggaccagtacatacggagtgcaaaaagagcacaacaggatcttttcctctcaagtttgatgtccttaagacgaagcgagctgctcgaagagaccgagttggtgaaactcaaacatggcaactgtctcgtttttacccgattgttgaggaacttgttgagaaacttagcaaaggtcatttgccaaaacaagattacccttgtatgaatgaaccaaagccaaccttttattctggctctctgtctccatcagcgagtccggtattgcctcattcaagacgaacaccaacatgggcaagacgccatctttctgatgatggatatttcagtgactcggttctaggacgagcatctagtgggttcaagagaaagggacagcggattttcgtgttcatagtaggaggagcaacgagatcagagttaagggtttgccacaaacttacggagaagctcgacagagaagtgatcttaggctcctccagcttccttgatcccctaactttcctcactaaaatgaaacaactaaacgaagaagaggaaatctcacttgatgatattgtcatttgattagcaacttggtatcgaattttgttttggtaataaaatgatgggacggacatatgttccctatgtaaataaatacaatttatttgttcctttggtttgactaactaacggggttgctttatttaattgaatacttcatggttcttact

SEQ ID NO: 3258 - protein, 662 aa, Arabidopsis thaliana
  peptide (1)..(662): Ceres Seq. ID no. 12330241
  misc_feature (32)..(644): NCBI GI NO: 7485573 NR Description: hypothetical protein F16J13
  misc_feature (1)..(662): NCBI GI NO: 18391384 NR Description: expressed protein; protein id: At1g12360
  misc_feature (1)..(662): NCBI GI NO: 28201820 NR Description: SNARE-interacting protein KEULE
  misc_feature (35)..(616): NCBI GI NO: 25402721 NR Description: protein F5O11.8 [imported] - Arabidopsis thaliana
  misc_feature (601)..(662): NCBI GI NO: 25402721 NR Description: protein F5O11.8 [imported] - Arabidopsis thaliana
  misc_feature (1)..(25): NCBI GI NO: 25402721 NR Description: protein F5O11.8 [imported] - Arabidopsis thaliana
  misc_feature (1)..(662): NCBI GI NO: 38345989 NR Description: OSJNBa0032B23.7
  misc_feature (1)..(653): NCBI GI NO: 18378910 NR Description: hypothetical protein; protein id: At1g02010.1
  misc_feature (158)..(644): NCBI GI NO: 13195580 NR Description: AtSec1a [Arabidopsis thaliana]
  misc_feature (158)..(644): NCBI GI NO: 28201892 NR Description: Protein transport Sec1a (AtSec1a)
MSFSDSGSSSYGGDYKNFRQITRERLLCEMLRPERNGSSKLTWKVLVMDKFTVKIMSSACKMSEITQGGISLVEVITKHRQPMTAMEVIYFIQPTEENVTAFLSDMTGKSPLYKKAFVFFSSPVSRSLVNVIKKDMRAMKRIGGLKEMNLEYISMDIQGFVTNNENALEELFCDDENHQRADACLNVVAKRIATVLASLKEYPFVRYRGAKALDATTMTTYRELIPTKLAASVWNCLARYKQTIEDFPQTETCELLILDRSIDQIAPLIHEWTYDAMCHDLLNMEGNKYTHEVPSKTGDKPEKKEVLLDEEDSIWVELRDAHIADASERLHEKMTNFVSKNKAAQLKHSSKDFGDLSSKDLQKMVHALPQYSEQIDKLSLHVEIARTINRTIMEQGLRDLGQLEQDLVFGDAGRKDVIKFLSTNHIISHESKLRLIMIVAAIYPKKFEGEKGRKMMELAKLSGDDVVAVNNMRLLGPVHTECKKSTTGSFPLKFDVLKTKRAARRDRVGETQTWQLSRFYPIVEELVEKLSKGHLPKQDYPCMNEPKPTFYSGSLSPSASPVLPHSRRTPTWARRHLSDDGYFSDSVLGRASSGFKRKGQRIFVFIVGGATRSELRVCHKLTEKLDREVILGSSSFLDPLTFLTKMKQLNEEEEISLDDIVI

SEQ ID NO: 3259 - protein, 633 aa, Arabidopsis thaliana
  peptide (1)..(633): Ceres Seq. ID no. 12330242
  misc_feature (3)..(615): NCBI GI NO: 7485573 NR Description: hypothetical protein F16J13
  misc_feature (1)..(633): NCBI GI NO: 18391384 NR Description: expressed protein; protein id: At1g12360
  misc_feature (1)..(633): NCBI GI NO: 28201820 NR Description: SNARE-interacting protein KEULE
  misc_feature (6)..(587): NCBI GI NO: 25402721 NR Description: protein F5O11.8 [imported] - Arabidopsis thaliana
  misc_feature (572)..(633): NCBI GI NO: 25402721 NR Description: protein F5O11.8 [imported] - Arabidopsis thaliana
  misc_feature (1)..(633): NCBI GI NO: 38345989 NR Description: OSJNBa0032B23.7
  misc_feature (1)..(624): NCBI GI NO: 18378910 NR Description: hypothetical protein; protein id: At1g02010.1
  misc_feature (129)..(615): NCBI GI NO: 13195580 NR Description: AtSec1a [Arabidopsis thaliana]
  misc_feature (129)..(615): NCBI GI NO: 28201892 NR Description: Protein transport Sec1a (AtSec1a)
  misc_feature (1)..(62): NCBI GI NO: 13195580 NR Description: AtSec1a [Arabidopsis thaliana]
MLRPERNGSSKLTWKVLVMDKFTVKIMSSACKMSEITQGGISLVEVITKHRQPMTAMEVIYFIQPTEENVTAFLSDMTGKSPLYKKAFVFFSSPVSRSLVNVIKKDMRAMKRIGGLKEMNLEYISMDIQGFVTNNENALEELFCDDENHQRADACLNVVAKRIATVLASLKEYPFVRYRGAKALDATTMTTYRELIPTKLAASVWNCLARYKQTIEDFPQTETCELLILDRSIDQIAPLIHEWTYDAMCHDLLNMEGNKYTHEVPSKTGDKPEKKEVLLDEEDSIWVELRDAHIADASERLHEKMTNFVSKNKAAQLKHSSKDFGDLSSKDLQKMVHALPQYSEQIDKLSLHVEIARTINRTIMEQGLRDLGQLEQDLVFGDAGRKDVIKFLSTNHIISHESKLRLIMIVAAIYPKKFEGEKGRKMMELAKLSGDDVVAVNNMRLLGPVHTECKKSTTGSFPLKFDVLKTKRAARRDRVGETQTWQLSRFYPIVEELVEKLSKGHLPKQDYPCMNEPKPTFYSGSLSPSASPVLPHSRRTPTWARRHLSDDGYFSDSVLGRASSGFKRKGQRIFVFIVGGATRSELRVCHKLTEKLDREVILGSSSFLDPLTFLTKMKQLNEEEEISLDDIVI

SEQ ID NO: 3260 - protein, 615 aa, Arabidopsis thaliana
  peptide (1)..(615): Ceres Seq. ID no. 12330243
  misc_feature (1)..(597): NCBI GI NO: 7485573 NR Description: hypothetical protein F16J13
  misc_feature (1)..(615): NCBI GI NO: 18391384 NR Description: expressed protein; protein id: At1g12360
  misc_feature (1)..(615): NCBI GI NO: 28201820 NR Description: SNARE-interacting protein KEULE
  misc_feature (1)..(569): NCBI GI NO: 25402721 NR Description: protein F5O11.8 [imported] - Arabidopsis thaliana
  misc_feature (554)..(615): NCBI GI NO: 25402721 NR Description: protein F5O11.8 [imported] - Arabidopsis thaliana
  misc_feature (1)..(615): NCBI GI NO: 38345989 NR Description: OSJNBa0032B23.7
  misc_feature (1)..(606): NCBI GI NO: 18378910 NR Description: hypothetical protein; protein id: At1g02010.1
  misc_feature (111)..(597): NCBI GI NO: 13195580 NR Description: AtSec1a [Arabidopsis thaliana]
  misc_feature (111)..(597): NCBI GI NO: 28201892 NR Description: Protein transport Sec1a (AtSec1a)
  misc_feature (1)..(44): NCBI GI NO: 13195580 NR Description: AtSec1a [Arabidopsis thaliana]
MDKFTVKIMSSACKMSEITQGGISLVEVITKHRQPMTAMEVIYFIQPTEENVTAFLSDMTGKSPLYKKAFVFFSSPVSRSLVNVIKKDMRAMKRIGGLKEMNLEYISMDIQGFVTNNENALEELFCDDENHQRADACLNVVAKRIATVLASLKEYPFVRYRGAKALDATTMTTYRELIPTKLAASVWNCLARYKQTIEDFPQTETCELLILDRSIDQIAPLIHEWTYDAMCHDLLNMEGNKYTHEVPSKTGDKPEKKEVLLDEEDSIWVELRDAHIADASERLHEKMTNFVSKNKAAQLKHSSKDFGDLSSKDLQKMVHALPQYSEQIDKLSLHVEIARTINRTIMEQGLRDLGQLEQDLVFGDAGRKDVIKFLSTNHIISHESKLRLIMIVAAIYPKKFEGEKGRKMMELAKLSGDDVVAVNNMRLLGPVHTECKKSTTGSFPLKFDVLKTKRAARRDRVGETQTWQLSRFYPIVEELVEKLSKGHLPKQDYPCMNEPKPTFYSGSLSPSASPVLPHSRRTPTWARRHLSDDGYFSDSVLGRASSGFKRKGQRIFVFIVGGATRSELRVCHKLTEKLDREVILGSSSFLDPLTFLTKMKQLNEEEEISLDDIVI

SEQ ID NO: 3261 - DNA, 1905 bp, Arabidopsis thaliana
  misc_feature (1)..(1905): Ceres Seq. ID no. 12328270
ccaacacatttacttttcttcttcttctctctctacgccatagctatggttttaccagagcttctcgtgattctagcagaatgggttctttaccgtcttcttgctaattcatgttacagagctgctagaaagctcagaggctatggtttccagttaaaaaatctcctaagcctctccaaaacacaatctctacacaacaattctcagcatcatcttcataaccatcatcaacaaaatcaccctaaccaaacccttcaagattctctagaccctctgttcccaagccttacaaaataccaagaacttcttctagacaaaaacagagcatgctctgtttcgtctgatcattatcgtgatacctttttctgcgatatcgatggtgttttattaagacaacattcgagcaaacatttccacacgttcttcccttacttcatgctcgtggcttttgaaggaggatcgatcatcagagcgatccttctcttgctctcctgttctttcctttggactctgcaacaagaaaccaaactcagagttctctctttcataaccttctctggtcttagagtcaaagacatggacaacgtttctagatcggttctaccaaaattcttcctcgagaacttgaatatccaagtttacgacatctgggctcgaactgagtactccaaagttgtgttcacgagcttgccgcaagtgctggtggagaggttcctcagagaacatctcaacgctgatgatgtgattgggactaaactgcaagaaataaaagtcatgggaaggaaattctacacaggcctagcttctggttctggtttcgtcctgaaacataaatcagctgaagactactttcttgatagcaagaagaagcctgcacttggaattggaagctcttcaagcccacaagatcacatcttcatctccatttgcaaagaagcttatttttggaatgaagaagagtccatgagcaagaacaacgcattgcctagagaaagatacccaaagccactgatattccacgacgggagattggctttcttgccaacaccattagctacattagctatgttcatatggctccctatcggatttttactcgctgtcttcaggatctcggtaggagtctttcttccttaccatgtagccaatttcttggcttctatgtccggtgttaggatcactttcaagacccataatttgaataacggtcgtccagagaaaggtaatagtggagtcttgtatgtatgcaaccataggaccctcctcgacccagttttcctcaccacttcgctgggcaagcccttgaccgcggttacttacagcctaagcaagttctccgagttcatagcacctctcaagacggttagccttaaaagagataggaagaaagacggtgaggcaatgcagagactattaagcaaaggagatctagtggtttgtccggagggaaccacatgtagagagccttatctactaaggttcagtcctttgttcgctgagttaactgaagacattgttcccgtggctgtagatgctcgagtgagcatgttctatgggacaactgcgagcgggctcaagtgtttagaccctatcttcttcctcatgaaccctaggccggtttattgtcttgagattttaaagaagttgccaaaagagatgacttgtgcaggaggcaagtcaagctttgaagttgcgaatttcatacagggagaacttgctagggttttgggatttgaatgcactaatctcacaaggagggataagtacttggttcttgctggaaatgaaggcattgtcagataaactattccgaattttcattagtttttttgtttgtttgaaaagctaaatattattgttatttcaggacttagatgtttaattctatatggttgattcattggc

SEQ ID NO: 3262 - protein, 600 aa, Arabidopsis thaliana
  peptide (1)..(600): Ceres Seq. ID no. 12328271
  misc_feature (16)..(600): NCBI GI NO: 21618047 NR Description: unknown [Arabidopsis thaliana]
  misc_feature (16)..(600): NCBI GI NO: 18390661 NR Description: expressed protein; protein id: At1g06520
  misc_feature (106)..(600): NCBI GI NO: 18378959 NR Description: expressed protein; protein id: At1g02390
  misc_feature (110)..(599): NCBI GI NO: 15224445 NR Description: unknown protein; protein id: At2g38110
  misc_feature (110)..(599): NCBI GI NO: 38000002 NR Description: unknown protein
  misc_feature (112)..(600): NCBI GI NO: 15235185 NR Description: unknown protein; protein id: At4g01950
  misc_feature (124)..(599): NCBI GI NO: 37534314 NR Description: hypothetical protein
  misc_feature (119)..(599): NCBI GI NO: 15223437 NR Description: hypothetical protein; protein id: At1g01610
  misc_feature (119)..(599): NCBI GI NO: 17064780 NR Description: Unknown protein [Arabidopsis thaliana]
  misc_feature (148)..(599): NCBI GI NO: 29788867 NR Description: hypothetical protein
PTHLLFFFFSLYAIAMVLPELLVILAEWVLYRLLANSCYRAARKLRGYGFQLKNLLSLSKTQSLHNNSQHHLHNHHQQNHPNQTLQDSLDPLFPSLTKYQELLLDKNRACSVSSDHYRDTFFCDIDGVLLRQHSSKHFHTFFPYFMLVAFEGGSIIRAILLLLSCSFLWTLQQETKLRVLSFITFSGLRVKDMDNVSRSVLPKFFLENLNIQVYDIWARTEYSKVVFTSLPQVLVERFLREHLNADDVIGTKLQEIKVMGRKFYTGLASGSGFVLKHKSAEDYFLDSKKKPALGIGSSSSPQDHIFISICKEAYFWNEEESMSKNNALPRERYPKPLIFHDGRLAFLPTPLATLAMFIWLPIGFLLAVFRISVGVFLPYHVANFLASMSGVRITFKTHNLNNGRPEKGNSGVLYVCNHRTLLDPVFLTTSLGKPLTAVTYSLSKFSEFIAPLKTVSLKRDRKKDGEAMQRLLSKGDLVVCPEGTTCREPYLLRFSPLFAELTEDIVPVAVDARVSMFYGTTASGLKCLDPIFFLMNPRPVYCLEILKKLPKEMTCAGGKSSFEVANFIQGELARVLGFECTNLTRRDKYLVLAGNEGIVR

SEQ ID NO: 3263 - protein, 585 aa, Arabidopsis thaliana
  peptide (1)..(585): Ceres Seq. ID no. 12328272
  misc_feature (1)..(585): NCBI GI NO: 21618047 NR Description: unknown [Arabidopsis thaliana]
  misc_feature (1)..(585): NCBI GI NO: 18390661 NR Description: expressed protein; protein id: At1g06520
  misc_feature (91)..(585): NCBI GI NO: 18378959 NR Description: expressed protein; protein id: At1g02390
  misc_feature (95)..(584): NCBI GI NO: 15224445 NR Description: unknown protein; protein id: At2g38110
  misc_feature (95)..(584): NCBI GI NO: 38000002 NR Description: unknown protein
  misc_feature (97)..(585): NCBI GI NO: 15235185 NR Description: unknown protein; protein id: At4g01950
  misc_feature (109)..(584): NCBI GI NO: 37534314 NR Description: hypothetical protein
  misc_feature (104)..(584): NCBI GI NO: 15223437 NR Description: hypothetical protein; protein id: At1g01610
  misc_feature (104)..(584): NCBI GI NO: 17064780 NR Description: Unknown protein [Arabidopsis thaliana]
  misc_feature (133)..(584): NCBI GI NO: 29788867 NR Description: hypothetical protein
MVLPELLVILAEWVLYRLLANSCYRAARKLRGYGFQLKNLLSLSKTQSLHNNSQHHLHNHHQQNHPNQTLQDSLDPLFPSLTKYQELLLDKNRACSVSSDHYRDTFFCDIDGVLLRQHSSKHFHTFFPYFMLVAFEGGSIIRAILLLLSCSFLWTLQQETKLRVLSFITFSGLRVKDMDNVSRSVLPKFFLENLNIQVYDIWARTEYSKVVFTSLPQVLVERFLREHLNADDVIGTKLQEIKVMGRKFYTGLASGSGFVLKHKSAEDYFLDSKKKPALGIGSSSSPQDHIFISICKEAYFWNEEESMSKNNALPRERYPKPLIFHDGRLAFLPTPLATLAMFIWLPIGFLLAVFRISVGVFLPYHVANFLASMSGVRITFKTHNLNNGRPEKGNSGVLYVCNHRTLLDPVFLTTSLGKPLTAVTYSLSKFSEFIAPLKTVSLKRDRKKDGEAMQRLLSKGDLVVCPEGTTCREPYLLRFSPLFAELTEDIVPVAVDARVSMFYGTTASGLKCLDPIFFLMNPRPVYCLEILKKLPKEMTCAGGKSSFEVANFIQGELARVLGFECTNLTRRDKYLVLAGNEGIVR

SEQ ID NO: 3264 - protein, 455 aa, Arabidopsis thaliana
  peptide (1)..(455): Ceres Seq. ID no. 12328273
  misc_feature (1)..(455): NCBI GI NO: 21618047 NR Description: unknown [Arabidopsis thaliana]
  misc_feature (1)..(455): NCBI GI NO: 18390661 NR Description: expressed protein; protein id: At1g06520
  misc_feature (1)..(455): NCBI GI NO: 18378959 NR Description: expressed protein; protein id: At1g02390
  misc_feature (1)..(454): NCBI GI NO: 15224445 NR Description: unknown protein; protein id: At2g38110
  misc_feature (1)..(454): NCBI GI NO: 38000002 NR Description: unknown protein
  misc_feature (1)..(455): NCBI GI NO: 15235185 NR Description: unknown protein; protein id: At4g01950
  misc_feature (1)..(454): NCBI GI NO: 37534314 NR Description: hypothetical protein
  misc_feature (1)..(454): NCBI GI NO: 15223437 NR Description: hypothetical protein; protein id: At1g01610
  misc_feature (1)..(454): NCBI GI NO: 17064780 NR Description: Unknown protein [Arabidopsis thaliana]
  misc_feature (3)..(454): NCBI GI NO: 29788867 NR Description: hypothetical protein
MLVAFEGGSIIRAILLLLSCSFLWTLQQETKLRVLSFITFSGLRVKDMDNVSRSVLPKFFLENLNIQVYDIWARTEYSKVVFTSLPQVLVERFLREHLNADDVIGTKLQEIKVMGRKFYTGLASGSGFVLKHKSAEDYFLDSKKKPALGIGSSSSPQDHIFISICKEAYFWNEEESMSKNNALPRERYPKPLIFHDGRLAFLPTPLATLAMFIWLPIGFLLAVFRISVGVFLPYHVANFLASMSGVRITFKTHNLNNGRPEKGNSGVLYVCNHRTLLDPVFLTTSLGKPLTAVTYSLSKFSEFIAPLKTVSLKRDRKKDGEAMQRLLSKGDLVVCPEGTTCREPYLLRFSPLFAELTEDIVPVAVDARVSMFYGTTASGLKCLDPIFFLMNPRPVYCLEILKKLPKEMTCAGGKSSFEVANFIQGELARVLGFECTNLTRRDKYLVLAGNEGIVR

SEQ ID NO: 3265 - DNA, 2450 bp, Arabidopsis thaliana
  misc_feature (1)..(2450): Ceres Seq. ID no. 12329669
ataagtcataaggacgacaccattacgcaacttagtcctcttacctctctctctctcgactctgttccaagaaattcctctacttaatacagctgattctacagattcctgctacgaaatttctgggtctgggttgatctttgtctcaccagtcaacccaattcaggactttgataaaggtggaaatggtggctttattagcttctcagagctgctgctatggcggtgagaccgcaagagtcaccaaagctattggtttcagtagctctttggagaatcatttcactggggaagccactcagtgttatggcagcaagtctaagagatttcgtattgagatgagacagtcggaattgccctctaaggttggaatcaatggacgttcagtcaaaatggttcctgcgagtgaggtggtgaagaggaaagatggtgtgaatggatcggctgggaaaggtgttaatggagcgagtttggttagtagtagaaacattaatggtgcggcgtcaactttggttaaggcaccaaagaaaacaacagaatcgtaccttcctccaccggttgaaggagttagggttcttccttctgatgaaggttttagctgggctgatgagaattatagctcacttcaacgcagtattgatgtttggtcatttgttatttccctgaggattcgtatcttgttcgataattcgaaatgggcttatgttggaggattcacagaagaaaaacagaaaagcagaagaagagaaacagcttcatggttgagagagagtgtattgcagcttggtccaacgtttatcaaactgggacagttgtcttcaactaggtcagacttgtttccgcgcgaattcgtggatgagctttccaagttgcaggacagagtccccgctttttctccagagaaagcaaagcgcttcattgaggctgaacttggggctcctattagtgtaatgtataaagaatttgaagagcaacccatagctgcagctagccttggtcaggtacacagagctgttttgcacaatggcgagaaagtggtagtaaaagtacaaagacccggactaaagaaacttttcgatattgatctacgaaatctgaagctgattgccgagtatttccagaaaagtgaatcatttggtacaaacgattgggttggtatctatgaagaatgtgccttaattttgtatcaagagattgactacataaacgaagctaagaacgctgacagattccggagagacttccggaatataaactgggtccgcgtacctttggtttattgggattactctgccatgaaggtcttgactttggagtatgtaccaggtgttaagatcaacaacttggacgccttagctgcacggggttttaaccgttctagaatcgcatcacgggccattgaagcttatcttatacagatactcaaaaccggcttctttcatgcggatccgcacccaggaaaccttgcaattgatgtagatgaatcaatcatctactatgacttcggcatgatgggagagatcaaaacatttactcggaagagattacttgatctcttctattctgtttatgaaaaagatgcaaaaaaggtcatgcaaaaccttatagaccttgaagcacttcaacccactggagatctttcatcggtaaggagatctgttcagtttttcttggacaacctattaagccaatcaccagatcagcaacagactttggcagctattggagaggatctgtttgcaatttcccaggatcagccattccgtttcccatcaactttcacctttgtcatccgagcattttccacacttgagggtattggttacatccttgatccagaattttcctttgtgaaggttgcggctccttatgcgcaggaactcctggatctaaaacaaaggcaacgctcgggaactcagcttgtccaagaaataagaaagcaggctgatgatgccaggtcttctactctgtctatgccatatcgagtgcagcgaatagaagagtttgtgaaagaactcgattcaggcgatctgaaactccgtgttcgggttcttgagtcggaaagagcagcccggaaagcgacaatactgcagatggcgacgatgtatacagttcttggaggaactctacttaatattggggttacatttagcaaccaaggaagtcagcttgttgccaatggatccttcattggagcagggatattcatgttattggtactgaggtctatgcaaagggtaaataagcttgataaatttgagaagatgatatgatgatgactggtggtctggtggatagtttattcttttaaagctccaaatatcagatatagaatttgtgatgtataggtatagcatgtatctttagctcccatacacaatatttataaattgtataaaaactgtttctaaggaaaggaaagtcaaagatataatatgagactgagtttc

SEQ ID NO: 3266 - protein, 695 aa, Arabidopsis thaliana
  peptide (1)..(695): Ceres Seq. ID no. 12329670
  misc_feature (247)..(365): Pfam Name: Pfam Description:  ABC1 family
  misc_feature (130)..(695): NCBI GI NO: 19424003 NR Description: unknown protein [Arabidopsis thaliana]
  misc_feature (133)..(690): NCBI GI NO: 23039589 NR Description: hypothetical protein
  misc_feature (133)..(690): NCBI GI NO: 23130618 NR Description: hypothetical protein [Nostoc punctiforme]
  misc_feature (133)..(690): NCBI GI NO: 17232007 NR Description: hypothetical protein [Nostoc sp. PCC 7120]
  misc_feature (105)..(679): NCBI GI NO: 16330264 NR Description: ABC1-like [Synechocystis sp. PCC 6803]
  misc_feature (79)..(512): NCBI GI NO: 22328063 NR Description: ABC transporter-like; protein id: At5g64940
  misc_feature (506)..(695): NCBI GI NO: 22328063 NR Description: ABC transporter-like; protein id: At5g64940
  misc_feature (79)..(415): NCBI GI NO: 8843758 NR Description: ABC transporter-like [Arabidopsis thaliana]
  misc_feature (506)..(695): NCBI GI NO: 8843758 NR Description: ABC transporter-like [Arabidopsis thaliana]
  misc_feature (399)..(512): NCBI GI NO: 8843758 NR Description: ABC transporter-like [Arabidopsis thaliana]
MVALLASQSCCYGGETARVTKAIGFSSSLENHFTGEATQCYGSKSKRFRIEMRQSELPSKVGINGRSVKMVPASEVVKRKDGVNGSAGKGVNGASLVSSRNINGAASTLVKAPKKTTESYLPPPVEGVRVLPSDEGFSWADENYSSLQRSIDVWSFVISLRIRILFDNSKWAYVGGFTEEKQKSRRRETASWLRESVLQLGPTFIKLGQLSSTRSDLFPREFVDELSKLQDRVPAFSPEKAKRFIEAELGAPISVMYKEFEEQPIAAASLGQVHRAVLHNGEKVVVKVQRPGLKKLFDIDLRNLKLIAEYFQKSESFGTNDWVGIYEECALILYQEIDYINEAKNADRFRRDFRNINWVRVPLVYWDYSAMKVLTLEYVPGVKINNLDALAARGFNRSRIASRAIEAYLIQILKTGFFHADPHPGNLAIDVDESIIYYDFGMMGEIKTFTRKRLLDLFYSVYEKDAKKVMQNLIDLEALQPTGDLSSVRRSVQFFLDNLLSQSPDQQQTLAAIGEDLFAISQDQPFRFPSTFTFVIRAFSTLEGIGYILDPEFSFVKVAAPYAQELLDLKQRQRSGTQLVQEIRKQADDARSSTLSMPYRVQRIEEFVKELDSGDLKLRVRVLESERAARKATILQMATMYTVLGGTLLNIGVTFSNQGSQLVANGSFIGAGIFMLLVLRSMQRVNKLDKFEKMI

SEQ ID NO: 3267 - protein, 644 aa, Arabidopsis thaliana
  peptide (1)..(644): Ceres Seq. ID no. 12329671
  misc_feature (196)..(314): Pfam Name: Pfam Description:  ABC1 family
  misc_feature (79)..(644): NCBI GI NO: 19424003 NR Description: unknown protein [Arabidopsis thaliana]
  misc_feature (82)..(639): NCBI GI NO: 23039589 NR Description: hypothetical protein
  misc_feature (82)..(639): NCBI GI NO: 23130618 NR Description: hypothetical protein [Nostoc punctiforme]
  misc_feature (82)..(639): NCBI GI NO: 17232007 NR Description: hypothetical protein [Nostoc sp. PCC 7120]
  misc_feature (54)..(628): NCBI GI NO: 16330264 NR Description: ABC1-like [Synechocystis sp. PCC 6803]
  misc_feature (28)..(461): NCBI GI NO: 22328063 NR Description: ABC transporter-like; protein id: At5g64940
  misc_feature (455)..(644): NCBI GI NO: 22328063 NR Description: ABC transporter-like; protein id: At5g64940
  misc_feature (28)..(364): NCBI GI NO: 8843758 NR Description: ABC transporter-like [Arabidopsis thaliana]
  misc_feature (455)..(644): NCBI GI NO: 8843758 NR Description: ABC transporter-like [Arabidopsis thaliana]
  misc_feature (348)..(461): NCBI GI NO: 8843758 NR Description: ABC transporter-like [Arabidopsis thaliana]
MRQSELPSKVGINGRSVKMVPASEVVKRKDGVNGSAGKGVNGASLVSSRNINGAASTLVKAPKKTTESYLPPPVEGVRVLPSDEGFSWADENYSSLQRSIDVWSFVISLRIRILFDNSKWAYVGGFTEEKQKSRRRETASWLRESVLQLGPTFIKLGQLSSTRSDLFPREFVDELSKLQDRVPAFSPEKAKRFIEAELGAPISVMYKEFEEQPIAAASLGQVHRAVLHNGEKVVVKVQRPGLKKLFDIDLRNLKLIAEYFQKSESFGTNDWVGIYEECALILYQEIDYINEAKNADRFRRDFRNINWVRVPLVYWDYSAMKVLTLEYVPGVKINNLDALAARGFNRSRIASRAIEAYLIQILKTGFFHADPHPGNLAIDVDESIIYYDFGMMGEIKTFTRKRLLDLFYSVYEKDAKKVMQNLIDLEALQPTGDLSSVRRSVQFFLDNLLSQSPDQQQTLAAIGEDLFAISQDQPFRFPSTFTFVIRAFSTLEGIGYILDPEFSFVKVAAPYAQELLDLKQRQRSGTQLVQEIRKQADDARSSTLSMPYRVQRIEEFVKELDSGDLKLRVRVLESERAARKATILQMATMYTVLGGTLLNIGVTFSNQGSQLVANGSFIGAGIFMLLVLRSMQRVNKLDKFEKMI

SEQ ID NO: 3268 - protein, 626 aa, Arabidopsis thaliana
  peptide (1)..(626): Ceres Seq. ID no. 12329672
  misc_feature (178)..(296): Pfam Name: Pfam Description:  ABC1 family
  misc_feature (61)..(626): NCBI GI NO: 19424003 NR Description: unknown protein [Arabidopsis thaliana]
  misc_feature (64)..(621): NCBI GI NO: 23039589 NR Description: hypothetical protein
  misc_feature (64)..(621): NCBI GI NO: 23130618 NR Description: hypothetical protein [Nostoc punctiforme]
  misc_feature (64)..(621): NCBI GI NO: 17232007 NR Description: hypothetical protein [Nostoc sp. PCC 7120]
  misc_feature (36)..(610): NCBI GI NO: 16330264 NR Description: ABC1-like [Synechocystis sp. PCC 6803]
  misc_feature (10)..(443): NCBI GI NO: 22328063 NR Description: ABC transporter-like; protein id: At5g64940
  misc_feature (437)..(626): NCBI GI NO: 22328063 NR Description: ABC transporter-like; protein id: At5g64940
  misc_feature (10)..(346): NCBI GI NO: 8843758 NR Description: ABC transporter-like [Arabidopsis thaliana]
  misc_feature (437)..(626): NCBI GI NO: 8843758 NR Description: ABC transporter-like [Arabidopsis thaliana]
  misc_feature (330)..(443): NCBI GI NO: 8843758 NR Description: ABC transporter-like [Arabidopsis thaliana]
MVPASEVVKRKDGVNGSAGKGVNGASLVSSRNINGAASTLVKAPKKTTESYLPPPVEGVRVLPSDEGFSWADENYSSLQRSIDVWSFVISLRIRILFDNSKWAYVGGFTEEKQKSRRRETASWLRESVLQLGPTFIKLGQLSSTRSDLFPREFVDELSKLQDRVPAFSPEKAKRFIEAELGAPISVMYKEFEEQPIAAASLGQVHRAVLHNGEKVVVKVQRPGLKKLFDIDLRNLKLIAEYFQKSESFGTNDWVGIYEECALILYQEIDYINEAKNADRFRRDFRNINWVRVPLVYWDYSAMKVLTLEYVPGVKINNLDALAARGFNRSRIASRAIEAYLIQILKTGFFHADPHPGNLAIDVDESIIYYDFGMMGEIKTFTRKRLLDLFYSVYEKDAKKVMQNLIDLEALQPTGDLSSVRRSVQFFLDNLLSQSPDQQQTLAAIGEDLFAISQDQPFRFPSTFTFVIRAFSTLEGIGYILDPEFSFVKVAAPYAQELLDLKQRQRSGTQLVQEIRKQADDARSSTLSMPYRVQRIEEFVKELDSGDLKLRVRVLESERAARKATILQMATMYTVLGGTLLNIGVTFSNQGSQLVANGSFIGAGIFMLLVLRSMQRVNKLDKFEKMI

SEQ ID NO: 3269 - DNA, 1202 bp, Arabidopsis thaliana
  misc_feature (1)..(1202): Ceres Seq. ID no. 13576721
acatgaaccataactttctctaacatcactctcctttacacaaccccaaaaatagacctcacctctctcgtcttctctattctctccgctccttaatttccaattccaaccttctctgttttgccttgatggaaaagatagctccggagctcttcctcgtcgccggtaacccggactctttcgtcgtcgacgacctcctcgacttctctaacgacgacggcgaagttgacgacggcttaaacactcttcccgattcttcaacactctccaccggcactctcaccgacagttccaactcctcctcgcttttcaccgacggcactggcttctccgacctatatattccgaatgacgatatagcagaattagaatggttatcaaattttgtggaagaatcattcgcaggagaagaccaagacaagcttcacttattttccggtttaaaaaaccctcaaaccaccgggtcgaccctgacccacttaattaaacccgaacccgaacttgatcatcaattcatcgacatcgatgaatccaacgtcgccgttcctgccaaggccagaagcaagagatcacgttctgcagcctccacgtgggcttcccgtcttttatccttagccgattccgacgaaaccaatcccaagaagaaacaacgaagagtgaaagaacaagacttcgccggagatatggacgtggattgcggagaaagcggaggaggacgacgttgtttgcactgcgcgacggagaagacgccgcaatggaggacgggacctatgggtccgaagacgctttgtaacgcttgcggagtgaggtacaaatcagggaggctcgtgccggagtatagaccggcgtcgagtccgacgttcgtgatggcgaggcactcgaactctcaccggaaagtgatggagctccggcgacagaaggagatgagagacgagcatttgctgagtcagcttaggtgtgagaatctactgatggatatcagatccaacggtgaagatttcttaatgcataataatactaaccacgtggctcctgattttagacacttaatctagttttctatttccacgtggataatttcgcaataatttgttcgtttcgtttagctttatttttttttttttcctttttaacatttgtttttcattttctgcagactacttctagtactattgatatatttgatagcttttgtttttgct

SEQ ID NO: 3270 - protein, 308 aa, Arabidopsis thaliana
  peptide (1)..(308): Ceres Seq. ID no. 13576722
  misc_feature (1)..(308): NCBI GI NO: 15233971 NR Description: GATA zinc finger protein [Arabidopsis thaliana]
  misc_feature (1)..(158): NCBI GI NO: 15239503 NR Description: GATA zinc finger protein [Arabidopsis thaliana]
  misc_feature (187)..(308): NCBI GI NO: 15239503 NR Description: GATA zinc finger protein [Arabidopsis thaliana]
  misc_feature (10)..(170): NCBI GI NO: 34909448 NR Description: OSJNBa0014K08.18
  misc_feature (193)..(269): NCBI GI NO: 34909448 NR Description: OSJNBa0014K08.18
  misc_feature (135)..(266): NCBI GI NO: 37572447 NR Description: AG-motif binding protein-3 [Nicotiana tabacum]
  misc_feature (15)..(92): NCBI GI NO: 37572447 NR Description: AG-motif binding protein-3 [Nicotiana tabacum]
  misc_feature (184)..(266): NCBI GI NO: 37536778 NR Description: putative transcription factor
  misc_feature (52)..(92): NCBI GI NO: 37536778 NR Description: putative transcription factor
  misc_feature (14)..(266): NCBI GI NO: 15225399 NR Description: GATA zinc finger protein [Arabidopsis thaliana]
MEKIAPELFLVAGNPDSFVVDDLLDFSNDDGEVDDGLNTLPDSSTLSTGTLTDSSNSSSLFTDGTGFSDLYIPNDDIAELEWLSNFVEESFAGEDQDKLHLFSGLKNPQTTGSTLTHLIKPEPELDHQFIDIDESNVAVPAKARSKRSRSAASTWASRLLSLADSDETNPKKKQRRVKEQDFAGDMDVDCGESGGGRRCLHCATEKTPQWRTGPMGPKTLCNACGVRYKSGRLVPEYRPASSPTFVMARHSNSHRKVMELRRQKEMRDEHLLSQLRCENLLMDIRSNGEDFLMHNNTNHVAPDFRHLI

SEQ ID NO: 3271 - DNA, 1661 bp, Arabidopsis thaliana
  misc_feature (1)..(1661): Ceres Seq. ID no. 12326924
aatcaaacccaaaagcccaaaacccagaaaagaaaaatctctcttttgaaaattctccttttgcaaatcattcaagtgaagcagaatcatctccttcttcttcttctccagcttcatcaatctcttctaaactttttgcgtttacctgaaaaactgttttgatcggaagaatctgattgcttcgatgtcgctgtcgaatcagattcccgtttactctcgatgaccctctgcatcttcttccactttttttccccagttttctgataacttttctcagatgagaagttctacgttacttcttctcaagttcttcttcttcttcttcaatctgacttcgcttgagtatcaagttgatggagcatttgttggaacatatgggataaattatggaaggatagctgacaacataccatctccggagaaagtagttttacttctaaagcaagctaaaattcggaatgtgcgtatatacgatgtagatcacactgttcttgaagcttttagtggaactggtttagaccttgttgttggacttcctaatgggtttttaaaagagatgagttcaaatgctgatcatgctttcacttgggttaaagaaaatatccagtctttcttacccaagactcggattcgcggtatcgctataggtaacgaagttcttggaggcggtgattctgagctcgcgggagctttacttggtgctgctaaaaatgtgtacaatgcgttgaagaaaatgaatctggaggacactgtgcagatcactacggctcattcacaggctgtgttttctgattcctacccgccttcgtcttgtgtgtttaaagagaatgttgttcagttcatgaagccattgttggagttttttcagcagattgggtctcctttttgtttgaatgcttacccttttttggcgtacacttataatccgaaggagattgatatcaactatgctcttttcaagccaacggaagggatatatgacccgaaaaccgatttgcattacgataacatgcttgatgctcagattgatgctgcttacatggcgttgcaagatgctgggtttaagaagatggaggttatgatcactgaaactgggtgggcttctaaaggggattcagatgaacctgcagcaacaccagagaacgcaagaacgtataactataacctcaggaagaggcttgctaagaagaaagggacacctcttagaccaaaaacggtgcttaaagcctatatctttgcattgttcaatgaaaactcaaaaccgggcaagagttctgagacacactttggactttttaaacctgatggaaccatatcatatgacattggattcaacagtctaaagtctgattctcccaagtcactcatttcatcatcaaagtcagctcgttactatgtggcattggtcatctctgtctcggctttcctcttgatgatataaatgcggaaatggtgtgagctttgacgatcctcggatttggtcgtacattcgtagcactataatatatattactagggttgggacgctaacgaaatggtaggagcacaaatttactgcaattctcatatatgtagccaagagatatccagaaaagatatcaccagacactatcatatatacacatcttatgtaaaacaaatctaatacataaatttgggcc

SEQ ID NO: 3272 - protein, 387 aa, Arabidopsis thaliana
  peptide (1)..(387): Ceres Seq. ID no. 12326925
  misc_feature (33)..(352): Pfam Name: Pfam Description:  Glycosyl hydrolases family 17
  misc_feature (1)..(387): NCBI GI NO: 21618052 NR Description: putative beta-1,3-glucanase [Arabidopsis thaliana]
  misc_feature (1)..(387): NCBI GI NO: 18401187 NR Description: glycosyl hydrolase family 17
  misc_feature (28)..(368): NCBI GI NO: 7447981 NR Description: probable beta-1,3-glucanase At2g26600
  misc_feature (94)..(387): NCBI GI NO: 30683187 NR Description: glycosyl hydrolase family 17
  misc_feature (94)..(387): NCBI GI NO: 26452328 NR Description: putative beta-1,3-glucanase [Arabidopsis thaliana]
  misc_feature (3)..(387): NCBI GI NO: 15232696 NR Description: glycosyl hydrolase family 17
  misc_feature (21)..(387): NCBI GI NO: 11994352 NR Description: beta-1,3-glucanase-like protein
  misc_feature (31)..(359): NCBI GI NO: 15209173 NR Description: putative elicitor inducible chitinase
  misc_feature (3)..(362): NCBI GI NO: 419789 NR Description: hypothetical protein - potato
  misc_feature (34)..(352): NCBI GI NO: 25316443 NR Description: CDS protein F9L11.6
MRSSTLLLLKFFFFFFNLTSLEYQVDGAFVGTYGINYGRIADNIPSPEKVVLLLKQAKIRNVRIYDVDHTVLEAFSGTGLDLVVGLPNGFLKEMSSNADHAFTWVKENIQSFLPKTRIRGIAIGNEVLGGGDSELAGALLGAAKNVYNALKKMNLEDTVQITTAHSQAVFSDSYPPSSCVFKENVVQFMKPLLEFFQQIGSPFCLNAYPFLAYTYNPKEIDINYALFKPTEGIYDPKTDLHYDNMLDAQIDAAYMALQDAGFKKMEVMITETGWASKGDSDEPAATPENARTYNYNLRKRLAKKKGTPLRPKTVLKAYIFALFNENSKPGKSSETHFGLFKPDGTISYDIGFNSLKSDSPKSLISSSKSARYYVALVISVSAFLLMI

SEQ ID NO: 3273 - protein, 294 aa, Arabidopsis thaliana
  peptide (1)..(294): Ceres Seq. ID no. 12326926
  misc_feature (1)..(259): Pfam Name: Pfam Description:  Glycosyl hydrolases family 17
  misc_feature (1)..(294): NCBI GI NO: 21618052 NR Description: putative beta-1,3-glucanase [Arabidopsis thaliana]
  misc_feature (1)..(294): NCBI GI NO: 18401187 NR Description: glycosyl hydrolase family 17
  misc_feature (1)..(275): NCBI GI NO: 7447981 NR Description: probable beta-1,3-glucanase At2g26600
  misc_feature (1)..(294): NCBI GI NO: 30683187 NR Description: glycosyl hydrolase family 17
  misc_feature (1)..(294): NCBI GI NO: 26452328 NR Description: putative beta-1,3-glucanase [Arabidopsis thaliana]
  misc_feature (1)..(294): NCBI GI NO: 15232696 NR Description: glycosyl hydrolase family 17
  misc_feature (1)..(294): NCBI GI NO: 11994352 NR Description: beta-1,3-glucanase-like protein
  misc_feature (1)..(266): NCBI GI NO: 15209173 NR Description: putative elicitor inducible chitinase
  misc_feature (1)..(269): NCBI GI NO: 419789 NR Description: hypothetical protein - potato
  misc_feature (1)..(259): NCBI GI NO: 25316443 NR Description: CDS protein F9L11.6
MSSNADHAFTWVKENIQSFLPKTRIRGIAIGNEVLGGGDSELAGALLGAAKNVYNALKKMNLEDTVQITTAHSQAVFSDSYPPSSCVFKENVVQFMKPLLEFFQQIGSPFCLNAYPFLAYTYNPKEIDINYALFKPTEGIYDPKTDLHYDNMLDAQIDAAYMALQDAGFKKMEVMITETGWASKGDSDEPAATPENARTYNYNLRKRLAKKKGTPLRPKTVLKAYIFALFNENSKPGKSSETHFGLFKPDGTISYDIGFNSLKSDSPKSLISSSKSARYYVALVISVSAFLLMI

SEQ ID NO: 3274 - protein, 235 aa, Arabidopsis thaliana
  peptide (1)..(235): Ceres Seq. ID no. 12326927
  misc_feature (1)..(200): Pfam Name: Pfam Description:  Glycosyl hydrolases family 17
  misc_feature (1)..(235): NCBI GI NO: 21618052 NR Description: putative beta-1,3-glucanase [Arabidopsis thaliana]
  misc_feature (1)..(235): NCBI GI NO: 18401187 NR Description: glycosyl hydrolase family 17
  misc_feature (1)..(216): NCBI GI NO: 7447981 NR Description: probable beta-1,3-glucanase At2g26600
  misc_feature (1)..(235): NCBI GI NO: 30683187 NR Description: glycosyl hydrolase family 17
  misc_feature (1)..(235): NCBI GI NO: 26452328 NR Description: putative beta-1,3-glucanase [Arabidopsis thaliana]
  misc_feature (1)..(235): NCBI GI NO: 15232696 NR Description: glycosyl hydrolase family 17
  misc_feature (1)..(235): NCBI GI NO: 11994352 NR Description: beta-1,3-glucanase-like protein
  misc_feature (1)..(207): NCBI GI NO: 15209173 NR Description: putative elicitor inducible chitinase
  misc_feature (1)..(210): NCBI GI NO: 419789 NR Description: hypothetical protein - potato
  misc_feature (1)..(200): NCBI GI NO: 25316443 NR Description: CDS protein F9L11.6
MNLEDTVQITTAHSQAVFSDSYPPSSCVFKENVVQFMKPLLEFFQQIGSPFCLNAYPFLAYTYNPKEIDINYALFKPTEGIYDPKTDLHYDNMLDAQIDAAYMALQDAGFKKMEVMITETGWASKGDSDEPAATPENARTYNYNLRKRLAKKKGTPLRPKTVLKAYIFALFNENSKPGKSSETHFGLFKPDGTISYDIGFNSLKSDSPKSLISSSKSARYYVALVISVSAFLLMI

SEQ ID NO: 3275 - DNA, 909 bp, Arabidopsis thaliana
  misc_feature (1)..(909): Ceres Seq. ID no. 12578703
aactttataacgctattctcaaacaagcaaagaaccttaaccaaaaagaaaacgtctacggagacatatggagaggaaacatcacttcgtgttagttcacaacgcttatcatggagcctggatctggtacaagctcaagcccctccttgaatcagccggccaccgcgttactgctgtcgaactcgccgcctccgggatcgacccacgaccaatccaggccgttgaaaccgtcgacgaatactccaaaccgttgatcgaaaccctcaaatctcttccagagaacgaagaggtaattctggttggattcagcttcggaggcatcaacatcgctctcgccgccgacatatttccggcgaagattaaggttcttgtgttcctcaacgccttcttgcccgacacaacccacgtgccttctcacgttctggacaagtatatggagatgcctggaggtttgggagattgtgagttttcatctcatgaaacaagaaatgggacgatgagtttattgaagatgggaccaaaattcatgaaggcacgtctttaccaaaattgtcccatagaggattacgagctggcaaaaatgttgcataggcaagggtcatttttcacagaggatctatcaaagaaagaaaagtttagcgaggaaggatatggttcggtgcaacgagtttacgtaatgagtagtgaagacaaagccatcccctgcgatttcattcgttggatgattgataatttcaacgtctcgaaagtctacgagatcgatggcggagatcacatggtgatgctctccaaaccccaaaaactctttgactctctctctgctattgccaccgattatatgtaataatcttaaagtctgttttacttttttctcatcgttactaataaaacaaacccctttttccgggc

SEQ ID NO: 3276 - protein, 258 aa, Arabidopsis thaliana
  peptide (1)..(258): Ceres Seq. ID no. 12578704
  misc_feature (32)..(252): Pfam Name: Pfam Description:  alpha/beta hydrolase fold
  misc_feature (1)..(258): NCBI GI NO: 15238118 NR Description: alpha-hydroxynitrile lyase-like protein
  misc_feature (1)..(258): NCBI GI NO: 15028131 NR Description: putative alpha-hydroxynitrile lyase
  misc_feature (1)..(258): NCBI GI NO: 16648679 NR Description: AT5g10300/F18D22_70 [Arabidopsis thaliana]
  misc_feature (1)..(257): NCBI GI NO: 14279437 NR Description: ethylene-induced esterase [Citrus sinensis]
  misc_feature (2)..(258): NCBI GI NO: 15227867 NR Description: putative acetone-cyanohydrin lyase
  misc_feature (2)..(258): NCBI GI NO: 27754457 NR Description: putative acetone-cyanohydrin lyase
  misc_feature (7)..(257): NCBI GI NO: 2780225 NR Description: alpha-hydroxynitrile lyase [Manihot esculenta]
  misc_feature (2)..(257): NCBI GI NO: 15227863 NR Description: putative acetone-cyanohydrin lyase
  misc_feature (2)..(257): NCBI GI NO: 21554666 NR Description: putative acetone-cyanohydrin lyase
  misc_feature (2)..(254): NCBI GI NO: 6651393 NR Description: polyneuridine aldehyde esterase
MERKHHFVLVHNAYHGAWIWYKLKPLLESAGHRVTAVELAASGIDPRPIQAVETVDEYSKPLIETLKSLPENEEVILVGFSFGGINIALAADIFPAKIKVLVFLNAFLPDTTHVPSHVLDKYMEMPGGLGDCEFSSHETRNGTMSLLKMGPKFMKARLYQNCPIEDYELAKMLHRQGSFFTEDLSKKEKFSEEGYGSVQRVYVMSSEDKAIPCDFIRWMIDNFNVSKVYEIDGGDHMVMLSKPQKLFDSLSAIATDYM

SEQ ID NO: 3277 - protein, 136 aa, Arabidopsis thaliana
  peptide (1)..(136): Ceres Seq. ID no. 12578705
  misc_feature (1)..(130): Pfam Name: Pfam Description:  alpha/beta hydrolase fold
  misc_feature (1)..(136): NCBI GI NO: 15238118 NR Description: alpha-hydroxynitrile lyase-like protein
  misc_feature (1)..(136): NCBI GI NO: 15028131 NR Description: putative alpha-hydroxynitrile lyase
  misc_feature (1)..(136): NCBI GI NO: 16648679 NR Description: AT5g10300/F18D22_70 [Arabidopsis thaliana]
  misc_feature (1)..(135): NCBI GI NO: 14279437 NR Description: ethylene-induced esterase [Citrus sinensis]
  misc_feature (1)..(136): NCBI GI NO: 15227867 NR Description: putative acetone-cyanohydrin lyase
  misc_feature (1)..(136): NCBI GI NO: 27754457 NR Description: putative acetone-cyanohydrin lyase
  misc_feature (1)..(135): NCBI GI NO: 2780225 NR Description: alpha-hydroxynitrile lyase [Manihot esculenta]
  misc_feature (1)..(135): NCBI GI NO: 15227863 NR Description: putative acetone-cyanohydrin lyase
  misc_feature (1)..(135): NCBI GI NO: 21554666 NR Description: putative acetone-cyanohydrin lyase
  misc_feature (1)..(132): NCBI GI NO: 6651393 NR Description: polyneuridine aldehyde esterase
MEMPGGLGDCEFSSHETRNGTMSLLKMGPKFMKARLYQNCPIEDYELAKMLHRQGSFFTEDLSKKEKFSEEGYGSVQRVYVMSSEDKAIPCDFIRWMIDNFNVSKVYEIDGGDHMVMLSKPQKLFDSLSAIATDYM

SEQ ID NO: 3278 - protein, 134 aa, Arabidopsis thaliana
  peptide (1)..(134): Ceres Seq. ID no. 12578706
  misc_feature (1)..(128): Pfam Name: Pfam Description:  alpha/beta hydrolase fold
  misc_feature (1)..(134): NCBI GI NO: 15238118 NR Description: alpha-hydroxynitrile lyase-like protein
  misc_feature (1)..(134): NCBI GI NO: 15028131 NR Description: putative alpha-hydroxynitrile lyase
  misc_feature (1)..(134): NCBI GI NO: 16648679 NR Description: AT5g10300/F18D22_70 [Arabidopsis thaliana]
  misc_feature (1)..(133): NCBI GI NO: 14279437 NR Description: ethylene-induced esterase [Citrus sinensis]
  misc_feature (1)..(134): NCBI GI NO: 15227867 NR Description: putative acetone-cyanohydrin lyase
  misc_feature (1)..(134): NCBI GI NO: 27754457 NR Description: putative acetone-cyanohydrin lyase
  misc_feature (1)..(133): NCBI GI NO: 2780225 NR Description: alpha-hydroxynitrile lyase [Manihot esculenta]
  misc_feature (1)..(133): NCBI GI NO: 15227863 NR Description: putative acetone-cyanohydrin lyase
  misc_feature (1)..(133): NCBI GI NO: 21554666 NR Description: putative acetone-cyanohydrin lyase
  misc_feature (1)..(130): NCBI GI NO: 6651393 NR Description: polyneuridine aldehyde esterase
MPGGLGDCEFSSHETRNGTMSLLKMGPKFMKARLYQNCPIEDYELAKMLHRQGSFFTEDLSKKEKFSEEGYGSVQRVYVMSSEDKAIPCDFIRWMIDNFNVSKVYEIDGGDHMVMLSKPQKLFDSLSAIATDYM

SEQ ID NO: 3279 - DNA, 815 bp, Arabidopsis thaliana
  misc_feature (1)..(815): Ceres Seq. ID no. 12396747
agaatcagccgacgtttcctcttcaccactttcctctgtttctctgtttcgctctctctacaaaatttctccatgaacatacttaacaagctaggtataggatcaagtagacaaaccaacatggatccttctccaatcgcacaagtaatcgacgacgaagctccggcgccgggaaaccagtttgctcaattcggcgccggttgtttctggagcgtggaattagcgtaccagagagttccaggagtgactcaaacagaggttggttattctcaagggatcactcacgatccttcttacaaagatgtttgttcaggtaccacgaatcatgccgagattgttcgtgttcaatatgatccaaaagagtgtagttaccagtcgctgcttgatttgttctggtctaagcatgatcccaccactttgaatcggcagggaaatgatgtgggaacccaataccgttcagggatatatttctacaacccggagcaagagaaactagcacgcgagtcactggagcggcaccagcaacaagttgacaggaaggttgtgacagagatcttaccggctaagaaattttatagagctgaggaacatcaccagcaatacttgtctaaatgagggaggtttggtcttaagcaatcaacggaaaaaggctgcaacgacccaatccgctgctacgggtaaaagccttgcttctaaccgaaagcagaggatgcttccacttatctatgatagattatagcaattatcgttgaaaaataaagaagccgaggctacttatgtaacttgttcttgttcataaaactttttaagtgttc

SEQ ID NO: 3280 - protein, 204 aa, Arabidopsis thaliana
  peptide (1)..(204): Ceres Seq. ID no. 12396748
  misc_feature (60)..(204): Pfam Name: Pfam Description:  Peptide methionine sulfoxide reductase
  misc_feature (25)..(204): NCBI GI NO: 18424492 NR Description: peptide methionine sulfoxide reductase
  misc_feature (25)..(204): NCBI GI NO: 21592658 NR Description: peptide methionine sulfoxide reductase (msr)
  misc_feature (25)..(204): NCBI GI NO: 15240796 NR Description: peptide methionine sulfoxide reductase
  misc_feature (25)..(204): NCBI GI NO: 25308493 NR Description: protein-methionine-S-oxide reductase (EC 1
  misc_feature (41)..(204): NCBI GI NO: 26451744 NR Description: putative peptide methionine sulfoxide reductase msr
  misc_feature (17)..(204): NCBI GI NO: 29469000 NR Description: peptide methionine sulfoxide reductase; cPMSR
  misc_feature (25)..(204): NCBI GI NO: 12230349 NR Description: Peptide methionine sulfoxide reductase
  misc_feature (26)..(204): NCBI GI NO: 21593143 NR Description: protein-methionine-S-oxide reductase
  misc_feature (26)..(204): NCBI GI NO: 15234942 NR Description: protein-methionine-S-oxide reductase
  misc_feature (26)..(204): NCBI GI NO: 15146324 NR Description: AT4g25130/F13M23_270 [Arabidopsis thaliana]
RISRRFLFTTFLCFSVSLSLQNFSMNILNKLGIGSSRQTNMDPSPIAQVIDDEAPAPGNQFAQFGAGCFWSVELAYQRVPGVTQTEVGYSQGITHDPSYKDVCSGTTNHAEIVRVQYDPKECSYQSLLDLFWSKHDPTTLNRQGNDVGTQYRSGIYFYNPEQEKLARESLERHQQQVDRKVVTEILPAKKFYRAEEHHQQYLSK

SEQ ID NO: 3281 - protein, 180 aa, Arabidopsis thaliana
  peptide (1)..(180): Ceres Seq. ID no. 12396749
  misc_feature (36)..(180): Pfam Name: Pfam Description:  Peptide methionine sulfoxide reductase
  misc_feature (1)..(180): NCBI GI NO: 18424492 NR Description: peptide methionine sulfoxide reductase
  misc_feature (1)..(180): NCBI GI NO: 21592658 NR Description: peptide methionine sulfoxide reductase (msr)
  misc_feature (1)..(180): NCBI GI NO: 15240796 NR Description: peptide methionine sulfoxide reductase
  misc_feature (1)..(180): NCBI GI NO: 25308493 NR Description: protein-methionine-S-oxide reductase (EC 1
  misc_feature (17)..(180): NCBI GI NO: 26451744 NR Description: putative peptide methionine sulfoxide reductase msr
  misc_feature (1)..(180): NCBI GI NO: 29469000 NR Description: peptide methionine sulfoxide reductase; cPMSR
  misc_feature (1)..(180): NCBI GI NO: 12230349 NR Description: Peptide methionine sulfoxide reductase
  misc_feature (2)..(180): NCBI GI NO: 21593143 NR Description: protein-methionine-S-oxide reductase
  misc_feature (2)..(180): NCBI GI NO: 15234942 NR Description: protein-methionine-S-oxide reductase
  misc_feature (2)..(180): NCBI GI NO: 15146324 NR Description: AT4g25130/F13M23_270 [Arabidopsis thaliana]
MNILNKLGIGSSRQTNMDPSPIAQVIDDEAPAPGNQFAQFGAGCFWSVELAYQRVPGVTQTEVGYSQGITHDPSYKDVCSGTTNHAEIVRVQYDPKECSYQSLLDLFWSKHDPTTLNRQGNDVGTQYRSGIYFYNPEQEKLARESLERHQQQVDRKVVTEILPAKKFYRAEEHHQQYLSK

SEQ ID NO: 3282 - protein, 164 aa, Arabidopsis thaliana
  peptide (1)..(164): Ceres Seq. ID no. 12396750
  misc_feature (20)..(164): Pfam Name: Pfam Description:  Peptide methionine sulfoxide reductase
  misc_feature (1)..(164): NCBI GI NO: 18424492 NR Description: peptide methionine sulfoxide reductase
  misc_feature (1)..(164): NCBI GI NO: 21592658 NR Description: peptide methionine sulfoxide reductase (msr)
  misc_feature (1)..(164): NCBI GI NO: 15240796 NR Description: peptide methionine sulfoxide reductase
  misc_feature (1)..(164): NCBI GI NO: 25308493 NR Description: protein-methionine-S-oxide reductase (EC 1
  misc_feature (1)..(164): NCBI GI NO: 26451744 NR Description: putative peptide methionine sulfoxide reductase msr
  misc_feature (1)..(164): NCBI GI NO: 29469000 NR Description: peptide methionine sulfoxide reductase; cPMSR
  misc_feature (1)..(164): NCBI GI NO: 12230349 NR Description: Peptide methionine sulfoxide reductase
  misc_feature (1)..(164): NCBI GI NO: 21593143 NR Description: protein-methionine-S-oxide reductase
  misc_feature (1)..(164): NCBI GI NO: 15234942 NR Description: protein-methionine-S-oxide reductase
  misc_feature (1)..(164): NCBI GI NO: 15146324 NR Description: AT4g25130/F13M23_270 [Arabidopsis thaliana]
MDPSPIAQVIDDEAPAPGNQFAQFGAGCFWSVELAYQRVPGVTQTEVGYSQGITHDPSYKDVCSGTTNHAEIVRVQYDPKECSYQSLLDLFWSKHDPTTLNRQGNDVGTQYRSGIYFYNPEQEKLARESLERHQQQVDRKVVTEILPAKKFYRAEEHHQQYLSK

SEQ ID NO: 3283 - DNA, 1843 bp, Arabidopsis thaliana
  misc_feature (1)..(1843): Ceres Seq. ID no. 13489341
cggcacgaggaaaggggaaaaaaaaaaaaaatcagattcctgatattttctgcttcgctttgctttggcctttgggtttgctttgctttttatctccacaataataatattcgttaacctctcctcgttctcgtcgctgtttcttcccgatcttcgctatagttctggattcaaaatctctcttccccaatagatgtttgtctcttaatttttcatttttctgcaaaatcaaaatttttaagagctatggaggaagagaatgttactagttcaccttcaacaccggtacataggcttaggcatcgaagacgttctaatgaggttgttacggatggggataaagtgaatgcaagtcctttgttggttaatgatcggaataagtacaaatctttcatggtccggacctactctacgttatggatgattggtggttttgttttggttgtctacatgggtcatctttatatcacagctatggttgttgttattcaaatatttatggctaaagagttgtttaatctgctgaggaaagctcctgaggataaatgtctcccctatattaaacagctcaattggcacttctttttcactgccatgcttttcgtttatggacggatccttagtcaacggttagccaataccatgactgcagatcagttcttctatcggctagtcagcggcttaatcaaataccatatggcaatctgttacttgttgtatattataggtttcatgtggttcattctcacattaaagaagaagatgtacaagtaccagtttggccagtatgcttggacccacatgatcttgatagtcgtgtttactcaatcgtcgttcactgttgccaacatatttgaagggatcttctggtttcttctcccagcatctttaattataatcaacgacatcttcgcctacattttcggtttcttctttggaagaacgcctttaataaagctgtctccaaagaaaacatgggagggattcatcggagcctctgtgacaactatcatctctgcatttgttctggcaaatattttgggtcgtttcccttggttgacatgcccacgacaggatttgtccactggctggctacagtgtgacgctgatccattgttcaaacctgaaccttttgctttacctgcatggattccagaatggtttccttggaaggaaatgacgatcctccctgttcagtggcatgctttatgcctcggtttgttcgcttcaatcatagcaccttttggaggatttttcgctagcggtttcaaaagagcattcaaaattaaggactttggtgatagtattccaggacatggtggaatcacagatagaatggactgccagatggttatggcagtatttgcctacatatatcttcaatcatttattgtctcccaaagcgtttcggttgacaaaatcctagaccagatattgacgaaccttacctttgaggaacaacaagcgctcttcgtgaagttaggacaaatgctgaaggacaagctctcataggctccattgccaaaagtttcttttattcagattccgattctccaagaacaggttcctctggaatatccttttatctttgtccttactagagacaataaatttaaaattggattaagatttgttgtttcctgccattgtaaatcctctcgaaatttgtcgaaaaaattagaagtttttttaaaagtcttctcattggatacaataggtttgaagaaagttgtatctactactatctacttatttagtagctttggtggtttttagctgtattttgtatattggttaaaatgaaacaacatttggtttgtttgtctcatgattcgatttgttc

SEQ ID NO: 3284 - protein, 421 aa, Arabidopsis thaliana
  peptide (1)..(421): Ceres Seq. ID no. 13489342
  misc_feature (1)..(421): NCBI GI NO: 30696710 NR Description: phosphatidate cytidylyltransferase (CDS)
  misc_feature (1)..(421): NCBI GI NO: 7484839 NR Description: CDP-diacylglycerol synthetase homolog F24O1
  misc_feature (1)..(420): NCBI GI NO: 15235611 NR Description: phosphatidate cytidylyltransferase, putative
  misc_feature (1)..(419): NCBI GI NO: 3121837 NR Description: Phosphatidate cytidylyltransferase
  misc_feature (5)..(416): NCBI GI NO: 20303635 NR Description: putative CDP-diacylglycerol synthetase
  misc_feature (9)..(420): NCBI GI NO: 15236874 NR Description: phosphatidate cytidylyltransferase, putative
  misc_feature (5)..(132): NCBI GI NO: 37532798 NR Description: putative phosphatidate cytidylyltransferase
  misc_feature (277)..(367): NCBI GI NO: 37532798 NR Description: putative phosphatidate cytidylyltransferase
  misc_feature (385)..(416): NCBI GI NO: 37532798 NR Description: putative phosphatidate cytidylyltransferase
  misc_feature (31)..(416): NCBI GI NO: 40743157 NR Description: hypothetical protein AN5166.2
MEEENVTSSPSTPVHRLRHRRRSNEVVTDGDKVNASPLLVNDRNKYKSFMVRTYSTLWMIGGFVLVVYMGHLYITAMVVVIQIFMAKELFNLLRKAPEDKCLPYIKQLNWHFFFTAMLFVYGRILSQRLANTMTADQFFYRLVSGLIKYHMAICYLLYIIGFMWFILTLKKKMYKYQFGQYAWTHMILIVVFTQSSFTVANIFEGIFWFLLPASLIIINDIFAYIFGFFFGRTPLIKLSPKKTWEGFIGASVTTIISAFVLANILGRFPWLTCPRQDLSTGWLQCDADPLFKPEPFALPAWIPEWFPWKEMTILPVQWHALCLGLFASIIAPFGGFFASGFKRAFKIKDFGDSIPGHGGITDRMDCQMVMAVFAYIYLQSFIVSQSVSVDKILDQILTNLTFEEQQALFVKLGQMLKDKLS

SEQ ID NO: 3285 - protein, 372 aa, Arabidopsis thaliana
  peptide (1)..(372): Ceres Seq. ID no. 13489343
  misc_feature (1)..(372): NCBI GI NO: 30696710 NR Description: phosphatidate cytidylyltransferase (CDS)
  misc_feature (1)..(372): NCBI GI NO: 7484839 NR Description: CDP-diacylglycerol synthetase homolog F24O1
  misc_feature (1)..(371): NCBI GI NO: 15235611 NR Description: phosphatidate cytidylyltransferase, putative
  misc_feature (1)..(370): NCBI GI NO: 3121837 NR Description: Phosphatidate cytidylyltransferase
  misc_feature (1)..(367): NCBI GI NO: 20303635 NR Description: putative CDP-diacylglycerol synthetase
  misc_feature (1)..(371): NCBI GI NO: 15236874 NR Description: phosphatidate cytidylyltransferase, putative
  misc_feature (1)..(83): NCBI GI NO: 37532798 NR Description: putative phosphatidate cytidylyltransferase
  misc_feature (228)..(318): NCBI GI NO: 37532798 NR Description: putative phosphatidate cytidylyltransferase
  misc_feature (336)..(367): NCBI GI NO: 37532798 NR Description: putative phosphatidate cytidylyltransferase
  misc_feature (1)..(367): NCBI GI NO: 40743157 NR Description: hypothetical protein AN5166.2
MVRTYSTLWMIGGFVLVVYMGHLYITAMVVVIQIFMAKELFNLLRKAPEDKCLPYIKQLNWHFFFTAMLFVYGRILSQRLANTMTADQFFYRLVSGLIKYHMAICYLLYIIGFMWFILTLKKKMYKYQFGQYAWTHMILIVVFTQSSFTVANIFEGIFWFLLPASLIIINDIFAYIFGFFFGRTPLIKLSPKKTWEGFIGASVTTIISAFVLANILGRFPWLTCPRQDLSTGWLQCDADPLFKPEPFALPAWIPEWFPWKEMTILPVQWHALCLGLFASIIAPFGGFFASGFKRAFKIKDFGDSIPGHGGITDRMDCQMVMAVFAYIYLQSFIVSQSVSVDKILDQILTNLTFEEQQALFVKLGQMLKDKLS

SEQ ID NO: 3286 - protein, 363 aa, Arabidopsis thaliana
  peptide (1)..(363): Ceres Seq. ID no. 13489344
  misc_feature (1)..(363): NCBI GI NO: 30696710 NR Description: phosphatidate cytidylyltransferase (CDS)
  misc_feature (1)..(363): NCBI GI NO: 7484839 NR Description: CDP-diacylglycerol synthetase homolog F24O1
  misc_feature (1)..(362): NCBI GI NO: 15235611 NR Description: phosphatidate cytidylyltransferase, putative
  misc_feature (1)..(361): NCBI GI NO: 3121837 NR Description: Phosphatidate cytidylyltransferase
  misc_feature (1)..(358): NCBI GI NO: 20303635 NR Description: putative CDP-diacylglycerol synthetase
  misc_feature (1)..(362): NCBI GI NO: 15236874 NR Description: phosphatidate cytidylyltransferase, putative
  misc_feature (1)..(74): NCBI GI NO: 37532798 NR Description: putative phosphatidate cytidylyltransferase
  misc_feature (219)..(309): NCBI GI NO: 37532798 NR Description: putative phosphatidate cytidylyltransferase
  misc_feature (327)..(358): NCBI GI NO: 37532798 NR Description: putative phosphatidate cytidylyltransferase
  misc_feature (1)..(358): NCBI GI NO: 40743157 NR Description: hypothetical protein AN5166.2
MIGGFVLVVYMGHLYITAMVVVIQIFMAKELFNLLRKAPEDKCLPYIKQLNWHFFFTAMLFVYGRILSQRLANTMTADQFFYRLVSGLIKYHMAICYLLYIIGFMWFILTLKKKMYKYQFGQYAWTHMILIVVFTQSSFTVANIFEGIFWFLLPASLIIINDIFAYIFGFFFGRTPLIKLSPKKTWEGFIGASVTTIISAFVLANILGRFPWLTCPRQDLSTGWLQCDADPLFKPEPFALPAWIPEWFPWKEMTILPVQWHALCLGLFASIIAPFGGFFASGFKRAFKIKDFGDSIPGHGGITDRMDCQMVMAVFAYIYLQSFIVSQSVSVDKILDQILTNLTFEEQQALFVKLGQMLKDKLS

SEQ ID NO: 3287 - DNA, 1008 bp, Arabidopsis thaliana
  misc_feature (1)..(1008): Ceres Seq. ID no. 12602576
aaaacgtcaacgaaaaatatccgatcgccggcgttctggtctatcattgtttgctttccttgaagatcccgaaacccaaaaaatgtcacaaggatggttttcgatgggcgggagtagcaccgtagatcagcagcagcaatcgggttcgtctctgcttgcggattggaattcttacgcagcctctagagatttcgaggaaagcggcggaagcttcggctttgatatcgaatccgccgttagatctgccaatgacactgtttcgggcaccttcagtgtggtttcaaaaggagttagagatattccagggagcttgcagtcagcaacaagtagtatgccttcaggaaaagcgctcatgtatttcggtttacttctcgcaagtggtgttttcttcatcttcattgccttcacaatgtttcttccagtcatggtgcttatgccacagaaatttgccatttgtttcacccttggatgtggattcatcattggatccttcttcgcacttcgtggccctaaaaatcagctcgcacacatgtcttcgatggagaggcttccttcaaccctaggtttcattgctaccatggttggtaccatatacgtatcaatggttctccacagctacattctctcggtgctcttctcagtgttacaggttcttgcgctggtttactactgtatatcctacttccctggtggatcatcaggcatgaggttcctcagttctgctctcacctcatctgcgctaagagttttcgggagataagctttcgtagccaatctgggagagagaacaatacttgtcggtgtacaaagaaagatgtcgaagcgttttttggtatactctttaacatagatttgatgaaatccctcgaaaagataaatgatcgtgaaggaaatgtttagtgaagaacccaattgatgttcttttttttttagttgctggtgattcccgaaccaaaacgaaaaaatccattgtaccaagaaaatgtcaaaatgagtttcctaattccc

SEQ ID NO: 3288 - protein, 252 aa, Arabidopsis thaliana
  peptide (1)..(252): Ceres Seq. ID no. 12602577
  misc_feature (93)..(252): NCBI GI NO: 7486785 NR Description: hypothetical protein M3E9
  misc_feature (1)..(92): NCBI GI NO: 7486785 NR Description: hypothetical protein M3E9
  misc_feature (28)..(252): NCBI GI NO: 18416771 NR Description: putative protein; protein id: At4g26550.1
  misc_feature (26)..(252): NCBI GI NO: 15241114 NR Description: putative protein; protein id: At5g56020.1
  misc_feature (55)..(246): NCBI GI NO: 6319366 NR Description: similar to mammalian syntaxin 5; Sft2p
  misc_feature (6)..(252): NCBI GI NO: 23619167 NR Description: hypothetical protein, conserved
  misc_feature (42)..(244): NCBI GI NO: 17532001 NR Description: Mammalian syntaxin 5 like (25.7 kD)
  misc_feature (115)..(238): NCBI GI NO: 40746734 NR Description: hypothetical protein AN1297.2
  misc_feature (105)..(244): NCBI GI NO: 19115465 NR Description: putative membrane protein required for ER to Golgitransport by similarity to
  misc_feature (115)..(244): NCBI GI NO: 39597537 NR Description: Hypothetical protein CBG03219
KRQRKISDRRRSGLSLFAFLEDPETQKMSQGWFSMGGSSTVDQQQQSGSSLLADWNSYAASRDFEESGGSFGFDIESAVRSANDTVSGTFSVVSKGVRDIPGSLQSATSSMPSGKALMYFGLLLASGVFFIFIAFTMFLPVMVLMPQKFAICFTLGCGFIIGSFFALRGPKNQLAHMSSMERLPSTLGFIATMVGTIYVSMVLHSYILSVLFSVLQVLALVYYCISYFPGGSSGMRFLSSALTSSALRVFGR

SEQ ID NO: 3289 - protein, 225 aa, Arabidopsis thaliana
  peptide (1)..(225): Ceres Seq. ID no. 12602578
  misc_feature (66)..(225): NCBI GI NO: 7486785 NR Description: hypothetical protein M3E9
  misc_feature (1)..(65): NCBI GI NO: 7486785 NR Description: hypothetical protein M3E9
  misc_feature (1)..(225): NCBI GI NO: 18416771 NR Description: putative protein; protein id: At4g26550.1
  misc_feature (1)..(225): NCBI GI NO: 15241114 NR Description: putative protein; protein id: At5g56020.1
  misc_feature (28)..(219): NCBI GI NO: 6319366 NR Description: similar to mammalian syntaxin 5; Sft2p
  misc_feature (1)..(225): NCBI GI NO: 23619167 NR Description: hypothetical protein, conserved
  misc_feature (15)..(217): NCBI GI NO: 17532001 NR Description: Mammalian syntaxin 5 like (25.7 kD)
  misc_feature (88)..(211): NCBI GI NO: 40746734 NR Description: hypothetical protein AN1297.2
  misc_feature (78)..(217): NCBI GI NO: 19115465 NR Description: putative membrane protein required for ER to Golgitransport by similarity to
  misc_feature (88)..(217): NCBI GI NO: 39597537 NR Description: Hypothetical protein CBG03219
MSQGWFSMGGSSTVDQQQQSGSSLLADWNSYAASRDFEESGGSFGFDIESAVRSANDTVSGTFSVVSKGVRDIPGSLQSATSSMPSGKALMYFGLLLASGVFFIFIAFTMFLPVMVLMPQKFAICFTLGCGFIIGSFFALRGPKNQLAHMSSMERLPSTLGFIATMVGTIYVSMVLHSYILSVLFSVLQVLALVYYCISYFPGGSSGMRFLSSALTSSALRVFGR

SEQ ID NO: 3290 - protein, 218 aa, Arabidopsis thaliana
  peptide (1)..(218): Ceres Seq. ID no. 12602579
  misc_feature (59)..(218): NCBI GI NO: 7486785 NR Description: hypothetical protein M3E9
  misc_feature (1)..(58): NCBI GI NO: 7486785 NR Description: hypothetical protein M3E9
  misc_feature (1)..(218): NCBI GI NO: 18416771 NR Description: putative protein; protein id: At4g26550.1
  misc_feature (1)..(218): NCBI GI NO: 15241114 NR Description: putative protein; protein id: At5g56020.1
  misc_feature (21)..(212): NCBI GI NO: 6319366 NR Description: similar to mammalian syntaxin 5; Sft2p
  misc_feature (1)..(218): NCBI GI NO: 23619167 NR Description: hypothetical protein, conserved
  misc_feature (8)..(210): NCBI GI NO: 17532001 NR Description: Mammalian syntaxin 5 like (25.7 kD)
  misc_feature (81)..(204): NCBI GI NO: 40746734 NR Description: hypothetical protein AN1297.2
  misc_feature (71)..(210): NCBI GI NO: 19115465 NR Description: putative membrane protein required for ER to Golgitransport by similarity to
  misc_feature (81)..(210): NCBI GI NO: 39597537 NR Description: Hypothetical protein CBG03219
MGGSSTVDQQQQSGSSLLADWNSYAASRDFEESGGSFGFDIESAVRSANDTVSGTFSVVSKGVRDIPGSLQSATSSMPSGKALMYFGLLLASGVFFIFIAFTMFLPVMVLMPQKFAICFTLGCGFIIGSFFALRGPKNQLAHMSSMERLPSTLGFIATMVGTIYVSMVLHSYILSVLFSVLQVLALVYYCISYFPGGSSGMRFLSSALTSSALRVFGR

SEQ ID NO: 3291 - DNA, 2399 bp, Arabidopsis thaliana
  misc_feature (1)..(2399): Ceres Seq. ID no. 13488340
aggagattagcgaaaactcaaaacaggaacaaagttaaaagagtgagagagaaagaaagagagaagatgaaggtacaggagggtttgttcgtggtggctgttttctaccttgcttatacgcagctagtcaaggggcaacctcgcaaggagtgccaaactagatgtggcaatgtcgcagttgagtacccttttggtacttctccaggttgttactatcccggagatgaaagtttcaatcttacttgcaacgagcaagagaagctcttctttggcaacatgccagtcatcaacatgtctctcagcggccagcttcgtgttcggctagttagatccagagtttgctacgatagtcaaggaaaacagactgactacattgcccggcggaccaccctgggtaatttcactctctctgaacttaacagatttactgtagtaggttgtaacagttacgcatttctccgcacatctggagttgaaaaatactcaactggatgcatatcaatatgtgattctgccacaacgaaaaacggatcatgttctggtgaaggttgctgccagatccctgtccctagaggatactcttttgtcagagtaaaaccacatagctttcacaaccatcctactgtgcatctgtttaatccttgcacctacgcctttctcgttgaagatggtatgtttgacttccatgctttggaagatctcaacaatctgcgaaatgttactacgttccctgtagtactagattggtctatcggagacaagacttgcaaacaagtagaatacaggggcgtgtgtggtggtaacagcacatgtttcgattctactggtggaaccgggtataactgcaaatgtttagaaggttttgaggggaatccataccttccaaacggttgtcaagacatcaatgaatgtattagtagtagacataactgttcggagcatagtacctgtgaaaacacgaaggggagcttcaactgtaactgcccatctggttaccgcaaagattcccttaatagctgtactcgtaaagtcaggcctgaatactttagatggactcaaatttttcttggaaccaccatcggcttctcggttatcatgcttgggattagctgtctacaacagaaaattaagcaccggaagaacacagagctccgacaaaaattcttcgagcaaaatggtggaggcatgttgatacagcgagtctcgggagcagggccatcaaatgttgatgtcaaaatcttcactgagaaaggaatgaaggaagcaactaatggttaccatgagagcagaatcctgggtcagggaggccaaggaacagtgtacaaagggatattgccggacaactccatagttgctataaagaaagctcggcttggaaaccgtagccaagtagagcagttcatcaacgaagtgctagtgctttcacaaatcaaccataggaacgtggtcaaggtcttggggtgttgtttagagacagaagtccccttgttggtctatgagttcattaacagtggtacccttttcgatcacttgcacggttccttgtatgattcttcacttacatgggagcaccgtctgaggatagcaacagaagtagcaggaagtcttgcatatcttcactcttctgcttctattccaatcatccaccgagatatcaagactgctaatattctcctggataaaaacttaactgcaaaagcagctgactttggtgcatcaagattgataccgatggataaagagcagctcacaacaatagtgcaaggcactctaggttacctagacccagaatattacaacacagggttgttaaacgaaaagagcgatgtttatagttttggggtcgtcctaatggaactgctctcaggtcaaaaggcattgtgtttcgaaagaccacattgcccaaaaaatctagtgagttgttttgcttctgccacaaagaataataggttccatgaaattattgatgggcaagtgatgaatgaggataaccagagagagatccaggaagctgcaagaattgctgcagagtgtacaaggctaatgggagaggaaaggccaaggatgaaagaagtagctgcagagttagaggccttgagagttaaaacaactaaatataagtggtcggatcagtatcgtgagacaggggagattgaacacttgctcggcgttcaaatcttgtcagcacaaggcgaaaccagtagcagcattggctatgacagcatcagaaatgtaacaacattggacattgaagctggccgttgatattaatgctctgacaaaatcacatgtatatcttttgtttgtaaaaaaagaaagtcatttccttgttgcttcatcaataatgctttgacagatttgtttgtacatcatcaataatcatgttcatattttccttt

SEQ ID NO: 3292 - protein, 754 aa, Arabidopsis thaliana
  peptide (1)..(754): Ceres Seq. ID no. 13488341
  misc_feature (23)..(754): NCBI GI NO: 15218170 NR Description: wall-associated kinase 5 [Arabidopsis thaliana]
  misc_feature (23)..(754): NCBI GI NO: 18394970 NR Description: wall-associated kinase 1 [Arabidopsis thaliana]
  misc_feature (23)..(754): NCBI GI NO: 25751318 NR Description: probable serine/threonine-specific protein kinase
  misc_feature (23)..(754): NCBI GI NO: 25287665 NR Description: hypothetical protein F16F4.10
  misc_feature (23)..(754): NCBI GI NO: 15218167 NR Description: wall-associated kinase 4 [Arabidopsis thaliana]
  misc_feature (23)..(754): NCBI GI NO: 3355308 NR Description: wall-associated kinase 4 [Arabidopsis thaliana]
  misc_feature (23)..(754): NCBI GI NO: 15218171 NR Description: wall-associated kinase 3 [Arabidopsis thaliana]
  misc_feature (297)..(754): NCBI GI NO: 25287657 NR Description: F16F4.8 protein - Arabidopsis thaliana
  misc_feature (23)..(325): NCBI GI NO: 25287657 NR Description: F16F4.8 protein - Arabidopsis thaliana
  misc_feature (114)..(702): NCBI GI NO: 38346752 NR Description: OSJNBa0081G05.15
RRLAKTQNRNKVKRVREKEREKMKVQEGLFVVAVFYLAYTQLVKGQPRKECQTRCGNVAVEYPFGTSPGCYYPGDESFNLTCNEQEKLFFGNMPVINMSLSGQLRVRLVRSRVCYDSQGKQTDYIARRTTLGNFTLSELNRFTVVGCNSYAFLRTSGVEKYSTGCISICDSATTKNGSCSGEGCCQIPVPRGYSFVRVKPHSFHNHPTVHLFNPCTYAFLVEDGMFDFHALEDLNNLRNVTTFPVVLDWSIGDKTCKQVEYRGVCGGNSTCFDSTGGTGYNCKCLEGFEGNPYLPNGCQDINECISSRHNCSEHSTCENTKGSFNCNCPSGYRKDSLNSCTRKVRPEYFRWTQIFLGTTIGFSVIMLGISCLQQKIKHRKNTELRQKFFEQNGGGMLIQRVSGAGPSNVDVKIFTEKGMKEATNGYHESRILGQGGQGTVYKGILPDNSIVAIKKARLGNRSQVEQFINEVLVLSQINHRNVVKVLGCCLETEVPLLVYEFINSGTLFDHLHGSLYDSSLTWEHRLRIATEVAGSLAYLHSSASIPIIHRDIKTANILLDKNLTAKAADFGASRLIPMDKEQLTTIVQGTLGYLDPEYYNTGLLNEKSDVYSFGVVLMELLSGQKALCFERPHCPKNLVSCFASATKNNRFHEIIDGQVMNEDNQREIQEAARIAAECTRLMGEERPRMKEVAAELEALRVKTTKYKWSDQYRETGEIEHLLGVQILSAQGETSSSIGYDSIRNVTTLDIEAGR

SEQ ID NO: 3293 - protein, 732 aa, Arabidopsis thaliana
  peptide (1)..(732): Ceres Seq. ID no. 13488342
  misc_feature (1)..(732): NCBI GI NO: 15218170 NR Description: wall-associated kinase 5 [Arabidopsis thaliana]
  misc_feature (1)..(732): NCBI GI NO: 18394970 NR Description: wall-associated kinase 1 [Arabidopsis thaliana]
  misc_feature (1)..(732): NCBI GI NO: 25751318 NR Description: probable serine/threonine-specific protein kinase
  misc_feature (1)..(732): NCBI GI NO: 25287665 NR Description: hypothetical protein F16F4.10
  misc_feature (1)..(732): NCBI GI NO: 15218167 NR Description: wall-associated kinase 4 [Arabidopsis thaliana]
  misc_feature (1)..(732): NCBI GI NO: 3355308 NR Description: wall-associated kinase 4 [Arabidopsis thaliana]
  misc_feature (1)..(732): NCBI GI NO: 15218171 NR Description: wall-associated kinase 3 [Arabidopsis thaliana]
  misc_feature (275)..(732): NCBI GI NO: 25287657 NR Description: F16F4.8 protein - Arabidopsis thaliana
  misc_feature (1)..(303): NCBI GI NO: 25287657 NR Description: F16F4.8 protein - Arabidopsis thaliana
  misc_feature (92)..(680): NCBI GI NO: 38346752 NR Description: OSJNBa0081G05.15
MKVQEGLFVVAVFYLAYTQLVKGQPRKECQTRCGNVAVEYPFGTSPGCYYPGDESFNLTCNEQEKLFFGNMPVINMSLSGQLRVRLVRSRVCYDSQGKQTDYIARRTTLGNFTLSELNRFTVVGCNSYAFLRTSGVEKYSTGCISICDSATTKNGSCSGEGCCQIPVPRGYSFVRVKPHSFHNHPTVHLFNPCTYAFLVEDGMFDFHALEDLNNLRNVTTFPVVLDWSIGDKTCKQVEYRGVCGGNSTCFDSTGGTGYNCKCLEGFEGNPYLPNGCQDINECISSRHNCSEHSTCENTKGSFNCNCPSGYRKDSLNSCTRKVRPEYFRWTQIFLGTTIGFSVIMLGISCLQQKIKHRKNTELRQKFFEQNGGGMLIQRVSGAGPSNVDVKIFTEKGMKEATNGYHESRILGQGGQGTVYKGILPDNSIVAIKKARLGNRSQVEQFINEVLVLSQINHRNVVKVLGCCLETEVPLLVYEFINSGTLFDHLHGSLYDSSLTWEHRLRIATEVAGSLAYLHSSASIPIIHRDIKTANILLDKNLTAKAADFGASRLIPMDKEQLTTIVQGTLGYLDPEYYNTGLLNEKSDVYSFGVVLMELLSGQKALCFERPHCPKNLVSCFASATKNNRFHEIIDGQVMNEDNQREIQEAARIAAECTRLMGEERPRMKEVAAELEALRVKTTKYKWSDQYRETGEIEHLLGVQILSAQGETSSSIGYDSIRNVTTLDIEAGR

SEQ ID NO: 3294 - protein, 662 aa, Arabidopsis thaliana
  peptide (1)..(662): Ceres Seq. ID no. 13488343
  misc_feature (1)..(662): NCBI GI NO: 15218170 NR Description: wall-associated kinase 5 [Arabidopsis thaliana]
  misc_feature (1)..(662): NCBI GI NO: 18394970 NR Description: wall-associated kinase 1 [Arabidopsis thaliana]
  misc_feature (1)..(662): NCBI GI NO: 25751318 NR Description: probable serine/threonine-specific protein kinase
  misc_feature (1)..(662): NCBI GI NO: 25287665 NR Description: hypothetical protein F16F4.10
  misc_feature (1)..(662): NCBI GI NO: 15218167 NR Description: wall-associated kinase 4 [Arabidopsis thaliana]
  misc_feature (1)..(662): NCBI GI NO: 3355308 NR Description: wall-associated kinase 4 [Arabidopsis thaliana]
  misc_feature (1)..(662): NCBI GI NO: 15218171 NR Description: wall-associated kinase 3 [Arabidopsis thaliana]
  misc_feature (205)..(662): NCBI GI NO: 25287657 NR Description: F16F4.8 protein - Arabidopsis thaliana
  misc_feature (1)..(233): NCBI GI NO: 25287657 NR Description: F16F4.8 protein - Arabidopsis thaliana
  misc_feature (22)..(610): NCBI GI NO: 38346752 NR Description: OSJNBa0081G05.15
MPVINMSLSGQLRVRLVRSRVCYDSQGKQTDYIARRTTLGNFTLSELNRFTVVGCNSYAFLRTSGVEKYSTGCISICDSATTKNGSCSGEGCCQIPVPRGYSFVRVKPHSFHNHPTVHLFNPCTYAFLVEDGMFDFHALEDLNNLRNVTTFPVVLDWSIGDKTCKQVEYRGVCGGNSTCFDSTGGTGYNCKCLEGFEGNPYLPNGCQDINECISSRHNCSEHSTCENTKGSFNCNCPSGYRKDSLNSCTRKVRPEYFRWTQIFLGTTIGFSVIMLGISCLQQKIKHRKNTELRQKFFEQNGGGMLIQRVSGAGPSNVDVKIFTEKGMKEATNGYHESRILGQGGQGTVYKGILPDNSIVAIKKARLGNRSQVEQFINEVLVLSQINHRNVVKVLGCCLETEVPLLVYEFINSGTLFDHLHGSLYDSSLTWEHRLRIATEVAGSLAYLHSSASIPIIHRDIKTANILLDKNLTAKAADFGASRLIPMDKEQLTTIVQGTLGYLDPEYYNTGLLNEKSDVYSFGVVLMELLSGQKALCFERPHCPKNLVSCFASATKNNRFHEIIDGQVMNEDNQREIQEAARIAAECTRLMGEERPRMKEVAAELEALRVKTTKYKWSDQYRETGEIEHLLGVQILSAQGETSSSIGYDSIRNVTTLDIEAGR

SEQ ID NO: 3295 - DNA, 1335 bp, Arabidopsis thaliana
  misc_feature (1)..(1335): Ceres Seq. ID no. 13615780
actctttactctttcttccgtttgctcgaaccatctagtctaagagaaagaaaaaatactaaagagaaagaagaagaggacttgaatacggaagcttgagagaatgaaagcgatcgtgatctcggagccaggtaagccggaggttctgcaactccgtgatgtggcagacccagaagttaaagacgatgaggttctcatcagagttctcgctactgctttgaatcgtgcagatactctccaaagacttggcctttataatccaccacctggctcaagcccttaccttggtctcgaatgttctgggaccattgaatccgtcggtaaaggcgtctctcgatggaaagtcggagaccaggtgtgtgctcttctttctggaggaggttatgcagagaaagtttctgttcctgctggacaaattttcccaattcccgctggtatctctctaaaggatgcagcggctttccctgaagtggcatgcactgtttggtctactgtcttcatgatgggccgtctctctgttggtgaatcattcttgattcatggaggttcaagtgggattgggacatttgctattcagatagctaaacatctgggagtgagagtatttgtcacagctgggagtgatgaaaagctagctgcgtgcaaagaactcggggctgatgtttgtataaattacaaaaccgaggattttgttgcaaaggtaaaagcggaaaccgatgggaaaggagtggatgttatcttggactgcattggggcaccgtatttgcagaaaaatctcgacagcttaaactttgatggaaggttatgtattatcggtttaatgggaggagccaatgcagaaataaaactaagtagtctgcttccaaagcgtctcactgtcttaggagctgcattaagaccaagaagccctgaaaacaaagcagttgttgtaagggaagtcgagaagaatgtctggccagcgatagaagcagggaaggtaaaaccagtgatttacaagtatttaccattgtcacaagcagcagaaggtcatagccttatggagagtagcaaccatattggtaagattctccttgagacttgattctctgcaaagggagaaatgttcagagacaagagtcatggtcaataatcaataaaatctggtcgattctgttcatagatatctctttacaagagttctgtttgttggcttttatgtatctctgatttggtcaaaaagacactgtaactatggaacatatatagtatcaaataagctgttgtataccaaacattgatttcgaagtagaatatgattttgtaagaagtttttatttattttgggcttaaaaagtg

SEQ ID NO: 3296 - protein, 325 aa, Arabidopsis thaliana
  peptide (1)..(325): Ceres Seq. ID no. 13615781
  misc_feature (1)..(325): NCBI GI NO: 15234529 NR Description: oxidoreductase, zinc-binding dehydrogenase family
  misc_feature (1)..(323): NCBI GI NO: 15451578 NR Description: Putative quinone oxidoreductase [Oryza sativa]
  misc_feature (1)..(325): NCBI GI NO: 23017076 NR Description: hypothetical protein [Thermobifida fusca]
  misc_feature (1)..(325): NCBI GI NO: 21222233 NR Description: putative quinone oxidoreductase
  misc_feature (1)..(323): NCBI GI NO: 29830911 NR Description: putative quinone oxidoreductase
  misc_feature (1)..(324): NCBI GI NO: 22960487 NR Description: hypothetical protein [Rhodobacter sphaeroides]
  misc_feature (1)..(323): NCBI GI NO: 15843400 NR Description: quinone oxidoreductase
  misc_feature (1)..(323): NCBI GI NO: 15610913 NR Description: hypothetical protein Rv3777
  misc_feature (1)..(323): NCBI GI NO: 22977083 NR Description: hypothetical protein [Ralstonia metallidurans]
  misc_feature (1)..(324): NCBI GI NO: 15888165 NR Description: AGR_C_1508p [Agrobacterium tumefaciens]
MKAIVISEPGKPEVLQLRDVADPEVKDDEVLIRVLATALNRADTLQRLGLYNPPPGSSPYLGLECSGTIESVGKGVSRWKVGDQVCALLSGGGYAEKVSVPAGQIFPIPAGISLKDAAAFPEVACTVWSTVFMMGRLSVGESFLIHGGSSGIGTFAIQIAKHLGVRVFVTAGSDEKLAACKELGADVCINYKTEDFVAKVKAETDGKGVDVILDCIGAPYLQKNLDSLNFDGRLCIIGLMGGANAEIKLSSLLPKRLTVLGAALRPRSPENKAVVVREVEKNVWPAIEAGKVKPVIYKYLPLSQAAEGHSLMESSNHIGKILLET

SEQ ID NO: 3297 - protein, 193 aa, Arabidopsis thaliana
  peptide (1)..(193): Ceres Seq. ID no. 13615782
  misc_feature (1)..(193): NCBI GI NO: 15234529 NR Description: oxidoreductase, zinc-binding dehydrogenase family
  misc_feature (1)..(191): NCBI GI NO: 15451578 NR Description: Putative quinone oxidoreductase [Oryza sativa]
  misc_feature (1)..(193): NCBI GI NO: 23017076 NR Description: hypothetical protein [Thermobifida fusca]
  misc_feature (1)..(193): NCBI GI NO: 21222233 NR Description: putative quinone oxidoreductase
  misc_feature (1)..(191): NCBI GI NO: 29830911 NR Description: putative quinone oxidoreductase
  misc_feature (1)..(192): NCBI GI NO: 22960487 NR Description: hypothetical protein [Rhodobacter sphaeroides]
  misc_feature (1)..(191): NCBI GI NO: 15843400 NR Description: quinone oxidoreductase
  misc_feature (1)..(191): NCBI GI NO: 15610913 NR Description: hypothetical protein Rv3777
  misc_feature (1)..(191): NCBI GI NO: 22977083 NR Description: hypothetical protein [Ralstonia metallidurans]
  misc_feature (1)..(192): NCBI GI NO: 15888165 NR Description: AGR_C_1508p [Agrobacterium tumefaciens]
MMGRLSVGESFLIHGGSSGIGTFAIQIAKHLGVRVFVTAGSDEKLAACKELGADVCINYKTEDFVAKVKAETDGKGVDVILDCIGAPYLQKNLDSLNFDGRLCIIGLMGGANAEIKLSSLLPKRLTVLGAALRPRSPENKAVVVREVEKNVWPAIEAGKVKPVIYKYLPLSQAAEGHSLMESSNHIGKILLET

SEQ ID NO: 3298 - protein, 192 aa, Arabidopsis thaliana
  peptide (1)..(192): Ceres Seq. ID no. 13615783
  misc_feature (1)..(192): NCBI GI NO: 15234529 NR Description: oxidoreductase, zinc-binding dehydrogenase family
  misc_feature (1)..(190): NCBI GI NO: 15451578 NR Description: Putative quinone oxidoreductase [Oryza sativa]
  misc_feature (1)..(192): NCBI GI NO: 23017076 NR Description: hypothetical protein [Thermobifida fusca]
  misc_feature (1)..(192): NCBI GI NO: 21222233 NR Description: putative quinone oxidoreductase
  misc_feature (1)..(190): NCBI GI NO: 29830911 NR Description: putative quinone oxidoreductase
  misc_feature (1)..(191): NCBI GI NO: 22960487 NR Description: hypothetical protein [Rhodobacter sphaeroides]
  misc_feature (1)..(190): NCBI GI NO: 15843400 NR Description: quinone oxidoreductase
  misc_feature (1)..(190): NCBI GI NO: 15610913 NR Description: hypothetical protein Rv3777
  misc_feature (1)..(190): NCBI GI NO: 22977083 NR Description: hypothetical protein [Ralstonia metallidurans]
  misc_feature (1)..(191): NCBI GI NO: 15888165 NR Description: AGR_C_1508p [Agrobacterium tumefaciens]
MGRLSVGESFLIHGGSSGIGTFAIQIAKHLGVRVFVTAGSDEKLAACKELGADVCINYKTEDFVAKVKAETDGKGVDVILDCIGAPYLQKNLDSLNFDGRLCIIGLMGGANAEIKLSSLLPKRLTVLGAALRPRSPENKAVVVREVEKNVWPAIEAGKVKPVIYKYLPLSQAAEGHSLMESSNHIGKILLET

SEQ ID NO: 3299 - DNA, 715 bp, Arabidopsis thaliana
  misc_feature (1)..(715): Ceres Seq. ID no. 13495872
aacacatctcactgctcactactctcactgtaatcccttagatcttcttttcaaatttcaatggcgtccggtgatgttgagtatcggtgcttcgttggaggtctagcatgggccactgatgacagagctcttgagactgccttcgctcaatacggcgacgttattgattccaagatcattaacgatcgtgagactggaagatcaaggggattcggattcgtcaccttcaaggatgagaaagccatgaaggatgcgattgagggaatgaacggacaagatctcgatggccgtagcatcactgttaacgaggctcagtcacgaggaagcggtggcggcggaggccaccgtggaggtggtggcggtggtggaggttactccggtggaggtggtagctacggaggtggcggcggtagacgcgagggtggaggaggatacagcggcggcggcggttactcctcaagaggtggtggtggcggaagctacggtggtggaagacgtgagggaggaggaggatacggtggtggtgaaggaggaggttacggaggaagcggtggtggtggaggatggtaattcctttaattaggtttgggattaccaatgaatgttctctctctcgcttgttatgcttctactttgttttgtgtgttctctattttgttctggttctgctttagatttgatgtaacagttcgtgattaggtattttggtatctgg

SEQ ID NO: 3300 - protein, 169 aa, Arabidopsis thaliana
  peptide (1)..(169): Ceres Seq. ID no. 13495873
  misc_feature (10)..(81): Pfam Name: a.k.a. RRM, RBD, or RNP domain Pfam Description: RNA recognition motif.
  misc_feature (1)..(169): NCBI GI NO: 21553354 NR Description: glycine-rich RNA binding protein 7
  misc_feature (1)..(169): NCBI GI NO: 15226605 NR Description: glycine-rich RNA-binding protein (AtGRP7)
  misc_feature (1)..(169): NCBI GI NO: 30681492 NR Description: glycine-rich RNA-binding protein (AtGRP7)
  misc_feature (1)..(169): NCBI GI NO: 1346181 NR Description: Glycine-rich RNA-binding protein GRP2A
  misc_feature (1)..(169): NCBI GI NO: 1346180 NR Description: Glycine-rich RNA-binding protein GRP1A
  misc_feature (1)..(169): NCBI GI NO: 34851124 NR Description: putative glycine-rich RNA-binding protein
  misc_feature (5)..(169): NCBI GI NO: 544416 NR Description: Glycine-rich RNA-binding protein 10
  misc_feature (5)..(169): NCBI GI NO: 15235002 NR Description: glycine-rich RNA-binding protein 8 (GRP8) (CCR1)
  misc_feature (1)..(169): NCBI GI NO: 10799202 NR Description: glycine-rich RNA-binding protein [Sorghum bicolor]
  misc_feature (1)..(169): NCBI GI NO: 544423 NR Description: Glycine-rich RNA-binding protein 2
MASGDVEYRCFVGGLAWATDDRALETAFAQYGDVIDSKIINDRETGRSRGFGFVTFKDEKAMKDAIEGMNGQDLDGRSITVNEAQSRGSGGGGGHRGGGGGGGGYSGGGGSYGGGGGRREGGGGYSGGGGYSSRGGGGGSYGGGRREGGGGYGGGEGGGYGGSGGGGGW

SEQ ID NO: 3301 - protein, 108 aa, Arabidopsis thaliana
  peptide (1)..(108): Ceres Seq. ID no. 13495874
  misc_feature (28)..(106): Pfam Name: LMP1 Pfam Description: Herpesvirus latent membrane protein 1
  misc_feature (1)..(108): NCBI GI NO: 21553354 NR Description: glycine-rich RNA binding protein 7
  misc_feature (1)..(108): NCBI GI NO: 15226605 NR Description: glycine-rich RNA-binding protein (AtGRP7)
  misc_feature (1)..(108): NCBI GI NO: 30681492 NR Description: glycine-rich RNA-binding protein (AtGRP7)
  misc_feature (1)..(108): NCBI GI NO: 1346181 NR Description: Glycine-rich RNA-binding protein GRP2A
  misc_feature (1)..(108): NCBI GI NO: 1346180 NR Description: Glycine-rich RNA-binding protein GRP1A
  misc_feature (1)..(108): NCBI GI NO: 34851124 NR Description: putative glycine-rich RNA-binding protein
  misc_feature (1)..(108): NCBI GI NO: 544416 NR Description: Glycine-rich RNA-binding protein 10
  misc_feature (1)..(108): NCBI GI NO: 15235002 NR Description: glycine-rich RNA-binding protein 8 (GRP8) (CCR1)
  misc_feature (1)..(108): NCBI GI NO: 10799202 NR Description: glycine-rich RNA-binding protein [Sorghum bicolor]
  misc_feature (1)..(108): NCBI GI NO: 544423 NR Description: Glycine-rich RNA-binding protein 2
MKDAIEGMNGQDLDGRSITVNEAQSRGSGGGGGHRGGGGGGGGYSGGGGSYGGGGGRREGGGGYSGGGGYSSRGGGGGSYGGGRREGGGGYGGGEGGGYGGSGGGGGW

SEQ ID NO: 3302 - protein, 101 aa, Arabidopsis thaliana
  peptide (1)..(101): Ceres Seq. ID no. 13495875
  misc_feature (21)..(99): Pfam Name: LMP1 Pfam Description: Herpesvirus latent membrane protein 1
  misc_feature (1)..(101): NCBI GI NO: 21553354 NR Description: glycine-rich RNA binding protein 7
  misc_feature (1)..(101): NCBI GI NO: 15226605 NR Description: glycine-rich RNA-binding protein (AtGRP7)
  misc_feature (1)..(101): NCBI GI NO: 30681492 NR Description: glycine-rich RNA-binding protein (AtGRP7)
  misc_feature (1)..(101): NCBI GI NO: 1346181 NR Description: Glycine-rich RNA-binding protein GRP2A
  misc_feature (1)..(101): NCBI GI NO: 1346180 NR Description: Glycine-rich RNA-binding protein GRP1A
  misc_feature (1)..(101): NCBI GI NO: 34851124 NR Description: putative glycine-rich RNA-binding protein
  misc_feature (1)..(101): NCBI GI NO: 544416 NR Description: Glycine-rich RNA-binding protein 10
  misc_feature (1)..(101): NCBI GI NO: 15235002 NR Description: glycine-rich RNA-binding protein 8 (GRP8) (CCR1)
  misc_feature (1)..(101): NCBI GI NO: 10799202 NR Description: glycine-rich RNA-binding protein [Sorghum bicolor]
  misc_feature (1)..(101): NCBI GI NO: 544423 NR Description: Glycine-rich RNA-binding protein 2
MNGQDLDGRSITVNEAQSRGSGGGGGHRGGGGGGGGYSGGGGSYGGGGGRREGGGGYSGGGGYSSRGGGGGSYGGGRREGGGGYGGGEGGGYGGSGGGGGW

SEQ ID NO: 3303 - DNA, 2057 bp, Arabidopsis thaliana
  misc_feature (1)..(2057): Ceres Seq. ID no. 12323113
acgttccgacaagacccaaatagacacagcacacaagacccaaatcgaagataggattcgcgtttatgttggtgtccgtaacctaaaaagacattctagagtgattgagatcgagagaaggaaagagagagtgagagagaaatctgggtttcttgaagctgttgtgaggatcttgttatgggtggttttattacaaaggcttgagctttttatcttcaaaccccagttttcaaacagagagaagtttttgggttaatctagtgagaatttaaagaaaatatatatagaagatggttgcaagaaccccacagaagcagaggaaagtggcgatggtggtgcctcctctcaactcagatcttctcaaggaaacgatcaacaaggttgataaatgtatggaaagactgcaagagctacagtacacaattgcaggaggaaccaaagttgtctctggtgtgaaccttagccctcgaagcactagaatttacttgaagactagtcttagatgcaagcaagaaactttaaggatcaagaatgctactaataagaaatctccagtagggaagtttcctgcttcctcaccaggagattggaggaaaatgtcactcccagcaatgctactaggagagactgtaaatgaaatcttacaagcctcacaggtcacaagagacattgtggacgccatagcaccaaagaagagtagaaagtccaggagattaacaatgtcacaagaagacgatggccctaaaacacccgagacacaacaaaaatcccgggaacagaatcctgaaactgtcagtagcaatatcaaagcaagaaggaagaaagagaagcagaacagacgatcagaatcagattctcctccatctctacaaagggcacgctcaagaattgcgttcagaaccatctctccacaagtaaagggaaataatggtgagaatagttttcggcatttggccaacagggtttcaccaaagcacaaaccttgggttaaaaaggcggttctttttccgaaccctctatttatttccggtaccgctacacaacaagcaaagttcagtagaacaatgtctccggtcatagccagaaatgagatatccagcatcaagaacaataaagaaacgccttacaagttcttaatcaaatctcctcccacatcagcatctaagtttcaggtcaagatcaggagcccacctaaggtcttggtttctcctacaagaaatggcagtaactcggttcggaagtcacctagaggctccaggtctccgacaagaactgttaacttaggaaagaagtcagcgtcgatttctcctattagaaatacgggaaagaggtctccaaagctatcaactgctgctaagctcagaagatcatttactcctacgagaaatggcagtaacttggctcgtaagtcgtctatttctccgaaaagagtcacacttcaagcatttctttctccaacaagaaatggtaacttttgtaagaagtcacccaaagcttcgatttctccaactagggtgtgcaacaagtcgcagaagctgtcaacggctgcaaagttcaggaggtcattttcgccatcgagactagctatgagggctgatgagatcactatgttccatggctcaaaagcaccatcgttaagcatttatcgttacacagaaagaatccataggtatgctcagtgtagccctgtgtgtttcgttgcagcttttgcctacatccttagatatctacagagaccagaggctaccagtacggctcgtcgtctcacatcactcaacgttcatcgccttctcatcaccagtctcttggtcgcagcaaaattcttggaacgccagtgttataacaacgcatattatgcaaaaatcggaggagtgagcactgaagagatgaataggctggagagaacgttcttggttgatgttgatttcaggctatatattacaacggagactttcgagaaacactgtctcatgttgcagaaagaaacggtgccttgtgattcaagaaaacttagaacagttcttggagagatagcttgtagctgccaagcgatttga

SEQ ID NO: 3304 - protein, 588 aa, Arabidopsis thaliana
  peptide (1)..(588): Ceres Seq. ID no. 12323114
  misc_feature (428)..(549): Pfam Name: Pfam Description:  Cyclin, N-terminal domain
  misc_feature (1)..(588): NCBI GI NO: 6729043 NR Description: hypothetical protein [Arabidopsis thaliana]
  misc_feature (1)..(434): NCBI GI NO: 30679470 NR Description: cyclin-related [Arabidopsis thaliana]
  misc_feature (1)..(360): NCBI GI NO: 11228986 NR Description: microtubule-binding protein TANGLED1 [Zea mays]
  misc_feature (425)..(565): NCBI GI NO: 25493992 NR Description: PREG-like protein
  misc_feature (430)..(565): NCBI GI NO: 15224950 NR Description: putative PREG1-like negative regulator
  misc_feature (398)..(567): NCBI GI NO: 15240794 NR Description: putative protein; protein id: At5g07450.1
  misc_feature (436)..(565): NCBI GI NO: 15229382 NR Description: putative protein; protein id: At3g63120
  misc_feature (436)..(565): NCBI GI NO: 21593009 NR Description: unknown [Arabidopsis thaliana]
  misc_feature (435)..(565): NCBI GI NO: 37536902 NR Description: hypothetical protein
  misc_feature (427)..(565): NCBI GI NO: 14140116 NR Description: PREG-like protein [Oryza sativa]
MVARTPQKQRKVAMVVPPLNSDLLKETINKVDKCMERLQELQYTIAGGTKVVSGVNLSPRSTRIYLKTSLRCKQETLRIKNATNKKSPVGKFPASSPGDWRKMSLPAMLLGETVNEILQASQVTRDIVDAIAPKKSRKSRRLTMSQEDDGPKTPETQQKSREQNPETVSSNIKARRKKEKQNRRSESDSPPSLQRARSRIAFRTISPQVKGNNGENSFRHLANRVSPKHKPWVKKAVLFPNPLFISGTATQQAKFSRTMSPVIARNEISSIKNNKETPYKFLIKSPPTSASKFQVKIRSPPKVLVSPTRNGSNSVRKSPRGSRSPTRTVNLGKKSASISPIRNTGKRSPKLSTAAKLRRSFTPTRNGSNLARKSSISPKRVTLQAFLSPTRNGNFCKKSPKASISPTRVCNKSQKLSTAAKFRRSFSPSRLAMRADEITMFHGSKAPSLSIYRYTERIHRYAQCSPVCFVAAFAYILRYLQRPEATSTARRLTSLNVHRLLITSLLVAAKFLERQCYNNAYYAKIGGVSTEEMNRLERTFLVDVDFRLYITTETFEKHCLMLQKETVPCDSRKLRTVLGEIACSCQAI

SEQ ID NO: 3305 - protein, 575 aa, Arabidopsis thaliana
  peptide (1)..(575): Ceres Seq. ID no. 12323115
  misc_feature (415)..(536): Pfam Name: Pfam Description:  Cyclin, N-terminal domain
  misc_feature (1)..(575): NCBI GI NO: 6729043 NR Description: hypothetical protein [Arabidopsis thaliana]
  misc_feature (1)..(421): NCBI GI NO: 30679470 NR Description: cyclin-related [Arabidopsis thaliana]
  misc_feature (1)..(347): NCBI GI NO: 11228986 NR Description: microtubule-binding protein TANGLED1 [Zea mays]
  misc_feature (412)..(552): NCBI GI NO: 25493992 NR Description: PREG-like protein
  misc_feature (417)..(552): NCBI GI NO: 15224950 NR Description: putative PREG1-like negative regulator
  misc_feature (385)..(554): NCBI GI NO: 15240794 NR Description: putative protein; protein id: At5g07450.1
  misc_feature (423)..(552): NCBI GI NO: 15229382 NR Description: putative protein; protein id: At3g63120
  misc_feature (423)..(552): NCBI GI NO: 21593009 NR Description: unknown [Arabidopsis thaliana]
  misc_feature (422)..(552): NCBI GI NO: 37536902 NR Description: hypothetical protein
  misc_feature (414)..(552): NCBI GI NO: 14140116 NR Description: PREG-like protein [Oryza sativa]
MVVPPLNSDLLKETINKVDKCMERLQELQYTIAGGTKVVSGVNLSPRSTRIYLKTSLRCKQETLRIKNATNKKSPVGKFPASSPGDWRKMSLPAMLLGETVNEILQASQVTRDIVDAIAPKKSRKSRRLTMSQEDDGPKTPETQQKSREQNPETVSSNIKARRKKEKQNRRSESDSPPSLQRARSRIAFRTISPQVKGNNGENSFRHLANRVSPKHKPWVKKAVLFPNPLFISGTATQQAKFSRTMSPVIARNEISSIKNNKETPYKFLIKSPPTSASKFQVKIRSPPKVLVSPTRNGSNSVRKSPRGSRSPTRTVNLGKKSASISPIRNTGKRSPKLSTAAKLRRSFTPTRNGSNLARKSSISPKRVTLQAFLSPTRNGNFCKKSPKASISPTRVCNKSQKLSTAAKFRRSFSPSRLAMRADEITMFHGSKAPSLSIYRYTERIHRYAQCSPVCFVAAFAYILRYLQRPEATSTARRLTSLNVHRLLITSLLVAAKFLERQCYNNAYYAKIGGVSTEEMNRLERTFLVDVDFRLYITTETFEKHCLMLQKETVPCDSRKLRTVLGEIACSCQAI

SEQ ID NO: 3306 - protein, 554 aa, Arabidopsis thaliana
  peptide (1)..(554): Ceres Seq. ID no. 12323116
  misc_feature (394)..(515): Pfam Name: Pfam Description:  Cyclin, N-terminal domain
  misc_feature (1)..(554): NCBI GI NO: 6729043 NR Description: hypothetical protein [Arabidopsis thaliana]
  misc_feature (1)..(400): NCBI GI NO: 30679470 NR Description: cyclin-related [Arabidopsis thaliana]
  misc_feature (1)..(326): NCBI GI NO: 11228986 NR Description: microtubule-binding protein TANGLED1 [Zea mays]
  misc_feature (391)..(531): NCBI GI NO: 25493992 NR Description: PREG-like protein
  misc_feature (396)..(531): NCBI GI NO: 15224950 NR Description: putative PREG1-like negative regulator
  misc_feature (364)..(533): NCBI GI NO: 15240794 NR Description: putative protein; protein id: At5g07450.1
  misc_feature (402)..(531): NCBI GI NO: 15229382 NR Description: putative protein; protein id: At3g63120
  misc_feature (402)..(531): NCBI GI NO: 21593009 NR Description: unknown [Arabidopsis thaliana]
  misc_feature (401)..(531): NCBI GI NO: 37536902 NR Description: hypothetical protein
  misc_feature (393)..(531): NCBI GI NO: 14140116 NR Description: PREG-like protein [Oryza sativa]
MERLQELQYTIAGGTKVVSGVNLSPRSTRIYLKTSLRCKQETLRIKNATNKKSPVGKFPASSPGDWRKMSLPAMLLGETVNEILQASQVTRDIVDAIAPKKSRKSRRLTMSQEDDGPKTPETQQKSREQNPETVSSNIKARRKKEKQNRRSESDSPPSLQRARSRIAFRTISPQVKGNNGENSFRHLANRVSPKHKPWVKKAVLFPNPLFISGTATQQAKFSRTMSPVIARNEISSIKNNKETPYKFLIKSPPTSASKFQVKIRSPPKVLVSPTRNGSNSVRKSPRGSRSPTRTVNLGKKSASISPIRNTGKRSPKLSTAAKLRRSFTPTRNGSNLARKSSISPKRVTLQAFLSPTRNGNFCKKSPKASISPTRVCNKSQKLSTAAKFRRSFSPSRLAMRADEITMFHGSKAPSLSIYRYTERIHRYAQCSPVCFVAAFAYILRYLQRPEATSTARRLTSLNVHRLLITSLLVAAKFLERQCYNNAYYAKIGGVSTEEMNRLERTFLVDVDFRLYITTETFEKHCLMLQKETVPCDSRKLRTVLGEIACSCQAI

SEQ ID NO: 3307 - DNA, 1290 bp, Arabidopsis thaliana
  misc_feature (1)..(1290): Ceres Seq. ID no. 13576771
aagcaaataattacgagattagcctcgcactgaacttcaattctctctttccttttttccgttcgatgagagcttaagctctgccgcgttttcgttctccgatctttttccatttttatcagtttcttctcttccaaattagggtttttcttttcagtctttgggaatgattttgatgcggtgaaaaagttttttttttttgagggggaaggatttctgggtttgctcttagggttttgtcttttcaatcgccggagcctgaaataatccggcagatatggcgtctgaattgccgatgagccctcatttggagcagattcacggagaaatccgtgaccatttccgagccctcgcgaatggcttccagaggttggataagatcaaggattctagtagacaaagcaagcaactcgaagaacttgctgagaagatgagagactgtaaaaggttggttaaggagtttgatcgtgaactcaaagatggggaagctcgaaattctcctcaagtaaataagcaattgaatgatgagaaacaatctatgattaaggaactcaactcttatgttgcactaagaaaaacgtacttgaatacactcggcaacaagaaagttgaactttttgatactggagctggagtcagcggtgaacccacagctgaagaaaacgtccaaatggcttcaacaatgtcaaaccaagagcttgtcgatgctggaatgaaaaggatggacgagactgaccaggctattgaacgttctaaacaggttgtgcatcagacactcgaagttggcactcaaactgcatctaacttaaagggacagacggatcaaatgggccgcgttgtaaacgacctagacacaattcagttctctcttaagaaagcttcgcagctggtgaaagagataggaagacaggtagctacagataaatgcataatggcgttcctgtttctgattgtctgtggtgttatagctataatcattgtgaagatcgtgaacccaaacaacaaagacatcagagacatccctggactagctcctccagcgcaatcgagaaagctcttgtacttcagagaatagccttttggcagggccgagagggaaggtttggtgcatattacacttgctgttgcgtgtgtgttcattctttcatgaaagagggcttgtttatgtcatttaaatttgagctttcattagagttttgtatcatatatcatcattctttaacttatgaccacatgttgtataattttataccaagttcaatatattttataagatccgttttattgtcc

SEQ ID NO: 3308 - protein, 265 aa, Arabidopsis thaliana
  peptide (1)..(265): Ceres Seq. ID no. 13576772
  misc_feature (77)..(215): Pfam Name: Pfam Description:  Vesicle transport v-SNARE protein
  misc_feature (1)..(265): NCBI GI NO: 22330102 NR Description: expressed protein [Arabidopsis thaliana]
  misc_feature (1)..(264): NCBI GI NO: 18401508 NR Description: expressed protein [Arabidopsis thaliana]
  misc_feature (1)..(264): NCBI GI NO: 21536876 NR Description: unknown [Arabidopsis thaliana]
  misc_feature (1)..(261): NCBI GI NO: 23237830 NR Description: contains ESTs C19491
  misc_feature (1)..(257): NCBI GI NO: 34896946 NR Description: putative vesicle soluble NSF attachment protein receptor
  misc_feature (17)..(265): NCBI GI NO: 25370781 NR Description: F11A17.20 [imported] - Arabidopsis thaliana
  misc_feature (7)..(262): NCBI GI NO: 18403771 NR Description: expressed protein [Arabidopsis thaliana]
  misc_feature (7)..(262): NCBI GI NO: 27805643 NR Description: Novel plant SNARE 11 (AtNPSN11)
  misc_feature (7)..(262): NCBI GI NO: 25370780 NR Description: hypothetical protein At2g35190
  misc_feature (1)..(94): NCBI GI NO: 25370781 NR Description: F11A17.20 [imported] - Arabidopsis thaliana
MASELPMSPHLEQIHGEIRDHFRALANGFQRLDKIKDSSRQSKQLEELAEKMRDCKRLVKEFDRELKDGEARNSPQVNKQLNDEKQSMIKELNSYVALRKTYLNTLGNKKVELFDTGAGVSGEPTAEENVQMASTMSNQELVDAGMKRMDETDQAIERSKQVVHQTLEVGTQTASNLKGQTDQMGRVVNDLDTIQFSLKKASQLVKEIGRQVATDKCIMAFLFLIVCGVIAIIIVKIVNPNNKDIRDIPGLAPPAQSRKLLYFRE

SEQ ID NO: 3309 - protein, 259 aa, Arabidopsis thaliana
  peptide (1)..(259): Ceres Seq. ID no. 13576773
  misc_feature (71)..(209): Pfam Name: Pfam Description:  Vesicle transport v-SNARE protein
  misc_feature (1)..(259): NCBI GI NO: 22330102 NR Description: expressed protein [Arabidopsis thaliana]
  misc_feature (1)..(258): NCBI GI NO: 18401508 NR Description: expressed protein [Arabidopsis thaliana]
  misc_feature (1)..(258): NCBI GI NO: 21536876 NR Description: unknown [Arabidopsis thaliana]
  misc_feature (1)..(255): NCBI GI NO: 23237830 NR Description: contains ESTs C19491
  misc_feature (1)..(251): NCBI GI NO: 34896946 NR Description: putative vesicle soluble NSF attachment protein receptor
  misc_feature (11)..(259): NCBI GI NO: 25370781 NR Description: F11A17.20 [imported] - Arabidopsis thaliana
  misc_feature (1)..(256): NCBI GI NO: 18403771 NR Description: expressed protein [Arabidopsis thaliana]
  misc_feature (1)..(256): NCBI GI NO: 27805643 NR Description: Novel plant SNARE 11 (AtNPSN11)
  misc_feature (1)..(256): NCBI GI NO: 25370780 NR Description: hypothetical protein At2g35190
  misc_feature (1)..(88): NCBI GI NO: 25370781 NR Description: F11A17.20 [imported] - Arabidopsis thaliana
MSPHLEQIHGEIRDHFRALANGFQRLDKIKDSSRQSKQLEELAEKMRDCKRLVKEFDRELKDGEARNSPQVNKQLNDEKQSMIKELNSYVALRKTYLNTLGNKKVELFDTGAGVSGEPTAEENVQMASTMSNQELVDAGMKRMDETDQAIERSKQVVHQTLEVGTQTASNLKGQTDQMGRVVNDLDTIQFSLKKASQLVKEIGRQVATDKCIMAFLFLIVCGVIAIIIVKIVNPNNKDIRDIPGLAPPAQSRKLLYFRE

SEQ ID NO: 3310 - protein, 214 aa, Arabidopsis thaliana
  peptide (1)..(214): Ceres Seq. ID no. 13576774
  misc_feature (26)..(164): Pfam Name: Pfam Description:  Vesicle transport v-SNARE protein
  misc_feature (1)..(214): NCBI GI NO: 22330102 NR Description: expressed protein [Arabidopsis thaliana]
  misc_feature (1)..(213): NCBI GI NO: 18401508 NR Description: expressed protein [Arabidopsis thaliana]
  misc_feature (1)..(213): NCBI GI NO: 21536876 NR Description: unknown [Arabidopsis thaliana]
  misc_feature (1)..(210): NCBI GI NO: 23237830 NR Description: contains ESTs C19491
  misc_feature (1)..(206): NCBI GI NO: 34896946 NR Description: putative vesicle soluble NSF attachment protein receptor
  misc_feature (1)..(214): NCBI GI NO: 25370781 NR Description: F11A17.20 [imported] - Arabidopsis thaliana
  misc_feature (1)..(211): NCBI GI NO: 18403771 NR Description: expressed protein [Arabidopsis thaliana]
  misc_feature (1)..(211): NCBI GI NO: 27805643 NR Description: Novel plant SNARE 11 (AtNPSN11)
  misc_feature (1)..(211): NCBI GI NO: 25370780 NR Description: hypothetical protein At2g35190
  misc_feature (1)..(43): NCBI GI NO: 25370781 NR Description: F11A17.20 [imported] - Arabidopsis thaliana
MRDCKRLVKEFDRELKDGEARNSPQVNKQLNDEKQSMIKELNSYVALRKTYLNTLGNKKVELFDTGAGVSGEPTAEENVQMASTMSNQELVDAGMKRMDETDQAIERSKQVVHQTLEVGTQTASNLKGQTDQMGRVVNDLDTIQFSLKKASQLVKEIGRQVATDKCIMAFLFLIVCGVIAIIIVKIVNPNNKDIRDIPGLAPPAQSRKLLYFRE

SEQ ID NO: 3311 - DNA, 1301 bp, Arabidopsis thaliana
  misc_feature (1)..(1301): Ceres Seq. ID no. 13491623
aatatccaaaataacaaaacatctcttcacttctcatcacaccatgcatcatcatcatcatccatgcaatcgcaaacccttcacaaccatcttctccttcttccttctctatctcaatctccataaccaacaaattatcgaagctcgaaatccatctcaatttacgaccaacccatcccctgacgtctctataccggaaatcaaacgtcacctccaacagtacggttacctcccacaaaacaaagaatccgacgacgtttcgttcgaacaagctctcgttcgttaccagaaaaatctcggtctaccaataaccggtaaaccggattccgacacgttgtcacagattctattaccaagatgtgggttccctgatgacgtggaacccaaaacggcaccgtttcacacaggaaaaaaatacgtgtacttccccggacggcccaggtggacaagagacgtcccactgaaactcacgtacgccttctcgcaggagaacctaactccttacttagcaccaactgacatacggcgcgtgttccgacgcgctttcggcaagtgggcttcggtgatcccagtatccttcatcgaaacagaggattacgtcatcgccgacatcaagatcggattcttcaacggagatcacggcgacggagaaccgttcgacggcgttttaggtgttttagcacacactttctctccggaaaacggtaggcttcatctagacaaagcagagacgtgggccgtagatttcgatgaggaaaaatctagtgtggccgtcgatttggaatctgtggcggtgcacgagatcggtcacgtgcttggattaggacatagctcggtgaaagacgcggctatgtatccaactttaaagccaagaagtaagaaagtgaatttgaatatggacgacgtcgttggagtacagtctttgtacggaacaaaccctaatttcacgttaaatagtttacttgcgtcggaaacttcgacaaatctagccgatggttcgaggatacggtctcaaggaatgatctattcgactttgagtactgttatcgctctctgttttcttaattggtagttcgtagacttagataattttctttatacaagaaatccgaaaacgtatagaatcatacagacgcatgaatttgttgttcaaagtagtagtctaatcctatgtttctgtttagaataataccatgttcttttttagtttatattagattgggcttcaagttatacggcccaatagaatgctaatgtattaaacgaagaacccagttcagagcaacacaattcgttggcct

SEQ ID NO: 3312 - protein, 356 aa, Arabidopsis thaliana
  peptide (1)..(356): Ceres Seq. ID no. 13491624
  misc_feature (141)..(250): Pfam Name: Pfam Description:  Matrixin
  misc_feature (15)..(356): NCBI GI NO: 15225398 NR Description: metallo proteinase -related [Arabidopsis thaliana]
  misc_feature (15)..(356): NCBI GI NO: 25455788 NR Description: metalloproteinase (EC 3.4.24.-)
  misc_feature (64)..(354): NCBI GI NO: 15235820 NR Description: proteinase like protein [Arabidopsis thaliana]
  misc_feature (64)..(354): NCBI GI NO: 28393482 NR Description: putative proteinase [Arabidopsis thaliana]
  misc_feature (64)..(354): NCBI GI NO: 21553383 NR Description: proteinase like protein [Arabidopsis thaliana]
  misc_feature (64)..(328): NCBI GI NO: 37536782 NR Description: putative metalloproteinase
  misc_feature (64)..(354): NCBI GI NO: 15218963 NR Description: metallo proteinase -related [Arabidopsis thaliana]
  misc_feature (67)..(351): NCBI GI NO: 15223067 NR Description: matrix metallo proteinase -related
  misc_feature (53)..(313): NCBI GI NO: 2827777 NR Description: Metalloendoproteinase 1 precursor (SMEP1)
  misc_feature (84)..(356): NCBI GI NO: 7488435 NR Description: zinc metalloproteinase homolog F3I6
ISKITKHLFTSHHTMHHHHHPCNRKPFTTIFSFFLLYLNLHNQQIIEARNPSQFTTNPSPDVSIPEIKRHLQQYGYLPQNKESDDVSFEQALVRYQKNLGLPITGKPDSDTLSQILLPRCGFPDDVEPKTAPFHTGKKYVYFPGRPRWTRDVPLKLTYAFSQENLTPYLAPTDIRRVFRRAFGKWASVIPVSFIETEDYVIADIKIGFFNGDHGDGEPFDGVLGVLAHTFSPENGRLHLDKAETWAVDFDEEKSSVAVDLESVAVHEIGHVLGLGHSSVKDAAMYPTLKPRSKKVNLNMDDVVGVQSLYGTNPNFTLNSLLASETSTNLADGSRIRSQGMIYSTLSTVIALCFLNW

SEQ ID NO: 3313 - protein, 342 aa, Arabidopsis thaliana
  peptide (1)..(342): Ceres Seq. ID no. 13491625
  misc_feature (127)..(236): Pfam Name: Pfam Description:  Matrixin
  misc_feature (1)..(342): NCBI GI NO: 15225398 NR Description: metallo proteinase -related [Arabidopsis thaliana]
  misc_feature (1)..(342): NCBI GI NO: 25455788 NR Description: metalloproteinase (EC 3.4.24.-)
  misc_feature (50)..(340): NCBI GI NO: 15235820 NR Description: proteinase like protein [Arabidopsis thaliana]
  misc_feature (50)..(340): NCBI GI NO: 21553383 NR Description: proteinase like protein [Arabidopsis thaliana]
  misc_feature (50)..(340): NCBI GI NO: 28393482 NR Description: putative proteinase [Arabidopsis thaliana]
  misc_feature (50)..(314): NCBI GI NO: 37536782 NR Description: putative metalloproteinase
  misc_feature (50)..(340): NCBI GI NO: 15218963 NR Description: metallo proteinase -related [Arabidopsis thaliana]
  misc_feature (53)..(337): NCBI GI NO: 15223067 NR Description: matrix metallo proteinase -related
  misc_feature (39)..(299): NCBI GI NO: 2827777 NR Description: Metalloendoproteinase 1 precursor (SMEP1)
  misc_feature (70)..(342): NCBI GI NO: 7488435 NR Description: zinc metalloproteinase homolog F3I6
MHHHHHPCNRKPFTTIFSFFLLYLNLHNQQIIEARNPSQFTTNPSPDVSIPEIKRHLQQYGYLPQNKESDDVSFEQALVRYQKNLGLPITGKPDSDTLSQILLPRCGFPDDVEPKTAPFHTGKKYVYFPGRPRWTRDVPLKLTYAFSQENLTPYLAPTDIRRVFRRAFGKWASVIPVSFIETEDYVIADIKIGFFNGDHGDGEPFDGVLGVLAHTFSPENGRLHLDKAETWAVDFDEEKSSVAVDLESVAVHEIGHVLGLGHSSVKDAAMYPTLKPRSKKVNLNMDDVVGVQSLYGTNPNFTLNSLLASETSTNLADGSRIRSQGMIYSTLSTVIALCFLNW

SEQ ID NO: 3314 - DNA, 1017 bp, Arabidopsis thaliana
  misc_feature (1)..(1017): Ceres Seq. ID no. 12371487
aaactcccagatcttgtcgatttatttatttcctctccaaagcaaaagcttcttcgatcgtccttgtctcgttttcaattctaaatgttgtgtgcagaaaaatcatgactttggcttctccacgagtttcaaattcaaagacgactgtgttgttgtttcctcgaaaagtttcttcaattgcatttgctattggtggattaacttctttcgtcatcttcgcttctctgcttcttttcacttatcccattggttcctctgttactgactatttctacagaacagagaccactcaaaacgtccagtttcaccatagtatccatgatcctgatcgtaacccatctcctgtttctagctcagagtcaccaccagtattgacacaagatagtgatgataaagtgcttcccaaggattcgaatgatgttagattaggtgaagaaacaaactcagggaagtcttcaaatgtttccattgatgaagaagctacacaagatcatgtagaaacagaatgtgatttatatcatggtaactggttttatgatccgatgggaccgttgtatacaaacaactcttgtcctcttctgacacagatgcaaaactgtcagggtaatggaagacctgacaaggggtatgaaaactggagatggaaaccgtctcagtgtgatcttccacggtttgatgctaagaaatttcttgagctaatgagaggcaagacactagcttttataggcgattcagtagctcgtaatcagatggagtccatgatgtgtcttctttggcaggtagaaactccggttaaccgtgggaacaggaagatgcagagatggtatttcaggtcatcatcggtgatgatagctcggatgtggtcatcttggctggtccatcagttcaatgaaccgtttggttttgctacagatggtgtaactaaactcaagcttgaccaacccgatgagcgcataattgaagctcttccgaatttcgatgtggttgtactttcatcaggtcactggtttgcaaaac

SEQ ID NO: 3315 - protein, 338 aa, Arabidopsis thaliana
  peptide (1)..(338): Ceres Seq. ID no. 12371488
  misc_feature (35)..(337): NCBI GI NO: 15242138 NR Description: putative protein; protein id: At5g51640
  misc_feature (112)..(337): NCBI GI NO: 22328922 NR Description: putative protein; protein id: At4g25360
  misc_feature (35)..(138): NCBI GI NO: 22328922 NR Description: putative protein; protein id: At4g25360
  misc_feature (112)..(337): NCBI GI NO: 7487578 NR Description: hypothetical protein T30C3
  misc_feature (35)..(138): NCBI GI NO: 7487578 NR Description: hypothetical protein T30C3
  misc_feature (115)..(337): NCBI GI NO: 34906936 NR Description: leaf senescence related protein-like
  misc_feature (154)..(337): NCBI GI NO: 15237044 NR Description: putative protein; protein id: At4g11090.1
  misc_feature (152)..(336): NCBI GI NO: 15223079 NR Description: unknown protein; protein id: At1g70230
  misc_feature (115)..(337): NCBI GI NO: 30678135 NR Description: expressed protein [Arabidopsis thaliana]
  misc_feature (70)..(336): NCBI GI NO: 15232907 NR Description: hypothetical protein; protein id: At3g02440.1
TPRSCRFIYFLSKAKASSIVLVSFSILNVVCRKIMTLASPRVSNSKTTVLLFPRKVSSIAFAIGGLTSFVIFASLLLFTYPIGSSVTDYFYRTETTQNVQFHHSIHDPDRNPSPVSSSESPPVLTQDSDDKVLPKDSNDVRLGEETNSGKSSNVSIDEEATQDHVETECDLYHGNWFYDPMGPLYTNNSCPLLTQMQNCQGNGRPDKGYENWRWKPSQCDLPRFDAKKFLELMRGKTLAFIGDSVARNQMESMMCLLWQVETPVNRGNRKMQRWYFRSSSVMIARMWSSWLVHQFNEPFGFATDGVTKLKLDQPDERIIEALPNFDVVVLSSGHWFAK

SEQ ID NO: 3316 - protein, 304 aa, Arabidopsis thaliana
  peptide (1)..(304): Ceres Seq. ID no. 12371489
  misc_feature (1)..(303): NCBI GI NO: 15242138 NR Description: putative protein; protein id: At5g51640
  misc_feature (78)..(303): NCBI GI NO: 22328922 NR Description: putative protein; protein id: At4g25360
  misc_feature (1)..(104): NCBI GI NO: 22328922 NR Description: putative protein; protein id: At4g25360
  misc_feature (78)..(303): NCBI GI NO: 7487578 NR Description: hypothetical protein T30C3
  misc_feature (1)..(104): NCBI GI NO: 7487578 NR Description: hypothetical protein T30C3
  misc_feature (81)..(303): NCBI GI NO: 34906936 NR Description: leaf senescence related protein-like
  misc_feature (120)..(303): NCBI GI NO: 15237044 NR Description: putative protein; protein id: At4g11090.1
  misc_feature (118)..(302): NCBI GI NO: 15223079 NR Description: unknown protein; protein id: At1g70230
  misc_feature (81)..(303): NCBI GI NO: 30678135 NR Description: expressed protein [Arabidopsis thaliana]
  misc_feature (36)..(302): NCBI GI NO: 15232907 NR Description: hypothetical protein; protein id: At3g02440.1
MTLASPRVSNSKTTVLLFPRKVSSIAFAIGGLTSFVIFASLLLFTYPIGSSVTDYFYRTETTQNVQFHHSIHDPDRNPSPVSSSESPPVLTQDSDDKVLPKDSNDVRLGEETNSGKSSNVSIDEEATQDHVETECDLYHGNWFYDPMGPLYTNNSCPLLTQMQNCQGNGRPDKGYENWRWKPSQCDLPRFDAKKFLELMRGKTLAFIGDSVARNQMESMMCLLWQVETPVNRGNRKMQRWYFRSSSVMIARMWSSWLVHQFNEPFGFATDGVTKLKLDQPDERIIEALPNFDVVVLSSGHWFAK

SEQ ID NO: 3317 - DNA, 1073 bp, Arabidopsis thaliana
  misc_feature (1)..(1073): Ceres Seq. ID no. 12558213
atgctttagctatctttaaccctttttcccttctctctttctatttctccctcatacctttgtttattctgatgaagttgtgagcactgaaagaaaagaagagaggagaagagagatatgcacaagaagaattaaacttagggacacaaaacaacatgacttggtgcaatgaccgtagcgatgttcagaccgttgaaagaatcattccctccccgggggcggctgagtcccccgtagcctcacttccggtctcttgtcacaaaacttgcccttcttgtggccataacttcaagtttcacgaacaggctgggatccatgacttgccgggacttcctgctggagtaaaatttgatccgacggatcaagaggtcttggagcatcttgaaggcaaggtaagagatgacgcaaaaaagcttcatcctctcattgatgagtttatccgtaccatcgatggtgaaaacggcatttgttatacccatcctgaaaaattgccaggagtgaacaaggacgggacggtgcgtcatttcttccaccgaccgtcgaaggcatacacgacgggaacaagaaagcgacgtaaagtccacactgattctgacgtcggtggagagacacggtggcacaagacaggaaaaacacggccagttcttgctggaggaagagtgagaggctacaagaaaatcctagtgctctacacaaactacggcaaacaaaaaaaacccgagaagactaattgggtaatgcatcaatatcatcttggcactagcgaggaagagaaagaaggtgagctcgtcgtctccaaagtcttttaccagactcaaccacgtcaatgcggtggctccgttgctgctgcagccaccgctaaggaccgaccttacctccacggcctcggtggaggtggtggccgccaccttcattaccatcttcatcataacaacggtaacggtaagagcaacggcagtgggggaaccgccggagccggtgagtattatcacaatattccggctattatctcgttcaatcagaccgggatacagaaccacttggttcatgactctcaaccttttatcccttaa

SEQ ID NO: 3318 - protein, 305 aa, Arabidopsis thaliana
  peptide (1)..(305): Ceres Seq. ID no. 12558214
  misc_feature (59)..(201): Pfam Name: NAM Pfam Description: No apical meristem
  misc_feature (1)..(305): NCBI GI NO: 15235314 NR Description: similar to NAM protein, putative
  misc_feature (1)..(305): NCBI GI NO: 34911014 NR Description: OJ1125_C04.12
  misc_feature (115)..(305): NCBI GI NO: 12751304 NR Description: CUC2-like protein [Brassica napus]
  misc_feature (1)..(226): NCBI GI NO: 18396807 NR Description: NAM protein, putative; protein id: At1g28470
  misc_feature (1)..(226): NCBI GI NO: 21554371 NR Description: NAM protein, putative [Arabidopsis thaliana]
  misc_feature (36)..(268): NCBI GI NO: 15233497 NR Description: putative protein; protein id: At4g29230.1
  misc_feature (53)..(226): NCBI GI NO: 6560767 NR Description: F3M18.9 [Arabidopsis thaliana]
  misc_feature (36)..(225): NCBI GI NO: 15241889 NR Description: putative protein; protein id: At5g56620.1
  misc_feature (62)..(235): NCBI GI NO: 34906416 NR Description: P0710E05.22
  misc_feature (2)..(224): NCBI GI NO: 12320749 NR Description: unknown protein [Arabidopsis thaliana]
MTWCNDRSDVQTVERIIPSPGAAESPVASLPVSCHKTCPSCGHNFKFHEQAGIHDLPGLPAGVKFDPTDQEVLEHLEGKVRDDAKKLHPLIDEFIRTIDGENGICYTHPEKLPGVNKDGTVRHFFHRPSKAYTTGTRKRRKVHTDSDVGGETRWHKTGKTRPVLAGGRVRGYKKILVLYTNYGKQKKPEKTNWVMHQYHLGTSEEEKEGELVVSKVFYQTQPRQCGGSVAAAATAKDRPYLHGLGGGGGRHLHYHLHHNNGNGKSNGSGGTAGAGEYYHNIPAIISFNQTGIQNHLVHDSQPFIP

SEQ ID NO: 3319 - DNA, 1213 bp, Arabidopsis thaliana
  misc_feature (1)..(1213): Ceres Seq. ID no. 12327875
attttcaaaacttatccgaccttatcttagcgaaacaaaatctctcctctgattattactactcaacttcgcattatcactcaaacaaacatattgacatctgagtcttgtcatcatggcaacttctctccaagccgccgcaacttttcttcaaccggcgaagattgccgcttctccttctcgtaatgtccatctccgatcaaaccaaaccgtgggcaagtcctttgggttagactcttcacaagctaggctcacgtgctctctccactctgacctcaaagacttcgctggaaaatgctccgacgccgccaagatcgccggttttgctctagccacctctgctctcgttgtctcgggggccggtgcggagggagcaccaaagaggctaacgtacgacgagatacagagcaagacttacatggaggtaaagggtaccggtacggcaaaccagtgtccaactatcgatggtggctctgagacattctcgttcaaagctggtaagtacacaggcaagaagttctgcttcgagcccacttccttcaccgtcaaggcagatagcgtcagcaagaatgcaccgccggatttccaaaacaccaagctcatgacccgtctcacttacacactcgatgagatcgaaggacccttcgaggttggttcagacggaagcgtgaagttcaaggaagaagatggtatcgattacgcagcagtcacagtccagcttccgggaggagaacgcgtgccgttcctcttcacggttaagcagctcgaggcttcagggaaacccgaaagcttcagtggcaagttcttagttccatcgtaccgtggctcgtcctttttggacccaaagggtcgtggtggatccactgggtacgataatgcagtggctttgcctgccggaggcagaggagacgaggaagagctatccaaggaaaacgtcaagaacacggcggcttccgtcggagagatcactttgaagatcacaaagagcaaaccggagacaggtgaagtgatcggagtgttcgagagtcttcagccatcggatactgacttgggtgctaaggtaccaaaagatgtgaagatccaaggggtttggtacggtcagattgagtgattcatataatttgttacttttgtaaaattgtattgaaacaacttctttctatcaatatatatatatatattaacgctcgataaataaatatttatatcagtg

SEQ ID NO: 3320 - protein, 331 aa, Arabidopsis thaliana
  peptide (1)..(331): Ceres Seq. ID no. 12327876
  misc_feature (95)..(331): Pfam Name: Pfam Description:  Manganese-stabilising protein / photosystem II polypeptide
  misc_feature (1)..(331): NCBI GI NO: 15230324 NR Description: photosystem II oxygen-evolving complex 33
  misc_feature (1)..(331): NCBI GI NO: 21593220 NR Description: 33 kDa polypeptide of oxygen-evolving complex
  misc_feature (1)..(331): NCBI GI NO: 15240013 NR Description: photosystem II oxygen-evolving complex 33
  misc_feature (1)..(331): NCBI GI NO: 13926291 NR Description: AT5g66570/K1F13_25 [Arabidopsis thaliana]
  misc_feature (1)..(331): NCBI GI NO: 15912247 NR Description: AT5g66570/K1F13_25 [Arabidopsis thaliana]
  misc_feature (1)..(331): NCBI GI NO: 22530906 NR Description: 33 kDa polypeptide of oxygen-evolving complex
  misc_feature (1)..(331): NCBI GI NO: 15451006 NR Description: 33 kDa polypeptide of oxygen-evolving complex
  misc_feature (1)..(331): NCBI GI NO: 99745 NR Description: photosystem II oxygen-evolving complex protein 1 precursor
  misc_feature (1)..(331): NCBI GI NO: 30013657 NR Description: oxygen evolving complex 33 kDa photosystem II
  misc_feature (1)..(331): NCBI GI NO: 11134054 NR Description: Oxygen-evolving enhancer protein 1
MATSLQAAATFLQPAKIAASPSRNVHLRSNQTVGKSFGLDSSQARLTCSLHSDLKDFAGKCSDAAKIAGFALATSALVVSGAGAEGAPKRLTYDEIQSKTYMEVKGTGTANQCPTIDGGSETFSFKAGKYTGKKFCFEPTSFTVKADSVSKNAPPDFQNTKLMTRLTYTLDEIEGPFEVGSDGSVKFKEEDGIDYAAVTVQLPGGERVPFLFTVKQLEASGKPESFSGKFLVPSYRGSSFLDPKGRGGSTGYDNAVALPAGGRGDEEELSKENVKNTAASVGEITLKITKSKPETGEVIGVFESLQPSDTDLGAKVPKDVKIQGVWYGQIE

SEQ ID NO: 3321 - protein, 230 aa, Arabidopsis thaliana
  peptide (1)..(230): Ceres Seq. ID no. 12327877
  misc_feature (1)..(230): Pfam Name: Pfam Description:  Manganese-stabilising protein / photosystem II polypeptide
  misc_feature (1)..(230): NCBI GI NO: 15230324 NR Description: photosystem II oxygen-evolving complex 33
  misc_feature (1)..(230): NCBI GI NO: 21593220 NR Description: 33 kDa polypeptide of oxygen-evolving complex
  misc_feature (1)..(230): NCBI GI NO: 15240013 NR Description: photosystem II oxygen-evolving complex 33
  misc_feature (1)..(230): NCBI GI NO: 13926291 NR Description: AT5g66570/K1F13_25 [Arabidopsis thaliana]
  misc_feature (1)..(230): NCBI GI NO: 15912247 NR Description: AT5g66570/K1F13_25 [Arabidopsis thaliana]
  misc_feature (1)..(230): NCBI GI NO: 22530906 NR Description: 33 kDa polypeptide of oxygen-evolving complex
  misc_feature (1)..(230): NCBI GI NO: 15451006 NR Description: 33 kDa polypeptide of oxygen-evolving complex
  misc_feature (1)..(230): NCBI GI NO: 99745 NR Description: photosystem II oxygen-evolving complex protein 1 precursor
  misc_feature (1)..(230): NCBI GI NO: 30013657 NR Description: oxygen evolving complex 33 kDa photosystem II
  misc_feature (1)..(230): NCBI GI NO: 11134054 NR Description: Oxygen-evolving enhancer protein 1
MEVKGTGTANQCPTIDGGSETFSFKAGKYTGKKFCFEPTSFTVKADSVSKNAPPDFQNTKLMTRLTYTLDEIEGPFEVGSDGSVKFKEEDGIDYAAVTVQLPGGERVPFLFTVKQLEASGKPESFSGKFLVPSYRGSSFLDPKGRGGSTGYDNAVALPAGGRGDEEELSKENVKNTAASVGEITLKITKSKPETGEVIGVFESLQPSDTDLGAKVPKDVKIQGVWYGQIE

SEQ ID NO: 3322 - protein, 169 aa, Arabidopsis thaliana
  peptide (1)..(169): Ceres Seq. ID no. 12327878
  misc_feature (1)..(169): Pfam Name: Pfam Description:  Manganese-stabilising protein / photosystem II polypeptide
  misc_feature (1)..(169): NCBI GI NO: 15230324 NR Description: photosystem II oxygen-evolving complex 33
  misc_feature (1)..(169): NCBI GI NO: 21593220 NR Description: 33 kDa polypeptide of oxygen-evolving complex
  misc_feature (1)..(169): NCBI GI NO: 15240013 NR Description: photosystem II oxygen-evolving complex 33
  misc_feature (1)..(169): NCBI GI NO: 13926291 NR Description: AT5g66570/K1F13_25 [Arabidopsis thaliana]
  misc_feature (1)..(169): NCBI GI NO: 15912247 NR Description: AT5g66570/K1F13_25 [Arabidopsis thaliana]
  misc_feature (1)..(169): NCBI GI NO: 22530906 NR Description: 33 kDa polypeptide of oxygen-evolving complex
  misc_feature (1)..(169): NCBI GI NO: 15451006 NR Description: 33 kDa polypeptide of oxygen-evolving complex
  misc_feature (1)..(169): NCBI GI NO: 99745 NR Description: photosystem II oxygen-evolving complex protein 1 precursor
  misc_feature (1)..(169): NCBI GI NO: 30013657 NR Description: oxygen evolving complex 33 kDa photosystem II
  misc_feature (1)..(169): NCBI GI NO: 11134054 NR Description: Oxygen-evolving enhancer protein 1
MTRLTYTLDEIEGPFEVGSDGSVKFKEEDGIDYAAVTVQLPGGERVPFLFTVKQLEASGKPESFSGKFLVPSYRGSSFLDPKGRGGSTGYDNAVALPAGGRGDEEELSKENVKNTAASVGEITLKITKSKPETGEVIGVFESLQPSDTDLGAKVPKDVKIQGVWYGQIE

SEQ ID NO: 3323 - DNA, 1141 bp, Arabidopsis thaliana
  misc_feature (1)..(1141): Ceres Seq. ID no. 12329869
aacaccacaattaacagatttattgtttttggaaataatcaaaacttaaaaactatcagaatgggaacgttcttaggacactttgtgcctggtctctcacttgctcttcttggtctttggcatctcttcaacaccataagatcttactgtcttaaaggccctgaagctttctctgcaaaattctggttccctttccctaaactcaaacatcttgagcttatcttgattctcttcttctccttcctctccatcactctcctcaccctagatttccctaatttcaacttctcctctctcaaaccagacaacctagaacatgcttccatgttcctccacctcattatctttgcgtgtttcgctctcttctgcgagctaaccctttgctcagatctcttctccggtctaatcggagttctttctgcctctgtcttcgctcaagaactcttccttcttcattttcattccactgatcattcaggtcttgaaggtcactaccatttccttctccaactcattgctttcgtctccttctcctcggcgctagcttctgcttcgttccctaaatccttctctgcggctctattcctcccgatatcggttatgtttcaaggatgctggttcttgaacatggggttcatgctttgggtcccagagtatgttcctagaggttgcgtgagtaacatgtcaacatctacagacaataatagaaggagtgtttatcatagtggtgcggtggcttgtgagtcccctggtgctgagattagggcaaaagcattggcgaatctgcagtttagttggatgttgtctgctatacttatcattacatgtgccttgtgccacaagtattccggtaaagttgtgttgcctaagattaggtcatcgttggagtacgagcgtctttgccggcaaggaagtgatcgttctgcaaccgtaacggtggaagcaccggccagttccgatcaacaatagattttccttactttaatttatcatctgaatatgatgtaatatgtacatatagtacactaataagtagccctaataatagttacataatttataagagggggcagagtgtaacgcactaatgatagtggaccctttcgcatgctttgtgaactaataaaaatttgcatatagc

SEQ ID NO: 3324 - protein, 322 aa, Arabidopsis thaliana
  peptide (1)..(322): Ceres Seq. ID no. 12329870
  misc_feature (124)..(290): Pfam Name: DUF716 Pfam Description: Family of unknown function
  misc_feature (21)..(322): NCBI GI NO: 21618061 NR Description: unknown [Arabidopsis thaliana]
  misc_feature (21)..(322): NCBI GI NO: 18402650 NR Description: expressed protein; protein id: At1g49470
  misc_feature (21)..(284): NCBI GI NO: 15222675 NR Description: unknown protein; protein id: At1g55230.1
  misc_feature (21)..(278): NCBI GI NO: 30695897 NR Description: expressed protein [Arabidopsis thaliana]
  misc_feature (21)..(273): NCBI GI NO: 15241195 NR Description: putative protein; protein id: At5g19870.1
  misc_feature (21)..(275): NCBI GI NO: 32470632 NR Description: putative plant viral-response family protein
  misc_feature (20)..(273): NCBI GI NO: 15222573 NR Description: hypothetical protein; protein id: At1g32120.1
  misc_feature (21)..(309): NCBI GI NO: 4416307 NR Description: hypothetical protein [Zea mays]
  misc_feature (103)..(278): NCBI GI NO: 25405807 NR Description: unknown protein, 73214-72236
  misc_feature (21)..(263): NCBI GI NO: 4680504 NR Description: hypothetical protein [Oryza sativa]
NTTINRFIVFGNNQNLKTIRMGTFLGHFVPGLSLALLGLWHLFNTIRSYCLKGPEAFSAKFWFPFPKLKHLELILILFFSFLSITLLTLDFPNFNFSSLKPDNLEHASMFLHLIIFACFALFCELTLCSDLFSGLIGVLSASVFAQELFLLHFHSTDHSGLEGHYHFLLQLIAFVSFSSALASASFPKSFSAALFLPISVMFQGCWFLNMGFMLWVPEYVPRGCVSNMSTSTDNNRRSVYHSGAVACESPGAEIRAKALANLQFSWMLSAILIITCALCHKYSGKVVLPKIRSSLEYERLCRQGSDRSATVTVEAPASSDQQ

SEQ ID NO: 3325 - protein, 302 aa, Arabidopsis thaliana
  peptide (1)..(302): Ceres Seq. ID no. 12329871
  misc_feature (104)..(270): Pfam Name: DUF716 Pfam Description: Family of unknown function
  misc_feature (1)..(302): NCBI GI NO: 21618061 NR Description: unknown [Arabidopsis thaliana]
  misc_feature (1)..(302): NCBI GI NO: 18402650 NR Description: expressed protein; protein id: At1g49470
  misc_feature (1)..(264): NCBI GI NO: 15222675 NR Description: unknown protein; protein id: At1g55230.1
  misc_feature (1)..(258): NCBI GI NO: 30695897 NR Description: expressed protein [Arabidopsis thaliana]
  misc_feature (1)..(253): NCBI GI NO: 15241195 NR Description: putative protein; protein id: At5g19870.1
  misc_feature (1)..(255): NCBI GI NO: 32470632 NR Description: putative plant viral-response family protein
  misc_feature (1)..(253): NCBI GI NO: 15222573 NR Description: hypothetical protein; protein id: At1g32120.1
  misc_feature (1)..(289): NCBI GI NO: 4416307 NR Description: hypothetical protein [Zea mays]
  misc_feature (83)..(258): NCBI GI NO: 25405807 NR Description: unknown protein, 73214-72236
  misc_feature (1)..(243): NCBI GI NO: 4680504 NR Description: hypothetical protein [Oryza sativa]
MGTFLGHFVPGLSLALLGLWHLFNTIRSYCLKGPEAFSAKFWFPFPKLKHLELILILFFSFLSITLLTLDFPNFNFSSLKPDNLEHASMFLHLIIFACFALFCELTLCSDLFSGLIGVLSASVFAQELFLLHFHSTDHSGLEGHYHFLLQLIAFVSFSSALASASFPKSFSAALFLPISVMFQGCWFLNMGFMLWVPEYVPRGCVSNMSTSTDNNRRSVYHSGAVACESPGAEIRAKALANLQFSWMLSAILIITCALCHKYSGKVVLPKIRSSLEYERLCRQGSDRSATVTVEAPASSDQQ

SEQ ID NO: 3326 - protein, 214 aa, Arabidopsis thaliana
  peptide (1)..(214): Ceres Seq. ID no. 12329872
  misc_feature (16)..(182): Pfam Name: DUF716 Pfam Description: Family of unknown function
  misc_feature (1)..(214): NCBI GI NO: 21618061 NR Description: unknown [Arabidopsis thaliana]
  misc_feature (1)..(214): NCBI GI NO: 18402650 NR Description: expressed protein; protein id: At1g49470
  misc_feature (1)..(176): NCBI GI NO: 15222675 NR Description: unknown protein; protein id: At1g55230.1
  misc_feature (1)..(170): NCBI GI NO: 30695897 NR Description: expressed protein [Arabidopsis thaliana]
  misc_feature (1)..(165): NCBI GI NO: 15241195 NR Description: putative protein; protein id: At5g19870.1
  misc_feature (1)..(167): NCBI GI NO: 32470632 NR Description: putative plant viral-response family protein
  misc_feature (1)..(165): NCBI GI NO: 15222573 NR Description: hypothetical protein; protein id: At1g32120.1
  misc_feature (1)..(201): NCBI GI NO: 4416307 NR Description: hypothetical protein [Zea mays]
  misc_feature (1)..(170): NCBI GI NO: 25405807 NR Description: unknown protein, 73214-72236
  misc_feature (1)..(155): NCBI GI NO: 4680504 NR Description: hypothetical protein [Oryza sativa]
MFLHLIIFACFALFCELTLCSDLFSGLIGVLSASVFAQELFLLHFHSTDHSGLEGHYHFLLQLIAFVSFSSALASASFPKSFSAALFLPISVMFQGCWFLNMGFMLWVPEYVPRGCVSNMSTSTDNNRRSVYHSGAVACESPGAEIRAKALANLQFSWMLSAILIITCALCHKYSGKVVLPKIRSSLEYERLCRQGSDRSATVTVEAPASSDQQ

SEQ ID NO: 3327 - DNA, 1290 bp, Arabidopsis thaliana
  misc_feature (1)..(1290): Ceres Seq. ID no. 12343441
agaaaaaaggatatcgacaatttcgcttttgctttcaaaatctcattctatcactttgtgccttttttagccatcgcgaaaaacctctgaatcgcatcccttgattttctgggtttgtgactttgtgtagtggaaattaggcttgttgtttgatttcgctacgagaaaatggacaagtacgagcttgttaaagacatcggtgctgggaattttggagtggcgaggctcatgagagtcaaaaactccaaggaacttgttgctatgaagtacatcgagcgtggccctaagattgatgagaacgtggcgagagagattattaaccacagatcacttcgtcatcccaatataatccggtttaaggaggtggttttgacaccaacgcacatcgccattgctatggaatatgccgctggcggtgagctatttgagcgtatatgtagtgctggaagattcagtgaggatgaggcaagatactttttccagcagcttatctcaggagtcagctattgccatgctatgcaaatatgccacagagatctgaagcttgaaaataccctcttggatggaagtcctgctccacgcctgaaaatctgtgattttggttattccaagtcctcattgttgcactctatgcccaaatcaactgttggaactccagcatatattgcacctgaggttctttctcgcggagagtatgatggcaagatggctgatgtatggtcttgtggtgtgactctttatgtcatgctggtgggagcatacccatttgaagaccaagaggatcccaaaaacttcaaaaaaacaatacaaagaataatggctgtcaagtacaagatcccggactatgtccatatctcacaagattgcaaacatctcctctcccgtatatttgtcaccaactcgaataagaggattactatagctgacatcaagaaacatccatggttcctaaagaacctgccaagggaacttacagaaatagctcaagctgcatacttcaggaaagagaacccgacattctcactccaaagcgtcgaagagataatgaagattgtggaagaggcaaaaactccagctcgtgtttctcggtcgattggagcatttgggtggggaggaggagaagatgccgagggcaaggaggaagatgcagaggaagaagttgaggaagtagaagaagaagaagacgaagaagatgagtatgataagacggtgaagcaagtgcatgctagcatgggagaagtccgagtcagttaaaaaaaaagattggttttcttttcacgaaagtattct

SEQ ID NO: 3328 - protein, 361 aa, Arabidopsis thaliana
  peptide (1)..(361): Ceres Seq. ID no. 12343442
  misc_feature (4)..(260): Pfam Name: Pfam Description:  Protein kinase domain
  misc_feature (1)..(361): NCBI GI NO: 21618062 NR Description: putative serine/threonine-protein kinase
  misc_feature (1)..(361): NCBI GI NO: 15219836 NR Description: putative serine/threonine-protein kinase
  misc_feature (1)..(361): NCBI GI NO: 15220251 NR Description: Ser/Thr kinase; protein id: At1g10940
  misc_feature (1)..(361): NCBI GI NO: 1362026 NR Description: probable serine/threonine-specific protein kinase
  misc_feature (1)..(358): NCBI GI NO: 2129803 NR Description: probable serine/threonine-specific protein kinase
  misc_feature (1)..(361): NCBI GI NO: 19568098 NR Description: osmotic stress-activated protein kinase
  misc_feature (1)..(361): NCBI GI NO: 1362051 NR Description: protein kinase SPK-3 (EC 2.7.1.-) - soybean
  misc_feature (1)..(361): NCBI GI NO: 1161254 NR Description: protein kinase [Glycine max]
  misc_feature (1)..(358): NCBI GI NO: 7434329 NR Description: protein kinase PK1 (EC 2
  misc_feature (1)..(353): NCBI GI NO: 15242858 NR Description: serine/threonine-protein kinase
MDKYELVKDIGAGNFGVARLMRVKNSKELVAMKYIERGPKIDENVAREIINHRSLRHPNIIRFKEVVLTPTHIAIAMEYAAGGELFERICSAGRFSEDEARYFFQQLISGVSYCHAMQICHRDLKLENTLLDGSPAPRLKICDFGYSKSSLLHSMPKSTVGTPAYIAPEVLSRGEYDGKMADVWSCGVTLYVMLVGAYPFEDQEDPKNFKKTIQRIMAVKYKIPDYVHISQDCKHLLSRIFVTNSNKRITIADIKKHPWFLKNLPRELTEIAQAAYFRKENPTFSLQSVEEIMKIVEEAKTPARVSRSIGAFGWGGGEDAEGKEEDAEEEVEEVEEEEDEEDEYDKTVKQVHASMGEVRVS

SEQ ID NO: 3329 - protein, 341 aa, Arabidopsis thaliana
  peptide (1)..(341): Ceres Seq. ID no. 12343443
  misc_feature (1)..(240): Pfam Name: Pfam Description:  Protein kinase domain
  misc_feature (1)..(341): NCBI GI NO: 21618062 NR Description: putative serine/threonine-protein kinase
  misc_feature (1)..(341): NCBI GI NO: 15219836 NR Description: putative serine/threonine-protein kinase
  misc_feature (1)..(341): NCBI GI NO: 15220251 NR Description: Ser/Thr kinase; protein id: At1g10940
  misc_feature (1)..(341): NCBI GI NO: 1362026 NR Description: probable serine/threonine-specific protein kinase
  misc_feature (1)..(338): NCBI GI NO: 2129803 NR Description: probable serine/threonine-specific protein kinase
  misc_feature (1)..(341): NCBI GI NO: 19568098 NR Description: osmotic stress-activated protein kinase
  misc_feature (1)..(341): NCBI GI NO: 1362051 NR Description: protein kinase SPK-3 (EC 2.7.1.-) - soybean
  misc_feature (1)..(341): NCBI GI NO: 1161254 NR Description: protein kinase [Glycine max]
  misc_feature (1)..(338): NCBI GI NO: 7434329 NR Description: protein kinase PK1 (EC 2
  misc_feature (1)..(333): NCBI GI NO: 15242858 NR Description: serine/threonine-protein kinase
MRVKNSKELVAMKYIERGPKIDENVAREIINHRSLRHPNIIRFKEVVLTPTHIAIAMEYAAGGELFERICSAGRFSEDEARYFFQQLISGVSYCHAMQICHRDLKLENTLLDGSPAPRLKICDFGYSKSSLLHSMPKSTVGTPAYIAPEVLSRGEYDGKMADVWSCGVTLYVMLVGAYPFEDQEDPKNFKKTIQRIMAVKYKIPDYVHISQDCKHLLSRIFVTNSNKRITIADIKKHPWFLKNLPRELTEIAQAAYFRKENPTFSLQSVEEIMKIVEEAKTPARVSRSIGAFGWGGGEDAEGKEEDAEEEVEEVEEEEDEEDEYDKTVKQVHASMGEVRVS

SEQ ID NO: 3330 - protein, 330 aa, Arabidopsis thaliana
  peptide (1)..(330): Ceres Seq. ID no. 12343444
  misc_feature (1)..(229): Pfam Name: Pfam Description:  Protein kinase domain
  misc_feature (1)..(330): NCBI GI NO: 21618062 NR Description: putative serine/threonine-protein kinase
  misc_feature (1)..(330): NCBI GI NO: 15219836 NR Description: putative serine/threonine-protein kinase
  misc_feature (1)..(330): NCBI GI NO: 15220251 NR Description: Ser/Thr kinase; protein id: At1g10940
  misc_feature (1)..(330): NCBI GI NO: 1362026 NR Description: probable serine/threonine-specific protein kinase
  misc_feature (1)..(327): NCBI GI NO: 2129803 NR Description: probable serine/threonine-specific protein kinase
  misc_feature (1)..(330): NCBI GI NO: 19568098 NR Description: osmotic stress-activated protein kinase
  misc_feature (1)..(330): NCBI GI NO: 1362051 NR Description: protein kinase SPK-3 (EC 2.7.1.-) - soybean
  misc_feature (1)..(330): NCBI GI NO: 1161254 NR Description: protein kinase [Glycine max]
  misc_feature (1)..(327): NCBI GI NO: 7434329 NR Description: protein kinase PK1 (EC 2
  misc_feature (1)..(322): NCBI GI NO: 15242858 NR Description: serine/threonine-protein kinase
MKYIERGPKIDENVAREIINHRSLRHPNIIRFKEVVLTPTHIAIAMEYAAGGELFERICSAGRFSEDEARYFFQQLISGVSYCHAMQICHRDLKLENTLLDGSPAPRLKICDFGYSKSSLLHSMPKSTVGTPAYIAPEVLSRGEYDGKMADVWSCGVTLYVMLVGAYPFEDQEDPKNFKKTIQRIMAVKYKIPDYVHISQDCKHLLSRIFVTNSNKRITIADIKKHPWFLKNLPRELTEIAQAAYFRKENPTFSLQSVEEIMKIVEEAKTPARVSRSIGAFGWGGGEDAEGKEEDAEEEVEEVEEEEDEEDEYDKTVKQVHASMGEVRVS

SEQ ID NO: 3331 - DNA, 1668 bp, Arabidopsis thaliana
  misc_feature (1)..(1668): Ceres Seq. ID no. 12575935
aaaaccaggcagccactagaagaaggagagatattgagggagaagaatcacattgatagattcgccgccgatctagagccgttgattttcttaatcggaaaaagaaaatgagtggaagcagaaggaaggcgacgccggcgagtaggacgcgagtagggaattacgagatgggacgaactctcggagaaggaagcttcgctaaggtgaaatacgccaagaacaccgtcaccggagatcaagccgctatcaaaatcctcgaccgagaaaaggtcttccgtcacaaaatggtcgaacagcttaaaagagaaatatctacaatgaaactgattaaacatccaaatgtggttgaaatcattgaggttatggcgagcaaaacgaagatctatatcgttcttgagcttgtcaatggaggtgaactctttgataaaatcgcgcaacaagggaggcttaaggaggatgaagctcggagatattttcagcagctcatcaatgctgtggattactgccacagtcgaggtgtctaccacagagatctcaagcctgaaaatctgatccttgacgcaaatggggttttgaaagtctctgattttgggttaagcgccttctcacgacaagttcgggaagatggtttgcttcatacagcttgtggaacgccaaactacgttgcccctgaggttttgtcggacaaaggctatgacggtgcagcagcagatgtctggtcttgtggtgtcattctctttgtgcttatggctggttacttgccttttgatgagccgaatctcatgacattatacaaacgtatatgcaaggctgagtttagctgcccaccatggttctcgcaaggtgccaagagagtcatcaagcgtattctcgaacccaaccctattaccagaataagtattgcagagttgctcgaagatgaatggttcaagaaagggtacaagccgccatcatttgaccaagatgacgaggacataaccatagatgatgttgatgctgcttttagtaactccaaggaatgtcttgtaactgagaagaaggagaaacctgtatccatgaacgctttcgaacttatctctagctcaagcgagttcagtcttgaaaacttgttcgagaagcaagcgcaacttgtgaagaaagaaacgcggtttacttctcaacgatctgcgagtgaaataatgtcgaaaatggaagaaaccgcaaagccattaggctttaatgtccgtaaagacaactacaagataaaaatgaaaggagacaaaagtggtcgtaaaggtcagctctccgtagctacagaggtgtttgaagtggcgccatcattgcatgtggtagagcttaggaaaaccggtggtgataccctcgagtttcacaagttctacaaaaacttctcatctggattaaaggatgtagtctggaatactgatgcagccgctgaagaacaaaagcaataagaaataacaagttgttcaattcaaagtttttaatcaatgttgaacatgtataatgaatagtaaacattctggagttggcaatatacaagtattgctgacaaaagagccaaactagaactagaagtggtctatagaggtagatcaccataggttagtcaatagccacatatgtgatcatcctcaaactcggtttgaaacctataaatcaaagttcaaa

SEQ ID NO: 3332 - protein, 447 aa, Arabidopsis thaliana
  peptide (1)..(447): Ceres Seq. ID no. 12575936
  misc_feature (19)..(274): Pfam Name: Pfam Description:  Protein kinase domain
  misc_feature (1)..(447): NCBI GI NO: 15223317 NR Description: serine threonine kinase, putative
  misc_feature (1)..(447): NCBI GI NO: 14423524 NR Description: similar to wpk4 protein kinase
  misc_feature (1)..(447): NCBI GI NO: 25387057 NR Description: protein T25K16.13
  misc_feature (2)..(447): NCBI GI NO: 34902248 NR Description: Putative serine/threonine kinase
  misc_feature (8)..(444): NCBI GI NO: 18397430 NR Description: serine/threonine kinase, putative
  misc_feature (8)..(444): NCBI GI NO: 25387051 NR Description: probable serine/threonine kinase
  misc_feature (8)..(439): NCBI GI NO: 7446371 NR Description: probable serine/threonine kinase (EC 2
  misc_feature (8)..(439): NCBI GI NO: 7446372 NR Description: probable serine/threonine kinase (EC 2
  misc_feature (16)..(437): NCBI GI NO: 34903780 NR Description: unnamed protein product
  misc_feature (19)..(447): NCBI GI NO: 23428550 NR Description: Serine/threonine Kinase [Persea americana]
MSGSRRKATPASRTRVGNYEMGRTLGEGSFAKVKYAKNTVTGDQAAIKILDREKVFRHKMVEQLKREISTMKLIKHPNVVEIIEVMASKTKIYIVLELVNGGELFDKIAQQGRLKEDEARRYFQQLINAVDYCHSRGVYHRDLKPENLILDANGVLKVSDFGLSAFSRQVREDGLLHTACGTPNYVAPEVLSDKGYDGAAADVWSCGVILFVLMAGYLPFDEPNLMTLYKRICKAEFSCPPWFSQGAKRVIKRILEPNPITRISIAELLEDEWFKKGYKPPSFDQDDEDITIDDVDAAFSNSKECLVTEKKEKPVSMNAFELISSSSEFSLENLFEKQAQLVKKETRFTSQRSASEIMSKMEETAKPLGFNVRKDNYKIKMKGDKSGRKGQLSVATEVFEVAPSLHVVELRKTGGDTLEFHKFYKNFSSGLKDVVWNTDAAAEEQKQ

SEQ ID NO: 3333 - protein, 427 aa, Arabidopsis thaliana
  peptide (1)..(427): Ceres Seq. ID no. 12575937
  misc_feature (1)..(254): Pfam Name: Pfam Description:  Protein kinase domain
  misc_feature (1)..(427): NCBI GI NO: 15223317 NR Description: serine threonine kinase, putative
  misc_feature (1)..(427): NCBI GI NO: 14423524 NR Description: similar to wpk4 protein kinase
  misc_feature (1)..(427): NCBI GI NO: 25387057 NR Description: protein T25K16.13
  misc_feature (1)..(427): NCBI GI NO: 34902248 NR Description: Putative serine/threonine kinase
  misc_feature (1)..(424): NCBI GI NO: 18397430 NR Description: serine/threonine kinase, putative
  misc_feature (1)..(424): NCBI GI NO: 25387051 NR Description: probable serine/threonine kinase
  misc_feature (1)..(419): NCBI GI NO: 7446371 NR Description: probable serine/threonine kinase (EC 2
  misc_feature (1)..(419): NCBI GI NO: 7446372 NR Description: probable serine/threonine kinase (EC 2
  misc_feature (1)..(417): NCBI GI NO: 34903780 NR Description: unnamed protein product
  misc_feature (1)..(427): NCBI GI NO: 23428550 NR Description: Serine/threonine Kinase [Persea americana]
MGRTLGEGSFAKVKYAKNTVTGDQAAIKILDREKVFRHKMVEQLKREISTMKLIKHPNVVEIIEVMASKTKIYIVLELVNGGELFDKIAQQGRLKEDEARRYFQQLINAVDYCHSRGVYHRDLKPENLILDANGVLKVSDFGLSAFSRQVREDGLLHTACGTPNYVAPEVLSDKGYDGAAADVWSCGVILFVLMAGYLPFDEPNLMTLYKRICKAEFSCPPWFSQGAKRVIKRILEPNPITRISIAELLEDEWFKKGYKPPSFDQDDEDITIDDVDAAFSNSKECLVTEKKEKPVSMNAFELISSSSEFSLENLFEKQAQLVKKETRFTSQRSASEIMSKMEETAKPLGFNVRKDNYKIKMKGDKSGRKGQLSVATEVFEVAPSLHVVELRKTGGDTLEFHKFYKNFSSGLKDVVWNTDAAAEEQKQ

SEQ ID NO: 3334 - protein, 388 aa, Arabidopsis thaliana
  peptide (1)..(388): Ceres Seq. ID no. 12575938
  misc_feature (1)..(215): Pfam Name: Pfam Description:  Protein kinase domain
  misc_feature (1)..(388): NCBI GI NO: 15223317 NR Description: serine threonine kinase, putative
  misc_feature (1)..(388): NCBI GI NO: 14423524 NR Description: similar to wpk4 protein kinase
  misc_feature (1)..(388): NCBI GI NO: 25387057 NR Description: protein T25K16.13
  misc_feature (1)..(388): NCBI GI NO: 34902248 NR Description: Putative serine/threonine kinase
  misc_feature (1)..(385): NCBI GI NO: 18397430 NR Description: serine/threonine kinase, putative
  misc_feature (1)..(385): NCBI GI NO: 25387051 NR Description: probable serine/threonine kinase
  misc_feature (1)..(380): NCBI GI NO: 7446371 NR Description: probable serine/threonine kinase (EC 2
  misc_feature (1)..(380): NCBI GI NO: 7446372 NR Description: probable serine/threonine kinase (EC 2
  misc_feature (1)..(378): NCBI GI NO: 34903780 NR Description: unnamed protein product
  misc_feature (1)..(388): NCBI GI NO: 23428550 NR Description: Serine/threonine Kinase [Persea americana]
MVEQLKREISTMKLIKHPNVVEIIEVMASKTKIYIVLELVNGGELFDKIAQQGRLKEDEARRYFQQLINAVDYCHSRGVYHRDLKPENLILDANGVLKVSDFGLSAFSRQVREDGLLHTACGTPNYVAPEVLSDKGYDGAAADVWSCGVILFVLMAGYLPFDEPNLMTLYKRICKAEFSCPPWFSQGAKRVIKRILEPNPITRISIAELLEDEWFKKGYKPPSFDQDDEDITIDDVDAAFSNSKECLVTEKKEKPVSMNAFELISSSSEFSLENLFEKQAQLVKKETRFTSQRSASEIMSKMEETAKPLGFNVRKDNYKIKMKGDKSGRKGQLSVATEVFEVAPSLHVVELRKTGGDTLEFHKFYKNFSSGLKDVVWNTDAAAEEQKQ

SEQ ID NO: 3335 - DNA, 764 bp, Arabidopsis thaliana
  misc_feature (1)..(764): Ceres Seq. ID no. 12579449
accatgcatcatcatcattaggtctaatatcatgcgtccacaatacaaagacgtgaacgataaattagactcgacggccaagcacgaaaccaacagccatggcggtcgttataataatccttacgtccacattactagtcccacatcagcttctgataagaggtcgaaggataaggttcttgaggtgttgaatcgctgtgggaagaaagtagaggacgctactcgcaaagcggaagcattagtcggaggtttaaaagaccacctgaattttagtcctagcataagtgatgcagcaatggctaggctttctcaaggcactaagatgatcgttgaaggaggaccagagagagtgtttcaacgagagtttggtgttttagctgtagagaaacttttagattcgtttgtttgctacatatcgactacttcgggaccagtgaccggagtgatatacatttccaacagaagaatcgctttttgtagcgactatgccattcgtcttccttcttctgccggtggaaacggtgttgcggcatatttacaaggtggtgatggagtgggagaagataagtagcattagttcatcaacgaacgtgttgaagccaagtgagagatacgtgcatatggtgacacgagatgggtttgagttttggttcatgggctttgtctcctacatcgatgctttcaattgtctcaacaaagctctcctcaattcccgttgtgatcatgccatgtaatgtaatcaaattctaactaagaattttctt

SEQ ID NO: 3336 - protein, 189 aa, Arabidopsis thaliana
  peptide (1)..(189): Ceres Seq. ID no. 12579450
  misc_feature (116)..(178): Pfam Name: Pfam Description:  GRAM domain
  misc_feature (11)..(178): NCBI GI NO: 15234255 NR Description: putative ABA-repsonsive protein
  misc_feature (43)..(178): NCBI GI NO: 20271007 NR Description: putative ABA-binding protein
  misc_feature (24)..(164): NCBI GI NO: 29788871 NR Description: putative ABA-responsive protein
  misc_feature (28)..(161): NCBI GI NO: 34902414 NR Description: Putative FH protein interacting protein FIP1
  misc_feature (18)..(161): NCBI GI NO: 18399985 NR Description: Expressed protein; protein id: At2g22475
  misc_feature (38)..(161): NCBI GI NO: 15217869 NR Description: FH protein interacting protein FIP1
  misc_feature (18)..(161): NCBI GI NO: 21592789 NR Description: unknown [Arabidopsis thaliana]
  misc_feature (18)..(161): NCBI GI NO: 26452129 NR Description: unknown protein [Arabidopsis thaliana]
  misc_feature (55)..(178): NCBI GI NO: 34906818 NR Description: contains EST C91668
  misc_feature (43)..(171): NCBI GI NO: 15237287 NR Description: ABA-responsive protein, putative
PCIIIIRSNIMRPQYKDVNDKLDSTAKHETNSHGGRYNNPYVHITSPTSASDKRSKDKVLEVLNRCGKKVEDATRKAEALVGGLKDHLNFSPSISDAAMARLSQGTKMIVEGGPERVFQREFGVLAVEKLLDSFVCYISTTSGPVTGVIYISNRRIAFCSDYAIRLPSSAGGNGVAAYLQGGDGVGEDK

SEQ ID NO: 3337 - protein, 179 aa, Arabidopsis thaliana
  peptide (1)..(179): Ceres Seq. ID no. 12579451
  misc_feature (106)..(168): Pfam Name: Pfam Description:  GRAM domain
  misc_feature (1)..(168): NCBI GI NO: 15234255 NR Description: putative ABA-repsonsive protein
  misc_feature (33)..(168): NCBI GI NO: 20271007 NR Description: putative ABA-binding protein
  misc_feature (14)..(154): NCBI GI NO: 29788871 NR Description: putative ABA-responsive protein
  misc_feature (18)..(151): NCBI GI NO: 34902414 NR Description: Putative FH protein interacting protein FIP1
  misc_feature (8)..(151): NCBI GI NO: 18399985 NR Description: Expressed protein; protein id: At2g22475
  misc_feature (28)..(151): NCBI GI NO: 15217869 NR Description: FH protein interacting protein FIP1
  misc_feature (8)..(151): NCBI GI NO: 21592789 NR Description: unknown [Arabidopsis thaliana]
  misc_feature (8)..(151): NCBI GI NO: 26452129 NR Description: unknown protein [Arabidopsis thaliana]
  misc_feature (45)..(168): NCBI GI NO: 34906818 NR Description: contains EST C91668
  misc_feature (33)..(161): NCBI GI NO: 15237287 NR Description: ABA-responsive protein, putative
MRPQYKDVNDKLDSTAKHETNSHGGRYNNPYVHITSPTSASDKRSKDKVLEVLNRCGKKVEDATRKAEALVGGLKDHLNFSPSISDAAMARLSQGTKMIVEGGPERVFQREFGVLAVEKLLDSFVCYISTTSGPVTGVIYISNRRIAFCSDYAIRLPSSAGGNGVAAYLQGGDGVGEDK

SEQ ID NO: 3338 - DNA, 651 bp, Arabidopsis thaliana
  misc_feature (1)..(651): Ceres Seq. ID no. 12370134
atcacgatcgcaacaatggcggctgctgcgaaggagatcctacggcgaccagtggcggcaacaataaggctaaccgttccggcgggaggagcgaggccagccccaccggtaggtccggcgctaggtcagtacaggcttaacctgatggctttctgcaaagacttcaacgctaggactcaaaagtacaaaccagacactccgatggccgtgacgataacggcgttcaaggacaactctttcgaattcaccgtcaagtctccgacggtgtcgtggtacatcaagaaagcagctggagtcgataaaggaagcacacgcccgggtcatttgtcggtgacgacgctatcggtgagacacgtgtacgagatcgcgaaggtgaagcagacggatccgttttgtcagtatatgccgttggaatcgatttgcaaatccatcattggtactgctaattctatgggtatcaagatcgttcaggatttggagtgattttagggtttctgatgaaagagtggaatcaatttgcttctggtaaacgtctgtgctttgagtagtaaagtataaaccatgaatgaatttcacagattgttctgtgttttggtgttacttccattgtgttgtttgtttcaatggataattgagctccaaaagctttcc

SEQ ID NO: 3339 - protein, 160 aa, Arabidopsis thaliana
  peptide (1)..(160): Ceres Seq. ID no. 12370135
  misc_feature (85)..(155): Pfam Name: Pfam Description:  Ribosomal protein L11, RNA binding domain
  misc_feature (6)..(160): NCBI GI NO: 15237029 NR Description: ribosomal protein L11 homolog
  misc_feature (6)..(159): NCBI GI NO: 37535204 NR Description: putative ribosomal protein L11
  misc_feature (8)..(159): NCBI GI NO: 15823668 NR Description: mitochondrial ribosomal protein L11
  misc_feature (22)..(156): NCBI GI NO: 19115007 NR Description: probable 50S ribosomal protein L11
  misc_feature (14)..(155): NCBI GI NO: 15606945 NR Description: ribosomal protein L11 [Aquifex aeolicus]
  misc_feature (3)..(159): NCBI GI NO: 7705618 NR Description: mitochondrial ribosomal protein L11 isoform a
  misc_feature (14)..(157): NCBI GI NO: 22966134 NR Description: hypothetical protein [Rhodospirillum rubrum]
  misc_feature (13)..(159): NCBI GI NO: 33520004 NR Description: 50S ribosomal subunit protein L11
  misc_feature (14)..(155): NCBI GI NO: 33594733 NR Description: 50S ribosomal protein L11
  misc_feature (3)..(158): NCBI GI NO: 25306275 NR Description: mitochondrial ribosomal protein L11 isoform c
ITIATMAAAAKEILRRPVAATIRLTVPAGGARPAPPVGPALGQYRLNLMAFCKDFNARTQKYKPDTPMAVTITAFKDNSFEFTVKSPTVSWYIKKAAGVDKGSTRPGHLSVTTLSVRHVYEIAKVKQTDPFCQYMPLESICKSIIGTANSMGIKIVQDLE

SEQ ID NO: 3340 - protein, 155 aa, Arabidopsis thaliana
  peptide (1)..(155): Ceres Seq. ID no. 12370136
  misc_feature (80)..(150): Pfam Name: Pfam Description:  Ribosomal protein L11, RNA binding domain
  misc_feature (1)..(155): NCBI GI NO: 15237029 NR Description: ribosomal protein L11 homolog
  misc_feature (1)..(154): NCBI GI NO: 37535204 NR Description: putative ribosomal protein L11
  misc_feature (3)..(154): NCBI GI NO: 15823668 NR Description: mitochondrial ribosomal protein L11
  misc_feature (17)..(151): NCBI GI NO: 19115007 NR Description: probable 50S ribosomal protein L11
  misc_feature (9)..(150): NCBI GI NO: 15606945 NR Description: ribosomal protein L11 [Aquifex aeolicus]
  misc_feature (1)..(154): NCBI GI NO: 7705618 NR Description: mitochondrial ribosomal protein L11 isoform a
  misc_feature (9)..(152): NCBI GI NO: 22966134 NR Description: hypothetical protein [Rhodospirillum rubrum]
  misc_feature (8)..(154): NCBI GI NO: 33520004 NR Description: 50S ribosomal subunit protein L11
  misc_feature (9)..(150): NCBI GI NO: 33594733 NR Description: 50S ribosomal protein L11
  misc_feature (1)..(153): NCBI GI NO: 25306275 NR Description: mitochondrial ribosomal protein L11 isoform c
MAAAAKEILRRPVAATIRLTVPAGGARPAPPVGPALGQYRLNLMAFCKDFNARTQKYKPDTPMAVTITAFKDNSFEFTVKSPTVSWYIKKAAGVDKGSTRPGHLSVTTLSVRHVYEIAKVKQTDPFCQYMPLESICKSIIGTANSMGIKIVQDLE

SEQ ID NO: 3341 - protein, 112 aa, Arabidopsis thaliana
  peptide (1)..(112): Ceres Seq. ID no. 12370137
  misc_feature (37)..(107): Pfam Name: Pfam Description:  Ribosomal protein L11, RNA binding domain
  misc_feature (1)..(112): NCBI GI NO: 15237029 NR Description: ribosomal protein L11 homolog
  misc_feature (1)..(111): NCBI GI NO: 37535204 NR Description: putative ribosomal protein L11
  misc_feature (1)..(111): NCBI GI NO: 15823668 NR Description: mitochondrial ribosomal protein L11
  misc_feature (1)..(108): NCBI GI NO: 19115007 NR Description: probable 50S ribosomal protein L11
  misc_feature (1)..(107): NCBI GI NO: 15606945 NR Description: ribosomal protein L11 [Aquifex aeolicus]
  misc_feature (1)..(111): NCBI GI NO: 7705618 NR Description: mitochondrial ribosomal protein L11 isoform a
  misc_feature (1)..(109): NCBI GI NO: 22966134 NR Description: hypothetical protein [Rhodospirillum rubrum]
  misc_feature (1)..(111): NCBI GI NO: 33520004 NR Description: 50S ribosomal subunit protein L11
  misc_feature (1)..(107): NCBI GI NO: 33594733 NR Description: 50S ribosomal protein L11
  misc_feature (1)..(110): NCBI GI NO: 25306275 NR Description: mitochondrial ribosomal protein L11 isoform c
MAFCKDFNARTQKYKPDTPMAVTITAFKDNSFEFTVKSPTVSWYIKKAAGVDKGSTRPGHLSVTTLSVRHVYEIAKVKQTDPFCQYMPLESICKSIIGTANSMGIKIVQDLE

SEQ ID NO: 3342 - DNA, 901 bp, Arabidopsis thaliana
  misc_feature (1)..(901): Ceres Seq. ID no. 13487970
aacatatccattttgggaaaccataaattcccaaatgtcattcgccgaggaatttgaagctaatcttgtttcgctggcccatgttttgcagaagaaatatgctctcctgcgcgatttggataaaagtttgcaagaaaaccaacgacaaaatgaacaacgctgtgaaaaagaaatagaggatataagaaggggcagagctggaaatatcacacctaatacctctcttacaaagttctcagaggaagcacttgatgaacagaaacacagtgtccggattgctgacgagaaagtcacactggctatgcaggcatatgatctggtggatatgcatgttcagcaacttgaccagtatatgaaaaaatccggcgaagtgatccgcaaagagaaagaagctgccgctgcgacattagaactggagaacaacgggaaagccgggaatgctggtgaaggtggaagaggagggcgaaaaaagacaaggctagcaacagcagcgtcaacagcagcagcatcaactgggatgacttcaagtaatatggatctggatctgcctgtggatccaaacgaaccaacttactgcatctgcaaccaagttagctttggcgagatggttgcgtgtgacaacaatgcgtgcaagattgagtggttccatttcggttgcgtcggtctgaaagaacaacccaaggggaaatggtactgcccggagtgtgctacagtaaagaagagcaggaaaggtcgatgatttgaatgttcatgtctgctaataatccaaacagcttcatcatatctactgtaatccaaacagtttagtatatcaactcatgtaagatgttaccatgttgactataaattgtagaagtcttgtttcgttctttgtttgacaaaattaataactgagtttggg

SEQ ID NO: 3343 - protein, 245 aa, Arabidopsis thaliana
  peptide (1)..(245): Ceres Seq. ID no. 13487971
  misc_feature (191)..(238): Pfam Name: Pfam Description:  PHD-finger
  misc_feature (12)..(245): NCBI GI NO: 18404002 NR Description: PHD-finger protein -related [Arabidopsis thaliana]
  misc_feature (86)..(245): NCBI GI NO: 28393138 NR Description: putative PHD-finger protein [Arabidopsis thaliana]
  misc_feature (121)..(245): NCBI GI NO: 29367421 NR Description: putative PHD-finger protein
  misc_feature (12)..(132): NCBI GI NO: 29367421 NR Description: putative PHD-finger protein
  misc_feature (12)..(120): NCBI GI NO: 28278108 NR Description: Similar to inhibitor of growth family, member 3
  misc_feature (174)..(245): NCBI GI NO: 28278108 NR Description: Similar to inhibitor of growth family, member 3
  misc_feature (12)..(120): NCBI GI NO: 37682153 NR Description: inhibitor of growth family, member 3 [Danio rerio]
  misc_feature (174)..(245): NCBI GI NO: 37682153 NR Description: inhibitor of growth family, member 3 [Danio rerio]
  misc_feature (8)..(120): NCBI GI NO: 34855011 NR Description: similar to inhibitor of growth family, member 3
  misc_feature (174)..(245): NCBI GI NO: 34855011 NR Description: similar to inhibitor of growth family, member 3
TYPFWETINSQMSFAEEFEANLVSLAHVLQKKYALLRDLDKSLQENQRQNEQRCEKEIEDIRRGRAGNITPNTSLTKFSEEALDEQKHSVRIADEKVTLAMQAYDLVDMHVQQLDQYMKKSGEVIRKEKEAAAATLELENNGKAGNAGEGGRGGRKKTRLATAASTAAASTGMTSSNMDLDLPVDPNEPTYCICNQVSFGEMVACDNNACKIEWFHFGCVGLKEQPKGKWYCPECATVKKSRKGR

SEQ ID NO: 3344 - protein, 234 aa, Arabidopsis thaliana
  peptide (1)..(234): Ceres Seq. ID no. 13487972
  misc_feature (180)..(227): Pfam Name: Pfam Description:  PHD-finger
  misc_feature (1)..(234): NCBI GI NO: 18404002 NR Description: PHD-finger protein -related [Arabidopsis thaliana]
  misc_feature (75)..(234): NCBI GI NO: 28393138 NR Description: putative PHD-finger protein [Arabidopsis thaliana]
  misc_feature (110)..(234): NCBI GI NO: 29367421 NR Description: putative PHD-finger protein
  misc_feature (1)..(121): NCBI GI NO: 29367421 NR Description: putative PHD-finger protein
  misc_feature (1)..(109): NCBI GI NO: 28278108 NR Description: Similar to inhibitor of growth family, member 3
  misc_feature (163)..(234): NCBI GI NO: 28278108 NR Description: Similar to inhibitor of growth family, member 3
  misc_feature (1)..(109): NCBI GI NO: 37682153 NR Description: inhibitor of growth family, member 3 [Danio rerio]
  misc_feature (163)..(234): NCBI GI NO: 37682153 NR Description: inhibitor of growth family, member 3 [Danio rerio]
  misc_feature (1)..(109): NCBI GI NO: 34855011 NR Description: similar to inhibitor of growth family, member 3
  misc_feature (163)..(234): NCBI GI NO: 34855011 NR Description: similar to inhibitor of growth family, member 3
MSFAEEFEANLVSLAHVLQKKYALLRDLDKSLQENQRQNEQRCEKEIEDIRRGRAGNITPNTSLTKFSEEALDEQKHSVRIADEKVTLAMQAYDLVDMHVQQLDQYMKKSGEVIRKEKEAAAATLELENNGKAGNAGEGGRGGRKKTRLATAASTAAASTGMTSSNMDLDLPVDPNEPTYCICNQVSFGEMVACDNNACKIEWFHFGCVGLKEQPKGKWYCPECATVKKSRKGR

SEQ ID NO: 3345 - protein, 145 aa, Arabidopsis thaliana
  peptide (1)..(145): Ceres Seq. ID no. 13487973
  misc_feature (91)..(138): Pfam Name: Pfam Description:  PHD-finger
  misc_feature (1)..(145): NCBI GI NO: 18404002 NR Description: PHD-finger protein -related [Arabidopsis thaliana]
  misc_feature (1)..(145): NCBI GI NO: 28393138 NR Description: putative PHD-finger protein [Arabidopsis thaliana]
  misc_feature (21)..(145): NCBI GI NO: 29367421 NR Description: putative PHD-finger protein
  misc_feature (1)..(32): NCBI GI NO: 29367421 NR Description: putative PHD-finger protein
  misc_feature (1)..(20): NCBI GI NO: 28278108 NR Description: Similar to inhibitor of growth family, member 3
  misc_feature (74)..(145): NCBI GI NO: 28278108 NR Description: Similar to inhibitor of growth family, member 3
  misc_feature (1)..(20): NCBI GI NO: 37682153 NR Description: inhibitor of growth family, member 3 [Danio rerio]
  misc_feature (74)..(145): NCBI GI NO: 37682153 NR Description: inhibitor of growth family, member 3 [Danio rerio]
  misc_feature (1)..(20): NCBI GI NO: 34855011 NR Description: similar to inhibitor of growth family, member 3
  misc_feature (74)..(145): NCBI GI NO: 34855011 NR Description: similar to inhibitor of growth family, member 3
MQAYDLVDMHVQQLDQYMKKSGEVIRKEKEAAAATLELENNGKAGNAGEGGRGGRKKTRLATAASTAAASTGMTSSNMDLDLPVDPNEPTYCICNQVSFGEMVACDNNACKIEWFHFGCVGLKEQPKGKWYCPECATVKKSRKGR

SEQ ID NO: 3346 - DNA, 1617 bp, Arabidopsis thaliana
  misc_feature (1)..(1617): Ceres Seq. ID no. 13489016
gggtgcttattaaaacaaaataacatacaaatggatagcatttggattctatcacttctcttcttcatcatctttcttcttctggccgccttcaaacgcaaaaatcatgggaaacatcgacgaataccatctcctcctggttttccaatcatcggaaacttacatcagctcggagaattacaacatcagtctctatggaagctctcaaagaagtatggccctgtgatgcttttgaagcttggaaaagtccccacactcatactttcttcatcagaaacagcaaaacaagctctaagagactatgatctccattgttgtagccgtccttccttagcaggaggaagagagctctcttacaacaatctagatatgtcttcatctccttataatgaatattggaaggaactaaggaagctctgcagtcaagaactctttagtgctaataaaattcaatcgattcaacctattaaggacgaggaggtcaagaaagttatcgattcaatcgcggaatcatcttctctaaagaatccggttaacttgagcaagacgtttcttgctttaactacaagtgtagtatgcaaggcagcatttggtgtgagttttgagggaagtgtgctcaacagtgatagattcaataagttagtccgagatactttcgagatgttgggaagcttctctgcctcagattttattccgtatgtcggatggatcatcgataagttcaatggtttacaagggtggagaaagaaaagctttcgagatcttgatgcgttctatgaacaaatttttgatctgcataaggaagagaaggaagtaggaagtgaagatttagtggatgtgctcttgaggttggagaaagaagaaattgttgttggaaatggcaagctcacaagaaatcatatcaaagcaattttgatgaacattcttttaggaggaatcgatacttctgcaataacaatgacatgggcaatggcagaacttgctaaaaaccctagagtgatgaagaaagttcaagcagaaatcagaaaccaaatcaagaacaaagaaagaatcagctttgatgacactgataagctcgagtacttgaaaatggtgatcaaagaaacatggaggttacatcctccaacacctcttctcctcccaagagatgtaatcactgaatttgagatcaatggctacacgattcctgccaaaacacggcttcatgtgaatgtttgggctatcgggcgtgatcctgatacatggaaagatccagaaatgtttctccccgaaaggtttaatgatagtaacattgatgcaaaaggacagaactttgagttgttgtcgtttgggagtggtaggagaatttgtcctggactgtacatgggaacaacaatggtggagtttggcctagctaatatgttgtatcattttgattggaagttaccagaaggcatggtagtcgaagatatcgatatggaagaagctcctggacttactgtgagcaaaaaaagtgagcttgtacttgttccagtgaagtatttagaccattgattcacgtgaattagttcttcatcgattgtactatgaatgagaacgaaatgataatgataattttcaatgtaatattttttttct

SEQ ID NO: 3347 - protein, 510 aa, Arabidopsis thaliana
  peptide (1)..(510): Ceres Seq. ID no. 13489017
  misc_feature (11)..(510): NCBI GI NO: 15231537 NR Description: cytochrome p450 71B26 [Arabidopsis thaliana]
  misc_feature (11)..(509): NCBI GI NO: 15231538 NR Description: cytochrome P450 family [Arabidopsis thaliana]
  misc_feature (11)..(504): NCBI GI NO: 15231539 NR Description: cytochrome P450 family [Arabidopsis thaliana]
  misc_feature (11)..(509): NCBI GI NO: 15231542 NR Description: cytochrome p450 family [Arabidopsis thaliana]
  misc_feature (11)..(510): NCBI GI NO: 15231541 NR Description: cytochrome P450 71B36 [Arabidopsis thaliana]
  misc_feature (11)..(509): NCBI GI NO: 9294291 NR Description: cytochrome p450 [Arabidopsis thaliana]
  misc_feature (11)..(510): NCBI GI NO: 15227003 NR Description: cytochrome P450 family [Arabidopsis thaliana]
  misc_feature (11)..(510): NCBI GI NO: 18175891 NR Description: putative cytochrome P450 protein
  misc_feature (11)..(510): NCBI GI NO: 7430672 NR Description: probable cytochrome P450 At2g02580
  misc_feature (11)..(251): NCBI GI NO: 9294287 NR Description: cytochrome P450 [Arabidopsis thaliana]
GCLLKQNNIQMDSIWILSLLFFIIFLLLAAFKRKNHGKHRRIPSPPGFPIIGNLHQLGELQHQSLWKLSKKYGPVMLLKLGKVPTLILSSSETAKQALRDYDLHCCSRPSLAGGRELSYNNLDMSSSPYNEYWKELRKLCSQELFSANKIQSIQPIKDEEVKKVIDSIAESSSLKNPVNLSKTFLALTTSVVCKAAFGVSFEGSVLNSDRFNKLVRDTFEMLGSFSASDFIPYVGWIIDKFNGLQGWRKKSFRDLDAFYEQIFDLHKEEKEVGSEDLVDVLLRLEKEEIVVGNGKLTRNHIKAILMNILLGGIDTSAITMTWAMAELAKNPRVMKKVQAEIRNQIKNKERISFDDTDKLEYLKMVIKETWRLHPPTPLLLPRDVITEFEINGYTIPAKTRLHVNVWAIGRDPDTWKDPEMFLPERFNDSNIDAKGQNFELLSFGSGRRICPGLYMGTTMVEFGLANMLYHFDWKLPEGMVVEDIDMEEAPGLTVSKKSELVLVPVKYLDH

SEQ ID NO: 3348 - protein, 500 aa, Arabidopsis thaliana
  peptide (1)..(500): Ceres Seq. ID no. 13489018
  misc_feature (1)..(500): NCBI GI NO: 15231537 NR Description: cytochrome p450 71B26 [Arabidopsis thaliana]
  misc_feature (1)..(499): NCBI GI NO: 15231538 NR Description: cytochrome P450 family [Arabidopsis thaliana]
  misc_feature (1)..(494): NCBI GI NO: 15231539 NR Description: cytochrome P450 family [Arabidopsis thaliana]
  misc_feature (1)..(499): NCBI GI NO: 15231542 NR Description: cytochrome p450 family [Arabidopsis thaliana]
  misc_feature (1)..(500): NCBI GI NO: 15231541 NR Description: cytochrome P450 71B36 [Arabidopsis thaliana]
  misc_feature (1)..(499): NCBI GI NO: 9294291 NR Description: cytochrome p450 [Arabidopsis thaliana]
  misc_feature (1)..(500): NCBI GI NO: 15227003 NR Description: cytochrome P450 family [Arabidopsis thaliana]
  misc_feature (1)..(500): NCBI GI NO: 18175891 NR Description: putative cytochrome P450 protein
  misc_feature (1)..(500): NCBI GI NO: 7430672 NR Description: probable cytochrome P450 At2g02580
  misc_feature (1)..(241): NCBI GI NO: 9294287 NR Description: cytochrome P450 [Arabidopsis thaliana]
MDSIWILSLLFFIIFLLLAAFKRKNHGKHRRIPSPPGFPIIGNLHQLGELQHQSLWKLSKKYGPVMLLKLGKVPTLILSSSETAKQALRDYDLHCCSRPSLAGGRELSYNNLDMSSSPYNEYWKELRKLCSQELFSANKIQSIQPIKDEEVKKVIDSIAESSSLKNPVNLSKTFLALTTSVVCKAAFGVSFEGSVLNSDRFNKLVRDTFEMLGSFSASDFIPYVGWIIDKFNGLQGWRKKSFRDLDAFYEQIFDLHKEEKEVGSEDLVDVLLRLEKEEIVVGNGKLTRNHIKAILMNILLGGIDTSAITMTWAMAELAKNPRVMKKVQAEIRNQIKNKERISFDDTDKLEYLKMVIKETWRLHPPTPLLLPRDVITEFEINGYTIPAKTRLHVNVWAIGRDPDTWKDPEMFLPERFNDSNIDAKGQNFELLSFGSGRRICPGLYMGTTMVEFGLANMLYHFDWKLPEGMVVEDIDMEEAPGLTVSKKSELVLVPVKYLDH

SEQ ID NO: 3349 - protein, 435 aa, Arabidopsis thaliana
  peptide (1)..(435): Ceres Seq. ID no. 13489019
  misc_feature (1)..(435): NCBI GI NO: 15231537 NR Description: cytochrome p450 71B26 [Arabidopsis thaliana]
  misc_feature (1)..(434): NCBI GI NO: 15231538 NR Description: cytochrome P450 family [Arabidopsis thaliana]
  misc_feature (1)..(429): NCBI GI NO: 15231539 NR Description: cytochrome P450 family [Arabidopsis thaliana]
  misc_feature (1)..(434): NCBI GI NO: 15231542 NR Description: cytochrome p450 family [Arabidopsis thaliana]
  misc_feature (1)..(435): NCBI GI NO: 15231541 NR Description: cytochrome P450 71B36 [Arabidopsis thaliana]
  misc_feature (1)..(434): NCBI GI NO: 9294291 NR Description: cytochrome p450 [Arabidopsis thaliana]
  misc_feature (1)..(435): NCBI GI NO: 15227003 NR Description: cytochrome P450 family [Arabidopsis thaliana]
  misc_feature (1)..(435): NCBI GI NO: 18175891 NR Description: putative cytochrome P450 protein
  misc_feature (1)..(435): NCBI GI NO: 7430672 NR Description: probable cytochrome P450 At2g02580
  misc_feature (1)..(176): NCBI GI NO: 9294287 NR Description: cytochrome P450 [Arabidopsis thaliana]
MLLKLGKVPTLILSSSETAKQALRDYDLHCCSRPSLAGGRELSYNNLDMSSSPYNEYWKELRKLCSQELFSANKIQSIQPIKDEEVKKVIDSIAESSSLKNPVNLSKTFLALTTSVVCKAAFGVSFEGSVLNSDRFNKLVRDTFEMLGSFSASDFIPYVGWIIDKFNGLQGWRKKSFRDLDAFYEQIFDLHKEEKEVGSEDLVDVLLRLEKEEIVVGNGKLTRNHIKAILMNILLGGIDTSAITMTWAMAELAKNPRVMKKVQAEIRNQIKNKERISFDDTDKLEYLKMVIKETWRLHPPTPLLLPRDVITEFEINGYTIPAKTRLHVNVWAIGRDPDTWKDPEMFLPERFNDSNIDAKGQNFELLSFGSGRRICPGLYMGTTMVEFGLANMLYHFDWKLPEGMVVEDIDMEEAPGLTVSKKSELVLVPVKYLDH

SEQ ID NO: 3350 - DNA, 1567 bp, Arabidopsis thaliana; identical to SEQ ID NO: 2526
  misc_feature (1)..(1567): Ceres Seq. ID no. 12389081

SEQ ID NO: 3351 - protein, 395 aa, Arabidopsis thaliana; identical to SEQ ID NO: 2527
  peptide (1)..(395): Ceres Seq. ID no. 12389082
  misc_feature (1)..(395): NCBI GI NO: 21593675 NR Description: stearoyl-acyl carrier protein desaturase
  misc_feature (1)..(395): NCBI GI NO: 15237308 NR Description: stearoyl-acyl carrier protein desaturase
  misc_feature (1)..(395): NCBI GI NO: 15232943 NR Description: putative stearoyl-acyl carrier protein desaturase
  misc_feature (1)..(395): NCBI GI NO: 20466636 NR Description: putative stearoyl-acyl carrier protein desaturase
  misc_feature (1)..(395): NCBI GI NO: 21592896 NR Description: putative stearoyl-acyl carrier protein desaturase
  misc_feature (22)..(393): NCBI GI NO: 3355632 NR Description: stearoyl-acyl carrier protein desaturase
  misc_feature (36)..(394): NCBI GI NO: 575942 NR Description: stearoyl-acyl carrier protein desaturase
  misc_feature (22)..(393): NCBI GI NO: 3355634 NR Description: stearoyl-acyl carrier protein desaturase
  misc_feature (36)..(394): NCBI GI NO: 134945 NR Description: Acyl-
  misc_feature (36)..(394): NCBI GI NO: 417820 NR Description: Acyl-

SEQ ID NO: 3352 - protein, 393 aa, Arabidopsis thaliana; identical to SEQ ID NO: 2528
  peptide (1)..(393): Ceres Seq. ID no. 12389083
  misc_feature (1)..(393): NCBI GI NO: 21593675 NR Description: stearoyl-acyl carrier protein desaturase
  misc_feature (1)..(393): NCBI GI NO: 15237308 NR Description: stearoyl-acyl carrier protein desaturase
  misc_feature (1)..(393): NCBI GI NO: 15232943 NR Description: putative stearoyl-acyl carrier protein desaturase
  misc_feature (1)..(393): NCBI GI NO: 20466636 NR Description: putative stearoyl-acyl carrier protein desaturase
  misc_feature (1)..(393): NCBI GI NO: 21592896 NR Description: putative stearoyl-acyl carrier protein desaturase
  misc_feature (20)..(391): NCBI GI NO: 3355632 NR Description: stearoyl-acyl carrier protein desaturase
  misc_feature (34)..(392): NCBI GI NO: 575942 NR Description: stearoyl-acyl carrier protein desaturase
  misc_feature (20)..(391): NCBI GI NO: 3355634 NR Description: stearoyl-acyl carrier protein desaturase
  misc_feature (34)..(392): NCBI GI NO: 134945 NR Description: Acyl-
  misc_feature (34)..(392): NCBI GI NO: 417820 NR Description: Acyl-

SEQ ID NO: 3353 - protein, 391 aa, Arabidopsis thaliana; identical to SEQ ID NO: 2529
  peptide (1)..(391): Ceres Seq. ID no. 12389084
  misc_feature (1)..(391): NCBI GI NO: 21593675 NR Description: stearoyl-acyl carrier protein desaturase
  misc_feature (1)..(391): NCBI GI NO: 15237308 NR Description: stearoyl-acyl carrier protein desaturase
  misc_feature (1)..(391): NCBI GI NO: 15232943 NR Description: putative stearoyl-acyl carrier protein desaturase
  misc_feature (1)..(391): NCBI GI NO: 20466636 NR Description: putative stearoyl-acyl carrier protein desaturase
  misc_feature (1)..(391): NCBI GI NO: 21592896 NR Description: putative stearoyl-acyl carrier protein desaturase
  misc_feature (18)..(389): NCBI GI NO: 3355632 NR Description: stearoyl-acyl carrier protein desaturase
  misc_feature (32)..(390): NCBI GI NO: 575942 NR Description: stearoyl-acyl carrier protein desaturase
  misc_feature (18)..(389): NCBI GI NO: 3355634 NR Description: stearoyl-acyl carrier protein desaturase
  misc_feature (32)..(390): NCBI GI NO: 134945 NR Description: Acyl-
  misc_feature (32)..(390): NCBI GI NO: 417820 NR Description: Acyl-

SEQ ID NO: 3354 - DNA, 1780 bp, Arabidopsis thaliana
  misc_feature (1)..(1780): Ceres Seq. ID no. 13489509
aagtcgcaacgctccaacgacttcaattcaatttactttcgattttgtcctcttccaaaaacccttccgcttaaaccctaattcacttcgccggccatgtcgacactcgaggatggatttccggcggataagctcttcgctcaaggatactcttacacctacgacgacgtcatctttcttcctcacttcatcgatttctccacagacgctgtttctctatccacgcgccttagccggcgcgtgcctctctccataccttgcgtttcgtctccgatggatactgtttcggaatctcacatggctgctgctatggcttctcttggtgggattggaatcgtccactataactgtggcatcgccgctcaagcatcgattattcgccaagctaagtcgcttaaacatccgattgcttccgacgccggtgtgaagttcccggagtatgagattacttctttagatgcttttggtccttcttccttcgtttttgtcgagcaaacaggaacaatgacgactcctaaattgttaggctatgtaacgaaatcgcagtggaagagaatgaattacgaacaaagggagatgaagatatacgattacatgaagagctgtgatagcagtgactattgtgtaccatgggaaattgattttgaaaagttggagtttgttttagaagataagcaaaagggctttgtggttcttgagagggatggtgagactgtgaacgtggtgacgaaagatgatatacagagggttaaaggatatcccaagtctggaccagggactgtgggcccagacggtgagtggatggttggtgcagcgataggtacgagggagtctgataaggagaggcttgagcatttggttaatgttggggtcaatgctgtagtgttggatagttcgcaagggaactctatttaccagcttgagatgatcaagtatgtgaaaaagacttaccctgaattggatgtgattggtggcaatgttgtgacaatgtaccaggcacagaatttgatccaagcaggagttgatgggttgagagttggtatgggatctggttcgatatgtaccacacaagaggtttgtgcagttggtcgtggacaggctactgctgtgtacaaggtttgttcgatcgctgctcagagcgggattccagttatagcggatggtggtatctcaaattcagggcacattgtaaaggctctcgtccttggagcatcaactgttatgatgggtagctttttagctggaagtactgaggctcccgggggttacgagtatacgaacggtaagaggatcaagaagtaccgtggaatgggatcgctagaagcaatgactaaaggaagtgaccaaagatacttaggagatcaaacaaaactcaagattgctcaaggagtggttggagcagtcgcggataaaggctcagtgttgaagctgataccttacacaatgcacgccgtgaaacaaggtttccaagaccttggtgcttcttccttgcaatctgctcatggtctgttgagatcaaacatccttaggcttgaggctcgaactggtgctgcacaggtcgaaggaggagttcacgggctggtttcttatgaaaagaaatcgttttaagctttggcctaaaattgagtgctaagagtgtttcttatatcatgttccatgttatttttatagatattacttttcaatctagtaactttagtctttttatttattgacatgatttacattgtctcctaaaatcaattttcctctaatattgtcttatatctactaagttact

SEQ ID NO: 3355 - protein, 503 aa, Arabidopsis thaliana
  peptide (1)..(503): Ceres Seq. ID no. 13489510
  misc_feature (18)..(100): Pfam Name: Pfam Description:  IMP dehydrogenase / GMP reductase domain
  misc_feature (1)..(503): NCBI GI NO: 15219385 NR Description: inosine-5'-monophosphate dehydrogenase
  misc_feature (1)..(503): NCBI GI NO: 21618070 NR Description: inosine-5'-monophosphate dehydrogenase, putative
  misc_feature (1)..(503): NCBI GI NO: 15219217 NR Description: inosine-5'-monophosphate dehydrogenase, putative
  misc_feature (1)..(503): NCBI GI NO: 28413147 NR Description: inosine monophosphate dehydrogenase
  misc_feature (1)..(503): NCBI GI NO: 4468193 NR Description: inosine monophosphate dehydrogenase [Glycine max]
  misc_feature (154)..(503): NCBI GI NO: 26451248 NR Description: putative inosine-5'-monophosphate dehydrogenase
  misc_feature (5)..(503): NCBI GI NO: 34897074 NR Description: putative inosine monophosphate dehydrogenase
  misc_feature (26)..(503): NCBI GI NO: 38096048 NR Description: inosine-5'-phosphate dehydrogenase
  misc_feature (121)..(503): NCBI GI NO: 16417597 NR Description: inosine-5'-monophosphate dehydrogenase-like
  misc_feature (5)..(503): NCBI GI NO: 28422466 NR Description: Unknown (protein for MGC:52763) [Xenopus laevis]
MSTLEDGFPADKLFAQGYSYTYDDVIFLPHFIDFSTDAVSLSTRLSRRVPLSIPCVSSPMDTVSESHMAAAMASLGGIGIVHYNCGIAAQASIIRQAKSLKHPIASDAGVKFPEYEITSLDAFGPSSFVFVEQTGTMTTPKLLGYVTKSQWKRMNYEQREMKIYDYMKSCDSSDYCVPWEIDFEKLEFVLEDKQKGFVVLERDGETVNVVTKDDIQRVKGYPKSGPGTVGPDGEWMVGAAIGTRESDKERLEHLVNVGVNAVVLDSSQGNSIYQLEMIKYVKKTYPELDVIGGNVVTMYQAQNLIQAGVDGLRVGMGSGSICTTQEVCAVGRGQATAVYKVCSIAAQSGIPVIADGGISNSGHIVKALVLGASTVMMGSFLAGSTEAPGGYEYTNGKRIKKYRGMGSLEAMTKGSDQRYLGDQTKLKIAQGVVGAVADKGSVLKLIPYTMHAVKQGFQDLGASSLQSAHGLLRSNILRLEARTGAAQVEGGVHGLVSYEKKSF

SEQ ID NO: 3356 - protein, 444 aa, Arabidopsis thaliana
  peptide (1)..(444): Ceres Seq. ID no. 13489511
  misc_feature (162)..(434): Pfam Name: Pfam Description:  IMP dehydrogenase / GMP reductase domain
  misc_feature (1)..(444): NCBI GI NO: 15219385 NR Description: inosine-5'-monophosphate dehydrogenase
  misc_feature (1)..(444): NCBI GI NO: 21618070 NR Description: inosine-5'-monophosphate dehydrogenase, putative
  misc_feature (1)..(444): NCBI GI NO: 15219217 NR Description: inosine-5'-monophosphate dehydrogenase, putative
  misc_feature (1)..(444): NCBI GI NO: 28413147 NR Description: inosine monophosphate dehydrogenase
  misc_feature (1)..(444): NCBI GI NO: 4468193 NR Description: inosine monophosphate dehydrogenase [Glycine max]
  misc_feature (95)..(444): NCBI GI NO: 26451248 NR Description: putative inosine-5'-monophosphate dehydrogenase
  misc_feature (1)..(444): NCBI GI NO: 34897074 NR Description: putative inosine monophosphate dehydrogenase
  misc_feature (1)..(444): NCBI GI NO: 38096048 NR Description: inosine-5'-phosphate dehydrogenase
  misc_feature (62)..(444): NCBI GI NO: 16417597 NR Description: inosine-5'-monophosphate dehydrogenase-like
  misc_feature (1)..(444): NCBI GI NO: 28422466 NR Description: Unknown (protein for MGC:52763) [Xenopus laevis]
MDTVSESHMAAAMASLGGIGIVHYNCGIAAQASIIRQAKSLKHPIASDAGVKFPEYEITSLDAFGPSSFVFVEQTGTMTTPKLLGYVTKSQWKRMNYEQREMKIYDYMKSCDSSDYCVPWEIDFEKLEFVLEDKQKGFVVLERDGETVNVVTKDDIQRVKGYPKSGPGTVGPDGEWMVGAAIGTRESDKERLEHLVNVGVNAVVLDSSQGNSIYQLEMIKYVKKTYPELDVIGGNVVTMYQAQNLIQAGVDGLRVGMGSGSICTTQEVCAVGRGQATAVYKVCSIAAQSGIPVIADGGISNSGHIVKALVLGASTVMMGSFLAGSTEAPGGYEYTNGKRIKKYRGMGSLEAMTKGSDQRYLGDQTKLKIAQGVVGAVADKGSVLKLIPYTMHAVKQGFQDLGASSLQSAHGLLRSNILRLEARTGAAQVEGGVHGLVSYEKKSF

SEQ ID NO: 3357 - protein, 436 aa, Arabidopsis thaliana
  peptide (1)..(436): Ceres Seq. ID no. 13489512
  misc_feature (154)..(426): Pfam Name: Pfam Description:  IMP dehydrogenase / GMP reductase domain
  misc_feature (1)..(436): NCBI GI NO: 15219385 NR Description: inosine-5'-monophosphate dehydrogenase
  misc_feature (1)..(436): NCBI GI NO: 21618070 NR Description: inosine-5'-monophosphate dehydrogenase, putative
  misc_feature (1)..(436): NCBI GI NO: 15219217 NR Description: inosine-5'-monophosphate dehydrogenase, putative
  misc_feature (1)..(436): NCBI GI NO: 28413147 NR Description: inosine monophosphate dehydrogenase
  misc_feature (1)..(436): NCBI GI NO: 4468193 NR Description: inosine monophosphate dehydrogenase [Glycine max]
  misc_feature (87)..(436): NCBI GI NO: 26451248 NR Description: putative inosine-5'-monophosphate dehydrogenase
  misc_feature (1)..(436): NCBI GI NO: 34897074 NR Description: putative inosine monophosphate dehydrogenase
  misc_feature (1)..(436): NCBI GI NO: 38096048 NR Description: inosine-5'-phosphate dehydrogenase
  misc_feature (54)..(436): NCBI GI NO: 16417597 NR Description: inosine-5'-monophosphate dehydrogenase-like
  misc_feature (1)..(436): NCBI GI NO: 28422466 NR Description: Unknown (protein for MGC:52763) [Xenopus laevis]
MAAAMASLGGIGIVHYNCGIAAQASIIRQAKSLKHPIASDAGVKFPEYEITSLDAFGPSSFVFVEQTGTMTTPKLLGYVTKSQWKRMNYEQREMKIYDYMKSCDSSDYCVPWEIDFEKLEFVLEDKQKGFVVLERDGETVNVVTKDDIQRVKGYPKSGPGTVGPDGEWMVGAAIGTRESDKERLEHLVNVGVNAVVLDSSQGNSIYQLEMIKYVKKTYPELDVIGGNVVTMYQAQNLIQAGVDGLRVGMGSGSICTTQEVCAVGRGQATAVYKVCSIAAQSGIPVIADGGISNSGHIVKALVLGASTVMMGSFLAGSTEAPGGYEYTNGKRIKKYRGMGSLEAMTKGSDQRYLGDQTKLKIAQGVVGAVADKGSVLKLIPYTMHAVKQGFQDLGASSLQSAHGLLRSNILRLEARTGAAQVEGGVHGLVSYEKKSF

SEQ ID NO: 3358 - DNA, 767 bp, Arabidopsis thaliana
  misc_feature (1)..(767): Ceres Seq. ID no. 13497708
aaaccaactccatctcacttctcaagtcttataatttattcatttctctcttcttcatcgatctttggcttttagaaaacctaatcagaaatggcaacggcgtcgtttaacatgcagtcagtgttcgctgctccttccggtgtattgactacacgcaacatcagaaacacaaaccaactcttcttcaagaggaatgctccggtaggagtcagatgcatggctcagggcgatcctatcaaggaagatccttctgtgccctcgacctcgacttcggccactcaaccacaaatgccacagtctcctcctccaccagttagcaagcctaaggtgagtacgaagtttggagatttgctagcgtttagcggtccagcacccgagaggatcaacgggagactagcaatggttggattcgtggcggccatcgccgtggagttatcaaagggagaaaacgtgtttgctcagatctctgacggtggtgtcgggtggtttctaggaacaaccgcgttgttgacgttggcatcgatggttccgttgttcaagggaataagggcagaggcaaagtcaaaagggttcatgacttcagacgccgagctatggaacggtcggtttgcgatgctcggtctcgttgcgttggccttcaccgagtacgtcactggtgggactctagtctaaggctaaagctttttgtttgctagtttaaggacaaatttggagaatgattatgtaacgcatagtttgatttaatactatgagttttaaacagtgtg

SEQ ID NO: 3359 - protein, 193 aa, Arabidopsis thaliana
  peptide (1)..(193): Ceres Seq. ID no. 13497709
  misc_feature (1)..(193): NCBI GI NO: 21618071 NR Description: light-induced protein-like protein
  misc_feature (1)..(193): NCBI GI NO: 18414282 NR Description: expressed protein [Arabidopsis thaliana]
  misc_feature (1)..(192): NCBI GI NO: 7488128 NR Description: probable light induced protein - Arabidopsis thaliana
  misc_feature (8)..(193): NCBI GI NO: 25315849 NR Description: early light-inducable protein
  misc_feature (1)..(193): NCBI GI NO: 15228866 NR Description: early light-induced protein [Arabidopsis thaliana]
  misc_feature (1)..(193): NCBI GI NO: 38123375 NR Description: ELIP [Brassica rapa subsp. pekinensis]
  misc_feature (1)..(193): NCBI GI NO: 7447856 NR Description: early light-inducible protein precursor - soybean
  misc_feature (50)..(193): NCBI GI NO: 16930757 NR Description: early light-induced protein-like protein
  misc_feature (1)..(190): NCBI GI NO: 28194659 NR Description: putative early light induced protein
  misc_feature (5)..(193): NCBI GI NO: 14487954 NR Description: early light inducible protein [Medicago sativa]
MATASFNMQSVFAAPSGVLTTRNIRNTNQLFFKRNAPVGVRCMAQGDPIKEDPSVPSTSTSATQPQMPQSPPPPVSKPKVSTKFGDLLAFSGPAPERINGRLAMVGFVAAIAVELSKGENVFAQISDGGVGWFLGTTALLTLASMVPLFKGIRAEAKSKGFMTSDAELWNGRFAMLGLVALAFTEYVTGGTLV

SEQ ID NO: 3360 - protein, 186 aa, Arabidopsis thaliana
  peptide (1)..(186): Ceres Seq. ID no. 13497710
  misc_feature (1)..(186): NCBI GI NO: 21618071 NR Description: light-induced protein-like protein
  misc_feature (1)..(186): NCBI GI NO: 18414282 NR Description: expressed protein [Arabidopsis thaliana]
  misc_feature (1)..(185): NCBI GI NO: 7488128 NR Description: probable light induced protein - Arabidopsis thaliana
  misc_feature (1)..(186): NCBI GI NO: 25315849 NR Description: early light-inducable protein
  misc_feature (1)..(186): NCBI GI NO: 15228866 NR Description: early light-induced protein [Arabidopsis thaliana]
  misc_feature (1)..(186): NCBI GI NO: 38123375 NR Description: ELIP [Brassica rapa subsp. pekinensis]
  misc_feature (1)..(186): NCBI GI NO: 7447856 NR Description: early light-inducible protein precursor - soybean
  misc_feature (43)..(186): NCBI GI NO: 16930757 NR Description: early light-induced protein-like protein
  misc_feature (1)..(183): NCBI GI NO: 28194659 NR Description: putative early light induced protein
  misc_feature (1)..(186): NCBI GI NO: 14487954 NR Description: early light inducible protein [Medicago sativa]
MQSVFAAPSGVLTTRNIRNTNQLFFKRNAPVGVRCMAQGDPIKEDPSVPSTSTSATQPQMPQSPPPPVSKPKVSTKFGDLLAFSGPAPERINGRLAMVGFVAAIAVELSKGENVFAQISDGGVGWFLGTTALLTLASMVPLFKGIRAEAKSKGFMTSDAELWNGRFAMLGLVALAFTEYVTGGTLV

SEQ ID NO: 3361 - protein, 151 aa, Arabidopsis thaliana
  peptide (1)..(151): Ceres Seq. ID no. 13497711
  misc_feature (1)..(151): NCBI GI NO: 21618071 NR Description: light-induced protein-like protein
  misc_feature (1)..(151): NCBI GI NO: 18414282 NR Description: expressed protein [Arabidopsis thaliana]
  misc_feature (1)..(150): NCBI GI NO: 7488128 NR Description: probable light induced protein - Arabidopsis thaliana
  misc_feature (1)..(151): NCBI GI NO: 25315849 NR Description: early light-inducable protein
  misc_feature (1)..(151): NCBI GI NO: 15228866 NR Description: early light-induced protein [Arabidopsis thaliana]
  misc_feature (1)..(151): NCBI GI NO: 38123375 NR Description: ELIP [Brassica rapa subsp. pekinensis]
  misc_feature (1)..(151): NCBI GI NO: 7447856 NR Description: early light-inducible protein precursor - soybean
  misc_feature (8)..(151): NCBI GI NO: 16930757 NR Description: early light-induced protein-like protein
  misc_feature (1)..(148): NCBI GI NO: 28194659 NR Description: putative early light induced protein
  misc_feature (1)..(151): NCBI GI NO: 14487954 NR Description: early light inducible protein [Medicago sativa]
MAQGDPIKEDPSVPSTSTSATQPQMPQSPPPPVSKPKVSTKFGDLLAFSGPAPERINGRLAMVGFVAAIAVELSKGENVFAQISDGGVGWFLGTTALLTLASMVPLFKGIRAEAKSKGFMTSDAELWNGRFAMLGLVALAFTEYVTGGTLV

SEQ ID NO: 3362 - DNA, 753 bp, Arabidopsis thaliana
  misc_feature (1)..(753): Ceres Seq. ID no. 12488252
  misc_feature (611)..(611): n is a, c, t, g, unknown, or other
actcatttttctattactgaaatttttcttagagaagaagaagaagaggcaaaatggccacaagcgcatcagctttgctctcaccaatagcttcttcctctgctctttcccttgcgatcgcatctgcgtacacttttctcctcccatcttccgggattacactgaaaagctcgtccactggcgcgatggtgctgatggatctgtagaaacttccaccaccttattttctgccacggccgtattcgcaaaaatgtctgctaccagcgacgcaatcttcaacttccagagagagaacgtagcaaaacagggcttaccggagcagaacggaaaaacccatttcgaagctggagatgatcgtgctaaggagtacgtcagtctcttgaaatcgaacgatccaattggattcaacattgttgatgttcttgcttggggttctattggacacatcgttgcttactacatcttggctacttccagcaatggatacgacccaagcttctttggatgattcgtttcaatgtcaatctctcgtatatgtatatgtatatgtttgacttgtgttgcaagctatctaatctgttctctatctctgtttcttcttctgttgttgntgtttttgtctaagacttgtccctctttttgcaaatgttttatttctccatttacaaatattggtttgcagagttttataagaagaacataatagtataaaaaaaaaaaaaaaaaagcttctcgtgccggcttctcgtgccg

SEQ ID NO: 3363 - protein, 168 aa, Arabidopsis thaliana
  peptide (1)..(168): Ceres Seq. ID no. 12488253
  misc_feature (92)..(164): Pfam Name: Pfam Description:  Photosystem I psaG / psaK
  misc_feature (92)..(168): NCBI GI NO: 15222757 NR Description: photosystem I subunit V precursor, putative
  misc_feature (64)..(168): NCBI GI NO: 131192 NR Description: Photosystem I reaction center subunit V
  misc_feature (92)..(167): NCBI GI NO: 131194 NR Description: Photosystem I reaction center subunit V
  misc_feature (61)..(163): NCBI GI NO: 17369611 NR Description: Photosystem I reaction center subunit V
LIFLLLKFFLEKKKKRQNGHKRISFALTNSFFLCSFPCDRICVHFSPPIFRDYTEKLVHWRDGADGSVETSTTLFSATAVFAKMSATSDAIFNFQRENVAKQGLPEQNGKTHFEAGDDRAKEYVSLLKSNDPIGFNIVDVLAWGSIGHIVAYYILATSSNGYDPSFFG

SEQ ID NO: 3364 - protein, 85 aa, Arabidopsis thaliana
  peptide (1)..(85): Ceres Seq. ID no. 12488254
  misc_feature (9)..(81): Pfam Name: Pfam Description:  Photosystem I psaG / psaK
  misc_feature (9)..(85): NCBI GI NO: 15222757 NR Description: photosystem I subunit V precursor, putative
  misc_feature (1)..(85): NCBI GI NO: 131192 NR Description: Photosystem I reaction center subunit V
  misc_feature (9)..(84): NCBI GI NO: 131194 NR Description: Photosystem I reaction center subunit V
  misc_feature (1)..(80): NCBI GI NO: 17369611 NR Description: Photosystem I reaction center subunit V
MSATSDAIFNFQRENVAKQGLPEQNGKTHFEAGDDRAKEYVSLLKSNDPIGFNIVDVLAWGSIGHIVAYYILATSSNGYDPSFFG

SEQ ID NO: 3365 - DNA, 1689 bp, Arabidopsis thaliana
  misc_feature (1)..(1689): Ceres Seq. ID no. 12669827
atccccaaatcttctccttctccaaaaaaatttcaaaccctagcttctcgatttctctcctctgctctccaattccatcttcccatggcgatttcggctccagccgcttgttcttcctcctctagaattctctgttcctactcctctccttctccttctctctgtcccgccatttccacctctggtaaactcaaaaccctaactctctcttcctccttcctcccttcttactcattaaccaccacctccgcttctcaatccactcgtcgctccttcaccgtccgcgccgctcgtggaaagttcgagaggaagaagcctcatgtcaacatcggaaccatcggtcatgttgaccatgggaaaactactttaaccgcagctctaaccatggctctcgcttccattggttccagcgtcgctaaaaagtacgacgagattgacgctgcgccggaggagagagctcgtggtatcacaatcaacactgctactgttgagtacgagactgagaatcgtcactacgctcacgttgattgtcctggtcacgctgattacgttaagaatatgattaccggagctgcacagatggacggagctatcctcgttgtttccggcgccgatggtcctatgcctcagactaaagagcatatccttttggctaagcaggttggtgttcctgatatggttgtgtttcttaacaaagaggatcaagtagatgatgcagagttgctagagctcgttgagcttgaggttcgtgagcttctctcgtcttatgaatttaacggtgatgatattccgattatctctggttctgctcttttagccgttgagactcttactgagaatcctaaggttaagagaggtgataacaaatgggtagataagatttatgaacttatggatgctgttgatgattacatccctatccctcagagacaaactgaattgccattcttgttagctgttgaggatgtgttctctatcactggacgtggtacggtggctacagggcgtgtcgagagaggtacggttaaggtaggagagactgtagatttagtgggtttgagggagactaggagttacactgtcactggggttgaaatgtttcagaagattcttgatgaggctttagctggtgacaatgtagggttgttgcttaggggtattcaaaaggctgatattcagagaggtatggttttagctaagccgggatcgattactccacataccaagtttgaagcaattatctatgtgttgaagaaagaggaaggtggaaggcattctccattctttgcagggtacaggcctcagttctacatgaggacgactgatgttacgggtaaagtgacgaagatcatgaacgacaaagatgaagagtcgaagatggttatgcccggtgatcgagtgaagattgttgttgagcttattgtgccggtggcttgtgaacaagggatgaggtttgctatcagagaaggaggaaagactgttggtgctggagttattgggacgatcctcgaatgattataaggttttagagagtttcatatagtgagcatctctacttgctttctttttgtttcactcttgattctcaaactctttgagtttttacctttttttatttatttttgtgccattttccataagaacttgaaatcaaaatgtcatatatttcttgattttctgatccttgtt

SEQ ID NO: 3366 - protein, 504 aa, Arabidopsis thaliana
  peptide (1)..(504): Ceres Seq. ID no. 12669828
  misc_feature (105)..(309): Pfam Name: Pfam Description:  Elongation factor Tu GTP binding domain
  misc_feature (29)..(504): NCBI GI NO: 15237059 NR Description: elongation factor Tu, chloroplast precursor
  misc_feature (29)..(504): NCBI GI NO: 23397095 NR Description: putative chloroplast translation elongation factor EF-Tuprecursor
  misc_feature (29)..(504): NCBI GI NO: 2494261 NR Description: Elongation factor Tu, chloroplast precursor
  misc_feature (29)..(504): NCBI GI NO: 1169494 NR Description: ELONGATION FACTOR TU, CHLOROPLAST PRECURSOR
  misc_feature (40)..(504): NCBI GI NO: 12830555 NR Description: chloroplast translational elongation factor Tu
  misc_feature (32)..(504): NCBI GI NO: 459241 NR Description: chloroplast elongation factor TuB(EF-TuB)
  misc_feature (32)..(504): NCBI GI NO: 729409 NR Description: ELONGATION FACTOR TU, CHLOROPLAST PRECURSOR
  misc_feature (32)..(504): NCBI GI NO: 486827 NR Description: translation elongation factor EF-Tu
  misc_feature (29)..(504): NCBI GI NO: 6015084 NR Description: ELONGATION FACTOR TU, CHLOROPLAST PRECURSOR
  misc_feature (81)..(504): NCBI GI NO: 218312 NR Description: chloroplast elongation factor TuB (EF-TuB)
IPKSSPSPKKFQTLASRFLSSALQFHLPMAISAPAACSSSSRILCSYSSPSPSLCPAISTSGKLKTLTLSSSFLPSYSLTTTSASQSTRRSFTVRAARGKFERKKPHVNIGTIGHVDHGKTTLTAALTMALASIGSSVAKKYDEIDAAPEERARGITINTATVEYETENRHYAHVDCPGHADYVKNMITGAAQMDGAILVVSGADGPMPQTKEHILLAKQVGVPDMVVFLNKEDQVDDAELLELVELEVRELLSSYEFNGDDIPIISGSALLAVETLTENPKVKRGDNKWVDKIYELMDAVDDYIPIPQRQTELPFLLAVEDVFSITGRGTVATGRVERGTVKVGETVDLVGLRETRSYTVTGVEMFQKILDEALAGDNVGLLLRGIQKADIQRGMVLAKPGSITPHTKFEAIIYVLKKEEGGRHSPFFAGYRPQFYMRTTDVTGKVTKIMNDKDEESKMVMPGDRVKIVVELIVPVACEQGMRFAIREGGKTVGAGVIGTILE

SEQ ID NO: 3367 - protein, 476 aa, Arabidopsis thaliana
  peptide (1)..(476): Ceres Seq. ID no. 12669829
  misc_feature (77)..(281): Pfam Name: Pfam Description:  Elongation factor Tu GTP binding domain
  misc_feature (1)..(476): NCBI GI NO: 15237059 NR Description: elongation factor Tu, chloroplast precursor
  misc_feature (1)..(476): NCBI GI NO: 23397095 NR Description: putative chloroplast translation elongation factor EF-Tuprecursor
  misc_feature (1)..(476): NCBI GI NO: 2494261 NR Description: Elongation factor Tu, chloroplast precursor
  misc_feature (1)..(476): NCBI GI NO: 1169494 NR Description: ELONGATION FACTOR TU, CHLOROPLAST PRECURSOR
  misc_feature (12)..(476): NCBI GI NO: 12830555 NR Description: chloroplast translational elongation factor Tu
  misc_feature (4)..(476): NCBI GI NO: 459241 NR Description: chloroplast elongation factor TuB(EF-TuB)
  misc_feature (4)..(476): NCBI GI NO: 729409 NR Description: ELONGATION FACTOR TU, CHLOROPLAST PRECURSOR
  misc_feature (4)..(476): NCBI GI NO: 486827 NR Description: translation elongation factor EF-Tu
  misc_feature (1)..(476): NCBI GI NO: 6015084 NR Description: ELONGATION FACTOR TU, CHLOROPLAST PRECURSOR
  misc_feature (53)..(476): NCBI GI NO: 218312 NR Description: chloroplast elongation factor TuB (EF-TuB)
MAISAPAACSSSSRILCSYSSPSPSLCPAISTSGKLKTLTLSSSFLPSYSLTTTSASQSTRRSFTVRAARGKFERKKPHVNIGTIGHVDHGKTTLTAALTMALASIGSSVAKKYDEIDAAPEERARGITINTATVEYETENRHYAHVDCPGHADYVKNMITGAAQMDGAILVVSGADGPMPQTKEHILLAKQVGVPDMVVFLNKEDQVDDAELLELVELEVRELLSSYEFNGDDIPIISGSALLAVETLTENPKVKRGDNKWVDKIYELMDAVDDYIPIPQRQTELPFLLAVEDVFSITGRGTVATGRVERGTVKVGETVDLVGLRETRSYTVTGVEMFQKILDEALAGDNVGLLLRGIQKADIQRGMVLAKPGSITPHTKFEAIIYVLKKEEGGRHSPFFAGYRPQFYMRTTDVTGKVTKIMNDKDEESKMVMPGDRVKIVVELIVPVACEQGMRFAIREGGKTVGAGVIGTILE

SEQ ID NO: 3368 - protein, 376 aa, Arabidopsis thaliana
  peptide (1)..(376): Ceres Seq. ID no. 12669830
  misc_feature (1)..(181): Pfam Name: Pfam Description:  Elongation factor Tu GTP binding domain
  misc_feature (1)..(376): NCBI GI NO: 15237059 NR Description: elongation factor Tu, chloroplast precursor
  misc_feature (1)..(376): NCBI GI NO: 23397095 NR Description: putative chloroplast translation elongation factor EF-Tuprecursor
  misc_feature (1)..(376): NCBI GI NO: 2494261 NR Description: Elongation factor Tu, chloroplast precursor
  misc_feature (1)..(376): NCBI GI NO: 1169494 NR Description: ELONGATION FACTOR TU, CHLOROPLAST PRECURSOR
  misc_feature (1)..(376): NCBI GI NO: 12830555 NR Description: chloroplast translational elongation factor Tu
  misc_feature (1)..(376): NCBI GI NO: 459241 NR Description: chloroplast elongation factor TuB(EF-TuB)
  misc_feature (1)..(376): NCBI GI NO: 729409 NR Description: ELONGATION FACTOR TU, CHLOROPLAST PRECURSOR
  misc_feature (1)..(376): NCBI GI NO: 486827 NR Description: translation elongation factor EF-Tu
  misc_feature (1)..(376): NCBI GI NO: 6015084 NR Description: ELONGATION FACTOR TU, CHLOROPLAST PRECURSOR
  misc_feature (1)..(376): NCBI GI NO: 218312 NR Description: chloroplast elongation factor TuB (EF-TuB)
MALASIGSSVAKKYDEIDAAPEERARGITINTATVEYETENRHYAHVDCPGHADYVKNMITGAAQMDGAILVVSGADGPMPQTKEHILLAKQVGVPDMVVFLNKEDQVDDAELLELVELEVRELLSSYEFNGDDIPIISGSALLAVETLTENPKVKRGDNKWVDKIYELMDAVDDYIPIPQRQTELPFLLAVEDVFSITGRGTVATGRVERGTVKVGETVDLVGLRETRSYTVTGVEMFQKILDEALAGDNVGLLLRGIQKADIQRGMVLAKPGSITPHTKFEAIIYVLKKEEGGRHSPFFAGYRPQFYMRTTDVTGKVTKIMNDKDEESKMVMPGDRVKIVVELIVPVACEQGMRFAIREGGKTVGAGVIGTILE

SEQ ID NO: 3369 - DNA, 1049 bp, Arabidopsis thaliana
  misc_feature (1)..(1049): Ceres Seq. ID no. 12371939
aaaattactacgattgctataatgtcgatgtctcggctcggattgttgttgttcgtcgctatattgctcgtcttgcttcagtcttccacttgtctgattagttctccaagttctatcatcaatccttctaaagtcaaacaggtttcgtcgaagcccagggcatttgtgtatgaaggttttttgacggacttggaatgtgatcatctaatctctcttgcgaaagagaatctgcagagatctgcggttgctgataacgataatggcgagagtcaagtcagtgatgttcgtaccagctccggcacttttatctccaaaggaaaggatcctattgtttccggtatcgaggacaagctctcaacatggacatttctcccaaaagaaaacggggaagaccttcaggtattgagatatgagcacggtcagaaatatgatgctcactttgactacttccacgacaaagtcaacattgcccgtggtggacaccgcatagcaacggttctcttgtatctgtccaatgtcacaaagggtggagaaactgttttccccgatgcacaggaattctctcgccgctcgctttctgagaataaagacgatctttctgattgtgcaaagaaaggaatcgctgtgaaaccgaagaaagggaatgctctgttgttcttcaacctccaacaagacgcaatcccagacccctttagccttcacggaggttgtccagtgatcgaaggagagaaatggtcggctactaagtggatccacgtggactcattcgataagatattgacacatgatggtaattgtactgacgtaaacgagagctgtgagagatgggcagtgcttggagaatgtggaaagaatccagagtatatggttggaactccagagatccctgggaattgcagacgtagctgtaaagcttgttaaagactttaaactcctctttttctctgtaacattaaaagtttttttttcttgatcgagtttcattttcttgtttctgattgttgttacatgtatcgtctcgctttatagaatgatttttttcgtctggc

SEQ ID NO: 3370 - protein, 306 aa, Arabidopsis thaliana
  peptide (1)..(306): Ceres Seq. ID no. 12371940
  misc_feature (128)..(253): Pfam Name: II Pfam Description: 2OG-Fe
  misc_feature (8)..(306): NCBI GI NO: 18397528 NR Description: expressed protein; protein id: At3g06300
  misc_feature (10)..(306): NCBI GI NO: 21618073 NR Description: prolyl 4-hydroxylase alpha subunit-like protein
  misc_feature (8)..(185): NCBI GI NO: 6437556 NR Description: unknown protein [Arabidopsis thaliana]
  misc_feature (207)..(306): NCBI GI NO: 6437556 NR Description: unknown protein [Arabidopsis thaliana]
  misc_feature (10)..(306): NCBI GI NO: 15239594 NR Description: putative protein; protein id: At5g18900
  misc_feature (10)..(306): NCBI GI NO: 20260280 NR Description: unknown protein [Arabidopsis thaliana]
  misc_feature (15)..(306): NCBI GI NO: 29150365 NR Description: putative oxidoreductase
  misc_feature (34)..(306): NCBI GI NO: 9294583 NR Description: prolyl 4-hydroxylase alpha subunit-like protein
  misc_feature (34)..(306): NCBI GI NO: 18405808 NR Description: prolyl 4-hydroxylase, putative
  misc_feature (34)..(306): NCBI GI NO: 18086437 NR Description: AT3g28480/MFJ20_16 [Arabidopsis thaliana]
KITTIAIMSMSRLGLLLFVAILLVLLQSSTCLISSPSSIINPSKVKQVSSKPRAFVYEGFLTDLECDHLISLAKENLQRSAVADNDNGESQVSDVRTSSGTFISKGKDPIVSGIEDKLSTWTFLPKENGEDLQVLRYEHGQKYDAHFDYFHDKVNIARGGHRIATVLLYLSNVTKGGETVFPDAQEFSRRSLSENKDDLSDCAKKGIAVKPKKGNALLFFNLQQDAIPDPFSLHGGCPVIEGEKWSATKWIHVDSFDKILTHDGNCTDVNESCERWAVLGECGKNPEYMVGTPEIPGNCRRSCKAC

SEQ ID NO: 3371 - protein, 299 aa, Arabidopsis thaliana
  peptide (1)..(299): Ceres Seq. ID no. 12371941
  misc_feature (121)..(246): Pfam Name: II Pfam Description: 2OG-Fe
  misc_feature (1)..(299): NCBI GI NO: 18397528 NR Description: expressed protein; protein id: At3g06300
  misc_feature (3)..(299): NCBI GI NO: 21618073 NR Description: prolyl 4-hydroxylase alpha subunit-like protein
  misc_feature (1)..(178): NCBI GI NO: 6437556 NR Description: unknown protein [Arabidopsis thaliana]
  misc_feature (200)..(299): NCBI GI NO: 6437556 NR Description: unknown protein [Arabidopsis thaliana]
  misc_feature (3)..(299): NCBI GI NO: 15239594 NR Description: putative protein; protein id: At5g18900
  misc_feature (3)..(299): NCBI GI NO: 20260280 NR Description: unknown protein [Arabidopsis thaliana]
  misc_feature (8)..(299): NCBI GI NO: 29150365 NR Description: putative oxidoreductase
  misc_feature (27)..(299): NCBI GI NO: 9294583 NR Description: prolyl 4-hydroxylase alpha subunit-like protein
  misc_feature (27)..(299): NCBI GI NO: 18405808 NR Description: prolyl 4-hydroxylase, putative
  misc_feature (27)..(299): NCBI GI NO: 18086437 NR Description: AT3g28480/MFJ20_16 [Arabidopsis thaliana]
MSMSRLGLLLFVAILLVLLQSSTCLISSPSSIINPSKVKQVSSKPRAFVYEGFLTDLECDHLISLAKENLQRSAVADNDNGESQVSDVRTSSGTFISKGKDPIVSGIEDKLSTWTFLPKENGEDLQVLRYEHGQKYDAHFDYFHDKVNIARGGHRIATVLLYLSNVTKGGETVFPDAQEFSRRSLSENKDDLSDCAKKGIAVKPKKGNALLFFNLQQDAIPDPFSLHGGCPVIEGEKWSATKWIHVDSFDKILTHDGNCTDVNESCERWAVLGECGKNPEYMVGTPEIPGNCRRSCKAC

SEQ ID NO: 3372 - protein, 297 aa, Arabidopsis thaliana
  peptide (1)..(297): Ceres Seq. ID no. 12371942
  misc_feature (119)..(244): Pfam Name: II Pfam Description: 2OG-Fe
  misc_feature (1)..(297): NCBI GI NO: 18397528 NR Description: expressed protein; protein id: At3g06300
  misc_feature (1)..(297): NCBI GI NO: 21618073 NR Description: prolyl 4-hydroxylase alpha subunit-like protein
  misc_feature (1)..(176): NCBI GI NO: 6437556 NR Description: unknown protein [Arabidopsis thaliana]
  misc_feature (198)..(297): NCBI GI NO: 6437556 NR Description: unknown protein [Arabidopsis thaliana]
  misc_feature (1)..(297): NCBI GI NO: 15239594 NR Description: putative protein; protein id: At5g18900
  misc_feature (1)..(297): NCBI GI NO: 20260280 NR Description: unknown protein [Arabidopsis thaliana]
  misc_feature (6)..(297): NCBI GI NO: 29150365 NR Description: putative oxidoreductase
  misc_feature (25)..(297): NCBI GI NO: 9294583 NR Description: prolyl 4-hydroxylase alpha subunit-like protein
  misc_feature (25)..(297): NCBI GI NO: 18405808 NR Description: prolyl 4-hydroxylase, putative
  misc_feature (25)..(297): NCBI GI NO: 18086437 NR Description: AT3g28480/MFJ20_16 [Arabidopsis thaliana]
MSRLGLLLFVAILLVLLQSSTCLISSPSSIINPSKVKQVSSKPRAFVYEGFLTDLECDHLISLAKENLQRSAVADNDNGESQVSDVRTSSGTFISKGKDPIVSGIEDKLSTWTFLPKENGEDLQVLRYEHGQKYDAHFDYFHDKVNIARGGHRIATVLLYLSNVTKGGETVFPDAQEFSRRSLSENKDDLSDCAKKGIAVKPKKGNALLFFNLQQDAIPDPFSLHGGCPVIEGEKWSATKWIHVDSFDKILTHDGNCTDVNESCERWAVLGECGKNPEYMVGTPEIPGNCRRSCKAC

SEQ ID NO: 3373 - DNA, 2967 bp, Arabidopsis thaliana
  misc_feature (1)..(2967): Ceres Seq. ID no. 13580311
agagaagagaatcttccaaaaatgttaaatcttgtgaaacaaataaagcatagcaaagcaaagtccaaagtccaatgagctaaaacaaaatcaaaaaggtttctttatgttttttttttttgaagtaagaaaaaaaaagagtttataaagaaacagtgaagaaataaatagcagaacaaagagaaagatcggagaaaagaatctttttaggctctctctcgcagacttcgcactcacacactcacttccattgctccaaaaaaacattgtatctacttcacttgctgtagagatatggtatcaagatcttattcaaacctcttggatcttgcttctggtaacttccattcgttttctcgagaaaagaagaggtttccaagagtagcaactgtcactggtgtcttatctgagctagatgatgataacaacagcaacagtgtctgctctgatgctccttcttccgtcacacaagatcgaatcatcatcgttggaaaccagcttcctattaaatcacatcggaactctgctggtaaattgagttttagttgggacaatgactcgcttctcttgcagcttaaagatggtatgcgtgaagatatggaagttgtctacattggttgccttaaggaacagattgatacagttgagcaagatgatgtttctcaaaggttgcttgagaatttcaaatgtgttcctgcttatatcccacctgagctattcactaagtactatcatggattctgtaagcaacatctatggcctttgtttcactacatgcttcccttaactcctgatcttggtggtagatttgatcgttctttatggcaagcttatctttcggttaacaagatctttgctgataaagtgatggaagtgattagtcctgatgatgattttgtttgggttcatgactatcacttaatggttttgcctacatttctaaggaagaggtttaatagagtaaagcttggttttttccttcatagcccgttcccttcctctgagatttaccgtactcttccagtgagaaatgagctcttacgtgcactcctcaacgctgatttgattggctttcatacctttgactatgcaagacacttcctttcttgttgtagcaggatgcttggtttatcctatcagtccaaacgtggaaccatagggcttgagtattatggtcgaacggttagtatcaagattcttcctgtggggattcatatcagccagcttcagtcaattttaaacctcccagagactcagaccaaagttgctgagctaagagatcagttcttggatcagaaagttcttctcggtgttgatgacatggacatcttcaaaggaatcagcctcaaactcttggcaatggaacaacttctcacacagcatcccgagaagagaggtcgagttgtacttgtccagattgcaaaccctgcaagaggtcgtgggaaagacgttcaggaggttcagtctgaaactgaagccacggttaaaaggatcaatgaaatgtttggaaggccgggctaccaacccgtggttctgattgatacaccgcttcaattctttgagaggattgcttactatgtcattgcagagtgttgtcttgttacagcggtaagagatggtatgaatcttataccttatgagtacattatctgcaggcaaggtaatccgaaactcaacgagactataggccttgacccttctgctgcaaagaagagtatgcttgttgtctctgagtttattggttgttctccttctttaagcggcgccattagagtaaatccgtggaacattgatgctgtgactgaagcaatggactatgcattgatagtttcagaagcagagaagcaaatgcgtcacgagaagcatcacaaatatgttagcacacatgatgttgcttattgggcgcgtagctttatacaagatcttgaaagggcttgcggggatcatgtgaggaagaggtgttgggggattggattcgggttaggctttagagttgtggcgcttgatccgagttttaaaaagctttcgattgagcacattgtctcagcttataagagaaccaagaaccgagccattttgttggattatgatggcacaatggtgcagccaggttccattaggacaacaccaacccgcgaaacaatcgaaatcttgaacaacctgtctagtgatcccaagaatatcgtgtacctcgtcagtgggaaagacagaaggacactaactgaatggttttcttcatgtgacgatctcggtttgggtgcagagcacgggtattttataaggccaaatgatggaacagactgggaaacgtcgagtttggtatcaggttttgagtggaaacaaatagcagagccagtgatgagactttacactgagactacagatggatcaacaatagagactaaagagactgctctcgtttggaattaccaattcgcagatcctgattttggatcttgtcaagccaaagagcttatggaacacctcgaaagcgtgcttaccaatgatccagtctctgtcaagactggacaacaactcgttgaagttaaaccacagggtgtgaacaaaggtcttgtggcagagaggcttctaacaacgatgcaagaaaaagggaaacttttggatttcattctctgcgtcggtgatgatcggtctgatgaggatatgtttgaggtgataatgagtgctaaagatggtccagctttgtctcctgtggctgagatattcgcttgcaccgttggacaaaagccaagcaaagcaaaatactatttagacgatactgcggagataatcagaatgctggacggtctagccgctaccaacacaactatctctgatcaaactgattcaaccgccactgttccaactaaagatctgttttaaggatttgtgaacgaaagttttagtgggtttgttgttgtgatttgtgaatgctttttcaaatataatggattaaggtaatcaaat

SEQ ID NO: 3374 - protein, 862 aa, Arabidopsis thaliana
  peptide (1)..(862): Ceres Seq. ID no. 13580312
  misc_feature (60)..(546): Pfam Name: Pfam Description:  Glycosyltransferase family 20
  misc_feature (1)..(860): NCBI GI NO: 34902280 NR Description: Putative trehalose-6-phosphate synthase
  misc_feature (1)..(840): NCBI GI NO: 15221478 NR Description: trehalose phosphatase family
  misc_feature (1)..(851): NCBI GI NO: 19568935 NR Description: putative trehalose synthase [Solanum tuberosum]
  misc_feature (1)..(862): NCBI GI NO: 15220891 NR Description: trehalose phosphatase family
  misc_feature (1)..(844): NCBI GI NO: 15219002 NR Description: trehalose phosphatase family
  misc_feature (25)..(852): NCBI GI NO: 34910846 NR Description: putative trehalose-6-phosphate synthase
  misc_feature (1)..(853): NCBI GI NO: 30698024 NR Description: alpha
  misc_feature (14)..(861): NCBI GI NO: 34909526 NR Description: putative trehalose-6-phosphate synthase homolog
  misc_feature (32)..(853): NCBI GI NO: 7488401 NR Description: trehalose-6-phosphate synthase homolog F17O7
  misc_feature (149)..(492): NCBI GI NO: 34391866 NR Description: trehalose-6-phosphate phosphatase
MVSRSYSNLLDLASGNFHSFSREKKRFPRVATVTGVLSELDDDNNSNSVCSDAPSSVTQDRIIIVGNQLPIKSHRNSAGKLSFSWDNDSLLLQLKDGMREDMEVVYIGCLKEQIDTVEQDDVSQRLLENFKCVPAYIPPELFTKYYHGFCKQHLWPLFHYMLPLTPDLGGRFDRSLWQAYLSVNKIFADKVMEVISPDDDFVWVHDYHLMVLPTFLRKRFNRVKLGFFLHSPFPSSEIYRTLPVRNELLRALLNADLIGFHTFDYARHFLSCCSRMLGLSYQSKRGTIGLEYYGRTVSIKILPVGIHISQLQSILNLPETQTKVAELRDQFLDQKVLLGVDDMDIFKGISLKLLAMEQLLTQHPEKRGRVVLVQIANPARGRGKDVQEVQSETEATVKRINEMFGRPGYQPVVLIDTPLQFFERIAYYVIAECCLVTAVRDGMNLIPYEYIICRQGNPKLNETIGLDPSAAKKSMLVVSEFIGCSPSLSGAIRVNPWNIDAVTEAMDYALIVSEAEKQMRHEKHHKYVSTHDVAYWARSFIQDLERACGDHVRKRCWGIGFGLGFRVVALDPSFKKLSIEHIVSAYKRTKNRAILLDYDGTMVQPGSIRTTPTRETIEILNNLSSDPKNIVYLVSGKDRRTLTEWFSSCDDLGLGAEHGYFIRPNDGTDWETSSLVSGFEWKQIAEPVMRLYTETTDGSTIETKETALVWNYQFADPDFGSCQAKELMEHLESVLTNDPVSVKTGQQLVEVKPQGVNKGLVAERLLTTMQEKGKLLDFILCVGDDRSDEDMFEVIMSAKDGPALSPVAEIFACTVGQKPSKAKYYLDDTAEIIRMLDGLAATNTTISDQTDSTATVPTKDLF

SEQ ID NO: 3375 - protein, 765 aa, Arabidopsis thaliana
  peptide (1)..(765): Ceres Seq. ID no. 13580313
  misc_feature (1)..(449): Pfam Name: Pfam Description:  Glycosyltransferase family 20
  misc_feature (1)..(763): NCBI GI NO: 34902280 NR Description: Putative trehalose-6-phosphate synthase
  misc_feature (1)..(743): NCBI GI NO: 15221478 NR Description: trehalose phosphatase family
  misc_feature (1)..(754): NCBI GI NO: 19568935 NR Description: putative trehalose synthase [Solanum tuberosum]
  misc_feature (1)..(765): NCBI GI NO: 15220891 NR Description: trehalose phosphatase family
  misc_feature (1)..(747): NCBI GI NO: 15219002 NR Description: trehalose phosphatase family
  misc_feature (1)..(755): NCBI GI NO: 34910846 NR Description: putative trehalose-6-phosphate synthase
  misc_feature (1)..(756): NCBI GI NO: 30698024 NR Description: alpha
  misc_feature (1)..(764): NCBI GI NO: 34909526 NR Description: putative trehalose-6-phosphate synthase homolog
  misc_feature (1)..(756): NCBI GI NO: 7488401 NR Description: trehalose-6-phosphate synthase homolog F17O7
  misc_feature (52)..(395): NCBI GI NO: 34391866 NR Description: trehalose-6-phosphate phosphatase
MREDMEVVYIGCLKEQIDTVEQDDVSQRLLENFKCVPAYIPPELFTKYYHGFCKQHLWPLFHYMLPLTPDLGGRFDRSLWQAYLSVNKIFADKVMEVISPDDDFVWVHDYHLMVLPTFLRKRFNRVKLGFFLHSPFPSSEIYRTLPVRNELLRALLNADLIGFHTFDYARHFLSCCSRMLGLSYQSKRGTIGLEYYGRTVSIKILPVGIHISQLQSILNLPETQTKVAELRDQFLDQKVLLGVDDMDIFKGISLKLLAMEQLLTQHPEKRGRVVLVQIANPARGRGKDVQEVQSETEATVKRINEMFGRPGYQPVVLIDTPLQFFERIAYYVIAECCLVTAVRDGMNLIPYEYIICRQGNPKLNETIGLDPSAAKKSMLVVSEFIGCSPSLSGAIRVNPWNIDAVTEAMDYALIVSEAEKQMRHEKHHKYVSTHDVAYWARSFIQDLERACGDHVRKRCWGIGFGLGFRVVALDPSFKKLSIEHIVSAYKRTKNRAILLDYDGTMVQPGSIRTTPTRETIEILNNLSSDPKNIVYLVSGKDRRTLTEWFSSCDDLGLGAEHGYFIRPNDGTDWETSSLVSGFEWKQIAEPVMRLYTETTDGSTIETKETALVWNYQFADPDFGSCQAKELMEHLESVLTNDPVSVKTGQQLVEVKPQGVNKGLVAERLLTTMQEKGKLLDFILCVGDDRSDEDMFEVIMSAKDGPALSPVAEIFACTVGQKPSKAKYYLDDTAEIIRMLDGLAATNTTISDQTDSTATVPTKDLF

SEQ ID NO: 3376 - protein, 761 aa, Arabidopsis thaliana
  peptide (1)..(761): Ceres Seq. ID no. 13580314
  misc_feature (1)..(445): Pfam Name: Pfam Description:  Glycosyltransferase family 20
  misc_feature (1)..(759): NCBI GI NO: 34902280 NR Description: Putative trehalose-6-phosphate synthase
  misc_feature (1)..(739): NCBI GI NO: 15221478 NR Description: trehalose phosphatase family
  misc_feature (1)..(750): NCBI GI NO: 19568935 NR Description: putative trehalose synthase [Solanum tuberosum]
  misc_feature (1)..(761): NCBI GI NO: 15220891 NR Description: trehalose phosphatase family
  misc_feature (1)..(743): NCBI GI NO: 15219002 NR Description: trehalose phosphatase family
  misc_feature (1)..(751): NCBI GI NO: 34910846 NR Description: putative trehalose-6-phosphate synthase
  misc_feature (1)..(752): NCBI GI NO: 30698024 NR Description: alpha
  misc_feature (1)..(760): NCBI GI NO: 34909526 NR Description: putative trehalose-6-phosphate synthase homolog
  misc_feature (1)..(752): NCBI GI NO: 7488401 NR Description: trehalose-6-phosphate synthase homolog F17O7
  misc_feature (48)..(391): NCBI GI NO: 34391866 NR Description: trehalose-6-phosphate phosphatase
MEVVYIGCLKEQIDTVEQDDVSQRLLENFKCVPAYIPPELFTKYYHGFCKQHLWPLFHYMLPLTPDLGGRFDRSLWQAYLSVNKIFADKVMEVISPDDDFVWVHDYHLMVLPTFLRKRFNRVKLGFFLHSPFPSSEIYRTLPVRNELLRALLNADLIGFHTFDYARHFLSCCSRMLGLSYQSKRGTIGLEYYGRTVSIKILPVGIHISQLQSILNLPETQTKVAELRDQFLDQKVLLGVDDMDIFKGISLKLLAMEQLLTQHPEKRGRVVLVQIANPARGRGKDVQEVQSETEATVKRINEMFGRPGYQPVVLIDTPLQFFERIAYYVIAECCLVTAVRDGMNLIPYEYIICRQGNPKLNETIGLDPSAAKKSMLVVSEFIGCSPSLSGAIRVNPWNIDAVTEAMDYALIVSEAEKQMRHEKHHKYVSTHDVAYWARSFIQDLERACGDHVRKRCWGIGFGLGFRVVALDPSFKKLSIEHIVSAYKRTKNRAILLDYDGTMVQPGSIRTTPTRETIEILNNLSSDPKNIVYLVSGKDRRTLTEWFSSCDDLGLGAEHGYFIRPNDGTDWETSSLVSGFEWKQIAEPVMRLYTETTDGSTIETKETALVWNYQFADPDFGSCQAKELMEHLESVLTNDPVSVKTGQQLVEVKPQGVNKGLVAERLLTTMQEKGKLLDFILCVGDDRSDEDMFEVIMSAKDGPALSPVAEIFACTVGQKPSKAKYYLDDTAEIIRMLDGLAATNTTISDQTDSTATVPTKDLF

SEQ ID NO: 3377 - DNA, 764 bp, Arabidopsis thaliana
  misc_feature (1)..(764): Ceres Seq. ID no. 12325589
aaaatttctcctatttccaaaatcttctatttctctctaaaaaaatgtcgaagaacgtttcgagaaactgcttaggatcaatggaagacatcaagaaagtattccaacgattcgacaaaaacaacgatgggaaaatctctatcgatgagcttaaagacgtgataggagctctctctccaaacgcttcacaagaagaaaccaaagcaatgatgaaagagtttgatcttgacggtaatggtttcattgatttggatgagtttgttgctttgtttcaaatcagtgatcaaagtagcaacaatagtgcgattagagatttgaaagaagcttttgatttgtatgatttggatcgtaatggaaggatctcggctaatgagttacactcggttatgaagaatcttggtgagaagtgttcgattcaagattgtcaaaggatgattaataaagttgattctgatggtgatggttgtgttgattttgaagagtttaagaagatgatgatgattaatggtagtgcttgatagaatcgatttagaatttggaaaagtgatatccttttttttgtttgtaaatattttgttttatgatttcgttaatctaatcttttttaggatttaggttaattaggagtttttaattttttaggttttatcgattaatctagaagaatctctatgttgcttctttaatggctctctgacctaatgttagggaatattgttgatgacctaattaatcgattaataatacaaaaaaccttttttttt

SEQ ID NO: 3378 - protein, 171 aa, Arabidopsis thaliana
  peptide (1)..(171): Ceres Seq. ID no. 12325590
  misc_feature (140)..(168): Pfam Name: Pfam Description:  EF hand
  misc_feature (15)..(171): NCBI GI NO: 18408502 NR Description: calmodulin-related protein; protein id: At1g66400
  misc_feature (15)..(171): NCBI GI NO: 21618074 NR Description: calmodulin-related protein [Arabidopsis thaliana]
  misc_feature (16)..(171): NCBI GI NO: 15240340 NR Description: CALMODULIN-RELATED PROTEIN 2, TOUCH-INDUCED
  misc_feature (27)..(170): NCBI GI NO: 14589311 NR Description: calcium binding protein [Sesbania rostrata]
  misc_feature (24)..(165): NCBI GI NO: 15221030 NR Description: calcium-binding protein, putative
  misc_feature (32)..(165): NCBI GI NO: 13397927 NR Description: putative calmodulin-related protein
  misc_feature (15)..(165): NCBI GI NO: 14423648 NR Description: Calcium-binding allergen Ole e 8 (PCA18/PCA23)
  misc_feature (15)..(165): NCBI GI NO: 6901654 NR Description: calcium-binding protein [Olea europaea]
  misc_feature (16)..(165): NCBI GI NO: 15219514 NR Description: putative calmodulin; protein id: At1g73630
  misc_feature (29)..(165): NCBI GI NO: 21618025 NR Description: putative calmodulin [Arabidopsis thaliana]
NFSYFQNLLFLSKKMSKNVSRNCLGSMEDIKKVFQRFDKNNDGKISIDELKDVIGALSPNASQEETKAMMKEFDLDGNGFIDLDEFVALFQISDQSSNNSAIRDLKEAFDLYDLDRNGRISANELHSVMKNLGEKCSIQDCQRMINKVDSDGDGCVDFEEFKKMMMINGSA

SEQ ID NO: 3379 - protein, 157 aa, Arabidopsis thaliana
  peptide (1)..(157): Ceres Seq. ID no. 12325591
  misc_feature (126)..(154): Pfam Name: Pfam Description:  EF hand
  misc_feature (1)..(157): NCBI GI NO: 18408502 NR Description: calmodulin-related protein; protein id: At1g66400
  misc_feature (1)..(157): NCBI GI NO: 21618074 NR Description: calmodulin-related protein [Arabidopsis thaliana]
  misc_feature (2)..(157): NCBI GI NO: 15240340 NR Description: CALMODULIN-RELATED PROTEIN 2, TOUCH-INDUCED
  misc_feature (13)..(156): NCBI GI NO: 14589311 NR Description: calcium binding protein [Sesbania rostrata]
  misc_feature (10)..(151): NCBI GI NO: 15221030 NR Description: calcium-binding protein, putative
  misc_feature (18)..(151): NCBI GI NO: 13397927 NR Description: putative calmodulin-related protein
  misc_feature (1)..(151): NCBI GI NO: 14423648 NR Description: Calcium-binding allergen Ole e 8 (PCA18/PCA23)
  misc_feature (1)..(151): NCBI GI NO: 6901654 NR Description: calcium-binding protein [Olea europaea]
  misc_feature (2)..(151): NCBI GI NO: 15219514 NR Description: putative calmodulin; protein id: At1g73630
  misc_feature (15)..(151): NCBI GI NO: 21618025 NR Description: putative calmodulin [Arabidopsis thaliana]
MSKNVSRNCLGSMEDIKKVFQRFDKNNDGKISIDELKDVIGALSPNASQEETKAMMKEFDLDGNGFIDLDEFVALFQISDQSSNNSAIRDLKEAFDLYDLDRNGRISANELHSVMKNLGEKCSIQDCQRMINKVDSDGDGCVDFEEFKKMMMINGSA

SEQ ID NO: 3380 - protein, 145 aa, Arabidopsis thaliana
  peptide (1)..(145): Ceres Seq. ID no. 12325592
  misc_feature (114)..(142): Pfam Name: Pfam Description:  EF hand
  misc_feature (1)..(145): NCBI GI NO: 18408502 NR Description: calmodulin-related protein; protein id: At1g66400
  misc_feature (1)..(145): NCBI GI NO: 21618074 NR Description: calmodulin-related protein [Arabidopsis thaliana]
  misc_feature (1)..(145): NCBI GI NO: 15240340 NR Description: CALMODULIN-RELATED PROTEIN 2, TOUCH-INDUCED
  misc_feature (1)..(144): NCBI GI NO: 14589311 NR Description: calcium binding protein [Sesbania rostrata]
  misc_feature (1)..(139): NCBI GI NO: 15221030 NR Description: calcium-binding protein, putative
  misc_feature (6)..(139): NCBI GI NO: 13397927 NR Description: putative calmodulin-related protein
  misc_feature (1)..(139): NCBI GI NO: 14423648 NR Description: Calcium-binding allergen Ole e 8 (PCA18/PCA23)
  misc_feature (1)..(139): NCBI GI NO: 6901654 NR Description: calcium-binding protein [Olea europaea]
  misc_feature (1)..(139): NCBI GI NO: 15219514 NR Description: putative calmodulin; protein id: At1g73630
  misc_feature (3)..(139): NCBI GI NO: 21618025 NR Description: putative calmodulin [Arabidopsis thaliana]
MEDIKKVFQRFDKNNDGKISIDELKDVIGALSPNASQEETKAMMKEFDLDGNGFIDLDEFVALFQISDQSSNNSAIRDLKEAFDLYDLDRNGRISANELHSVMKNLGEKCSIQDCQRMINKVDSDGDGCVDFEEFKKMMMINGSA

SEQ ID NO: 3381 - DNA, 581 bp, Arabidopsis thaliana
  misc_feature (1)..(581): Ceres Seq. ID no. 12423084
actgcgatcggagaagaaaaagctcgagagacgccatggaaatttcccaagctcgttcaagcttcgtttgtcttcttcttctgttactctccatgtttttcgttccctgcgtcttttccaaatctcctcgtcctatctccgatgtggagatcaggcagaagaagagcgaatgctacggtgatatagagagtgggttatggggttggcaatgcaaatcttctgcaatagcgaaagagaattgtgcgctgcgatgcctttctccggtttgctatcaactcatttatgagagtgatccgcttgaagaaggtgaaaaagatttgattaggagccaagagtacaagtattgtatgtacaagtcatcactcggggaaagcttagagggtgttcgaggcatcttttgatggtatcaaataagactttctcagtgaagacatttgccaaaatctgagctaagctcttgaatttctgatcagtagtattctgctctgtcgcgtttgaagccatgtaaggcttcttttattataaacctcaatttttgggttaatggttgtttatatgaaacgtttacgtttatgattggc

SEQ ID NO: 3382 - protein, 132 aa, Arabidopsis thaliana
  peptide (1)..(132): Ceres Seq. ID no. 12423085
  misc_feature (12)..(132): NCBI GI NO: 21618076 NR Description: unknown [Arabidopsis thaliana]
  misc_feature (12)..(132): NCBI GI NO: 18418364 NR Description: expressed protein; protein id: At5g17610
  misc_feature (12)..(119): NCBI GI NO: 11346183 NR Description: hypothetical protein K10A8_90 - Arabidopsis thaliana
  misc_feature (109)..(132): NCBI GI NO: 11346183 NR Description: hypothetical protein K10A8_90 - Arabidopsis thaliana
  misc_feature (47)..(132): NCBI GI NO: 34902472 NR Description: Putative DNAJ protein
CDRRRKSSRDAMEISQARSSFVCLLLLLLSMFFVPCVFSKSPRPISDVEIRQKKSECYGDIESGLWGWQCKSSAIAKENCALRCLSPVCYQLIYESDPLEEGEKDLIRSQEYKYCMYKSSLGESLEGVRGIF

SEQ ID NO: 3383 - protein, 121 aa, Arabidopsis thaliana
  peptide (1)..(121): Ceres Seq. ID no. 12423086
  misc_feature (1)..(121): NCBI GI NO: 21618076 NR Description: unknown [Arabidopsis thaliana]
  misc_feature (1)..(121): NCBI GI NO: 18418364 NR Description: expressed protein; protein id: At5g17610
  misc_feature (1)..(108): NCBI GI NO: 11346183 NR Description: hypothetical protein K10A8_90 - Arabidopsis thaliana
  misc_feature (98)..(121): NCBI GI NO: 11346183 NR Description: hypothetical protein K10A8_90 - Arabidopsis thaliana
  misc_feature (36)..(121): NCBI GI NO: 34902472 NR Description: Putative DNAJ protein
MEISQARSSFVCLLLLLLSMFFVPCVFSKSPRPISDVEIRQKKSECYGDIESGLWGWQCKSSAIAKENCALRCLSPVCYQLIYESDPLEEGEKDLIRSQEYKYCMYKSSLGESLEGVRGIF

SEQ ID NO: 3384 - protein, 102 aa, Arabidopsis thaliana
  peptide (1)..(102): Ceres Seq. ID no. 12423087
  misc_feature (1)..(102): NCBI GI NO: 21618076 NR Description: unknown [Arabidopsis thaliana]
  misc_feature (1)..(102): NCBI GI NO: 18418364 NR Description: expressed protein; protein id: At5g17610
  misc_feature (1)..(89): NCBI GI NO: 11346183 NR Description: hypothetical protein K10A8_90 - Arabidopsis thaliana
  misc_feature (79)..(102): NCBI GI NO: 11346183 NR Description: hypothetical protein K10A8_90 - Arabidopsis thaliana
  misc_feature (17)..(102): NCBI GI NO: 34902472 NR Description: Putative DNAJ protein
MFFVPCVFSKSPRPISDVEIRQKKSECYGDIESGLWGWQCKSSAIAKENCALRCLSPVCYQLIYESDPLEEGEKDLIRSQEYKYCMYKSSLGESLEGVRGIF

SEQ ID NO: 3385 - DNA, 2365 bp, Arabidopsis thaliana
  misc_feature (1)..(2365): Ceres Seq. ID no. 13489353
agagagaaaaaaaaaatgaagagaaggagactttttttctctgttctactctctatcctaactctgttcatcaatggtcctttgataacgacagctcaatctccaccttcttcttcaacttcatgtaaccgtatctgtggaggaatcgagattccttttccttttggaatcggacgaagagactgttttctcaacgactggtacgaggttgtctgtaacagcaccacctccggtaaatccttagctccgttcctctataagatcaacagagaattagttagcatcactcttcgaagcagcatcgacagttcctacggagttgttcacattaaatctccggtgacttcctccggctgttctcaacgacccgtaaagcctcttcctttaaacctcaccggtaaaggaagtccctttttcatcaccgactcgaatcgtctcgtctcagttggttgtgacaacagagcattgattacagacatcgaatctcagatcacaggatgcgaatcgagctgcgacggagataagagtcgtttagacaagatctgcggtggttacacatgttgtcaggcgaagattccggcggatagaccgcaagtaatcggcgttgaccttgaaagctccggtggtaacacaactcaaggaggaaactgtaaagttgctttcttgacgaatgagacttactctccggcgaatgttacagagccggaacaattttatactaatgggtttacggtgattgagcttggttggtactttgatacatcagattctcggttaacgaatcctgtgggttgtgtgaatttgacggaaacagggatttacacgagcgcaccgagctgtgtttgtgagtatggtaacttctctggctttggttacagtaactgttactgcaatcagattggttacagagggaatccttatcttcctggtggatgcattgacattgacgaatgtgaggaaggaaaaggactaagcagctgtggagaactaacttgtgtgaatgttcctggatcgtggaggtgcgagctgaatggagtagggaagatcaagcctctgtttccaggtcttgttctaggttttccactgttgttcttggtacttgggatatggggattgatcaagttcgttaagaagagaaggaagattatccgaaagagaatgttctttaaacgtaatggaggcttgttgttgaaacaacagttaactacaagaggaggtaatgtgcagtcatcgaagatattcagttcgaaagagctggagaaagcgacggataacttcaatatgaacagggttcttgggcaaggaggtcaaggcactgtctacaaaggaatgttggtagatgggcgaattgttgctgtgaaaagatctaaagttttagatgaagataaagttgaggagtttatcaatgaagttggtgttctctcgcagattaaccatagaaatattgtcaaactcatggggtgttgtctcgagacagaggttcctatcttggtttatgaacatattccaaatggagacctattcaagcggcttcaccatgattctgatgattacactatgacttgggatgtgcgattgcgcatctctgttgagattgcaggagcacttgcttacttgcactcggctgcatcaactccggtctatcatagagatgtcaagaccacaaacatacttttggatgagaagtatagagccaaggtatcggatttcgggacctcgagatccataaacgtagatcaaactcacttgactactctagttgcaggtacttttggatacttggatccagagtactttcaaactagccagtttacggataaaagtgatgtttatagttttggggtcgtcttggttgagctcataactggagaaaagccgttttctgtaatgcggcccgaagaaaacagaggacttgtgtctcatttcaatgaggctatgaaacagaacagagttcttgatattgttgattctcggatcaaagaaggttgcacgttggaacaagtgttggctgtggcgaaacttgccagaaggtgtttaagtctaaaagggaagaaacgaccaaatatgagagaggtttcagttgagcttgagaggatccgttcatcacccgaagatttggagttacatattgaagaggaggacgaagaagaatgcgccatggaaatcaacatggatgattcttggagcgtcgacatgactgctccagcttccctctttgatttatcgcccaagttagacgttgaaccgctggttcctcaacgaacatggtgatgatggaacctaaaacactgcaaatgtacaaagtgctgtgataacaaattctctcaatgttccattctttattaataaaaaatttgatgatgtc

SEQ ID NO: 3386 - protein, 756 aa, Arabidopsis thaliana
  peptide (1)..(756): Ceres Seq. ID no. 13489354
  misc_feature (4)..(756): NCBI GI NO: 15219134 NR Description: WAK-like kinase (WLK) [Arabidopsis thaliana]
  misc_feature (343)..(756): NCBI GI NO: 15219140 NR Description: WAK-like kinase (WLK) [Arabidopsis thaliana]
  misc_feature (4)..(355): NCBI GI NO: 15219140 NR Description: WAK-like kinase (WLK) [Arabidopsis thaliana]
  misc_feature (24)..(725): NCBI GI NO: 15219143 NR Description: WAK-like kinase (WLK) [Arabidopsis thaliana]
  misc_feature (6)..(723): NCBI GI NO: 15219132 NR Description: WAK-like kinase (WLK) [Arabidopsis thaliana]
  misc_feature (39)..(171): NCBI GI NO: 25405037 NR Description: protein F20B17.10
  misc_feature (317)..(756): NCBI GI NO: 25287660 NR Description: hypothetical protein T24D18.23
  misc_feature (4)..(289): NCBI GI NO: 25287660 NR Description: hypothetical protein T24D18.23
  misc_feature (339)..(756): NCBI GI NO: 25287658 NR Description: hypothetical protein T24D18
  misc_feature (4)..(268): NCBI GI NO: 25287658 NR Description: hypothetical protein T24D18
REKKKMKRRRLFFSVLLSILTLFINGPLITTAQSPPSSSTSCNRICGGIEIPFPFGIGRRDCFLNDWYEVVCNSTTSGKSLAPFLYKINRELVSITLRSSIDSSYGVVHIKSPVTSSGCSQRPVKPLPLNLTGKGSPFFITDSNRLVSVGCDNRALITDIESQITGCESSCDGDKSRLDKICGGYTCCQAKIPADRPQVIGVDLESSGGNTTQGGNCKVAFLTNETYSPANVTEPEQFYTNGFTVIELGWYFDTSDSRLTNPVGCVNLTETGIYTSAPSCVCEYGNFSGFGYSNCYCNQIGYRGNPYLPGGCIDIDECEEGKGLSSCGELTCVNVPGSWRCELNGVGKIKPLFPGLVLGFPLLFLVLGIWGLIKFVKKRRKIIRKRMFFKRNGGLLLKQQLTTRGGNVQSSKIFSSKELEKATDNFNMNRVLGQGGQGTVYKGMLVDGRIVAVKRSKVLDEDKVEEFINEVGVLSQINHRNIVKLMGCCLETEVPILVYEHIPNGDLFKRLHHDSDDYTMTWDVRLRISVEIAGALAYLHSAASTPVYHRDVKTTNILLDEKYRAKVSDFGTSRSINVDQTHLTTLVAGTFGYLDPEYFQTSQFTDKSDVYSFGVVLVELITGEKPFSVMRPEENRGLVSHFNEAMKQNRVLDIVDSRIKEGCTLEQVLAVAKLARRCLSLKGKKRPNMREVSVELERIRSSPEDLELHIEEEDEEECAMEINMDDSWSVDMTAPASLFDLSPKLDVEPLVPQRTW

SEQ ID NO: 3387 - protein, 751 aa, Arabidopsis thaliana
  peptide (1)..(751): Ceres Seq. ID no. 13489355
  misc_feature (1)..(751): NCBI GI NO: 15219134 NR Description: WAK-like kinase (WLK) [Arabidopsis thaliana]
  misc_feature (338)..(751): NCBI GI NO: 15219140 NR Description: WAK-like kinase (WLK) [Arabidopsis thaliana]
  misc_feature (1)..(350): NCBI GI NO: 15219140 NR Description: WAK-like kinase (WLK) [Arabidopsis thaliana]
  misc_feature (19)..(720): NCBI GI NO: 15219143 NR Description: WAK-like kinase (WLK) [Arabidopsis thaliana]
  misc_feature (1)..(718): NCBI GI NO: 15219132 NR Description: WAK-like kinase (WLK) [Arabidopsis thaliana]
  misc_feature (34)..(166): NCBI GI NO: 25405037 NR Description: protein F20B17.10
  misc_feature (312)..(751): NCBI GI NO: 25287660 NR Description: hypothetical protein T24D18.23
  misc_feature (1)..(284): NCBI GI NO: 25287660 NR Description: hypothetical protein T24D18.23
  misc_feature (334)..(751): NCBI GI NO: 25287658 NR Description: hypothetical protein T24D18
  misc_feature (1)..(263): NCBI GI NO: 25287658 NR Description: hypothetical protein T24D18
MKRRRLFFSVLLSILTLFINGPLITTAQSPPSSSTSCNRICGGIEIPFPFGIGRRDCFLNDWYEVVCNSTTSGKSLAPFLYKINRELVSITLRSSIDSSYGVVHIKSPVTSSGCSQRPVKPLPLNLTGKGSPFFITDSNRLVSVGCDNRALITDIESQITGCESSCDGDKSRLDKICGGYTCCQAKIPADRPQVIGVDLESSGGNTTQGGNCKVAFLTNETYSPANVTEPEQFYTNGFTVIELGWYFDTSDSRLTNPVGCVNLTETGIYTSAPSCVCEYGNFSGFGYSNCYCNQIGYRGNPYLPGGCIDIDECEEGKGLSSCGELTCVNVPGSWRCELNGVGKIKPLFPGLVLGFPLLFLVLGIWGLIKFVKKRRKIIRKRMFFKRNGGLLLKQQLTTRGGNVQSSKIFSSKELEKATDNFNMNRVLGQGGQGTVYKGMLVDGRIVAVKRSKVLDEDKVEEFINEVGVLSQINHRNIVKLMGCCLETEVPILVYEHIPNGDLFKRLHHDSDDYTMTWDVRLRISVEIAGALAYLHSAASTPVYHRDVKTTNILLDEKYRAKVSDFGTSRSINVDQTHLTTLVAGTFGYLDPEYFQTSQFTDKSDVYSFGVVLVELITGEKPFSVMRPEENRGLVSHFNEAMKQNRVLDIVDSRIKEGCTLEQVLAVAKLARRCLSLKGKKRPNMREVSVELERIRSSPEDLELHIEEEDEEECAMEINMDDSWSVDMTAPASLFDLSPKLDVEPLVPQRTW

SEQ ID NO: 3388 - DNA, 1966 bp, Arabidopsis thaliana
  misc_feature (1)..(1966): Ceres Seq. ID no. 13648305
ggaagtgaactccattgacgacgagtgaacgaaaggagggaagaaaaaagttaggttcgaaacgaaagtaaactagttaggtgaaaagcgaaacaacacccacagagcaatggcccctgctctcgccgttacacgagatctcaccgccgtcggatctccagagaatgctcctgcgaaaggacgtgcttcggtttacagtgaagttcaatcaagccgtattaacaacactcttcctttgccttctgttctcaaaggagctttcaaaatcgtcgaaggtcccgctagttccgccgccgggaatccagatgagatagcgaagttgtttccgggtctatatggccagccatcagtagcagtggttccagatcaggatgcaccttcgtcggcaccgaaattgaagattggtgttgttttgtctggaggtcaggcacctggtgggcacaatgttatttctggactgtttgattacctgcaagagcgtgcgaaaggtagcacattttatgggttcaagggtggtccagctggtatcatgaaatgcaaatatgttgagttgaatgctgaatatattcagccttacagaaaccagggtggttttgacatgatctgcagtggaagagacaagattgaaacacctgaccagtttaaacaagctgaagaaacagcaaagaagcttgatttggatgggttggtggttatcggtggagatgattccaacaccaatgcttgccttcttgctgaaaacttcaggagtaagaacttgaaaacccgagtcattgggtgccccaagaccattgatggtgatttgaaatgcaaagaggttcctactagttttgggtttgatacagcttgcaagatttactctgaaatgatcggaaacgtcatgattgatgcaaggtcgactggaaagtactatcattttgtaagacttatgggtcgtgctgcttcccacattacgcttgagtgtgctttacaaactcacccaaacataaccattattggagaagaggtttctgcccagaagcagactttgaagaatgtcacagactacatggtggatgttatctgcaaacgtgctgaacttggttacaactacggtgtcatactgattccagaaggtctgatcgactttattcctgaggtccaagagctcattgctgaactgaatgaaattctggcaaatgaggttgtcgatgaaaatggtttgtggaagaagaagctcaccgagcaatccctgaagctgtttgatcttctgcctgaagcaattcaggaacagctgatgcttgagagagacccacacggaaatgtccaggttgctaagattgagactgagaagatgcttattcaaatggttgaaactgaattggagaaaagaaagcaagctggtgcatacaagggacaattcatgggacagtcacatttcttcgggtatgaaggaagatgcggcttgcccacaaattttgatgccacatactgttatgcacttggttatggcgctggagtactcctcaacagtgggaagaccggactaatttcttcggttgggaacttggctgctcctgtggaagaatggactgtaggtgggactgctctcacagccttgatggatgtcgagaggagacacggtaagttcaagcctgtgatcaagaaagcaatggtggaacttgaaggtgcaccatttaagaaattcgcatcactgcgtgaagaatgggcattgaagaaccgatacatcagcccaggtccgatccaattcactggacctggttcagactctctcagccacactctacttcttgaactcggggctcaatagtctctcgactaaccaccattcctttgcttttctgccttccttggaatttcgcatcagtcttgttttatcttgaatattacgtgtccgtaacatttcgattaagttgattcctctcgtgtttcttcaacatataagataattataatattatttctt

SEQ ID NO: 3389 - protein, 566 aa, Arabidopsis thaliana
  peptide (1)..(566): Ceres Seq. ID no. 13648306
  misc_feature (97)..(383): Pfam Name: Pfam Description:  Phosphofructokinase
  misc_feature (1)..(566): NCBI GI NO: 15221156 NR Description: pyrophosphate -fructose-6-phosphate 1-phosphotransferase -related
  misc_feature (1)..(566): NCBI GI NO: 25314952 NR Description: hypothetical protein
  misc_feature (1)..(566): NCBI GI NO: 3790100 NR Description: pyrophosphate-dependent phosphofructokinase beta subunit
  misc_feature (21)..(565): NCBI GI NO: 2499489 NR Description: Pyrophosphate --fructose 6-phosphate 1-phosphotransferasebeta subunit
  misc_feature (91)..(566): NCBI GI NO: 30679628 NR Description: phosphofructokinase beta subunit -related
  misc_feature (19)..(120): NCBI GI NO: 30679628 NR Description: phosphofructokinase beta subunit -related
  misc_feature (26)..(564): NCBI GI NO: 2507174 NR Description: PYROPHOSPHATE --FRUCTOSE 6-PHOSPHATE 1-PHOSPHOTRANSFERASEBETA SUBUNIT
  misc_feature (19)..(566): NCBI GI NO: 7447689 NR Description: diphosphate -fructose-6-phosphate 1-phosphotransferase
  misc_feature (76)..(564): NCBI GI NO: 100462 NR Description: diphosphate -fructose-6-phosphate 1-phosphotransferase
  misc_feature (30)..(566): NCBI GI NO: 11528427 NR Description: pyrophosphate-dependent phosphofructokinase
MAPALAVTRDLTAVGSPENAPAKGRASVYSEVQSSRINNTLPLPSVLKGAFKIVEGPASSAAGNPDEIAKLFPGLYGQPSVAVVPDQDAPSSAPKLKIGVVLSGGQAPGGHNVISGLFDYLQERAKGSTFYGFKGGPAGIMKCKYVELNAEYIQPYRNQGGFDMICSGRDKIETPDQFKQAEETAKKLDLDGLVVIGGDDSNTNACLLAENFRSKNLKTRVIGCPKTIDGDLKCKEVPTSFGFDTACKIYSEMIGNVMIDARSTGKYYHFVRLMGRAASHITLECALQTHPNITIIGEEVSAQKQTLKNVTDYMVDVICKRAELGYNYGVILIPEGLIDFIPEVQELIAELNEILANEVVDENGLWKKKLTEQSLKLFDLLPEAIQEQLMLERDPHGNVQVAKIETEKMLIQMVETELEKRKQAGAYKGQFMGQSHFFGYEGRCGLPTNFDATYCYALGYGAGVLLNSGKTGLISSVGNLAAPVEEWTVGGTALTALMDVERRHGKFKPVIKKAMVELEGAPFKKFASLREEWALKNRYISPGPIQFTGPGSDSLSHTLLLELGAQ

SEQ ID NO: 3390 - protein, 426 aa, Arabidopsis thaliana
  peptide (1)..(426): Ceres Seq. ID no. 13648307
  misc_feature (1)..(243): Pfam Name: Pfam Description:  Phosphofructokinase
  misc_feature (1)..(426): NCBI GI NO: 15221156 NR Description: pyrophosphate -fructose-6-phosphate 1-phosphotransferase -related
  misc_feature (1)..(426): NCBI GI NO: 25314952 NR Description: hypothetical protein
  misc_feature (1)..(426): NCBI GI NO: 3790100 NR Description: pyrophosphate-dependent phosphofructokinase beta subunit
  misc_feature (1)..(425): NCBI GI NO: 2499489 NR Description: Pyrophosphate --fructose 6-phosphate 1-phosphotransferasebeta subunit
  misc_feature (1)..(426): NCBI GI NO: 30679628 NR Description: phosphofructokinase beta subunit -related
  misc_feature (1)..(424): NCBI GI NO: 2507174 NR Description: PYROPHOSPHATE --FRUCTOSE 6-PHOSPHATE 1-PHOSPHOTRANSFERASEBETA SUBUNIT
  misc_feature (1)..(426): NCBI GI NO: 7447689 NR Description: diphosphate -fructose-6-phosphate 1-phosphotransferase
  misc_feature (1)..(424): NCBI GI NO: 100462 NR Description: diphosphate -fructose-6-phosphate 1-phosphotransferase
  misc_feature (1)..(426): NCBI GI NO: 11528427 NR Description: pyrophosphate-dependent phosphofructokinase
  misc_feature (1)..(422): NCBI GI NO: 34540025 NR Description: phosphofructokinase [Porphyromonas gingivalis W83]
MKCKYVELNAEYIQPYRNQGGFDMICSGRDKIETPDQFKQAEETAKKLDLDGLVVIGGDDSNTNACLLAENFRSKNLKTRVIGCPKTIDGDLKCKEVPTSFGFDTACKIYSEMIGNVMIDARSTGKYYHFVRLMGRAASHITLECALQTHPNITIIGEEVSAQKQTLKNVTDYMVDVICKRAELGYNYGVILIPEGLIDFIPEVQELIAELNEILANEVVDENGLWKKKLTEQSLKLFDLLPEAIQEQLMLERDPHGNVQVAKIETEKMLIQMVETELEKRKQAGAYKGQFMGQSHFFGYEGRCGLPTNFDATYCYALGYGAGVLLNSGKTGLISSVGNLAAPVEEWTVGGTALTALMDVERRHGKFKPVIKKAMVELEGAPFKKFASLREEWALKNRYISPGPIQFTGPGSDSLSHTLLLELGAQ

SEQ ID NO: 3391 - protein, 403 aa, Arabidopsis thaliana
  peptide (1)..(403): Ceres Seq. ID no. 13648308
  misc_feature (1)..(220): Pfam Name: Pfam Description:  Phosphofructokinase
  misc_feature (1)..(403): NCBI GI NO: 15221156 NR Description: pyrophosphate -fructose-6-phosphate 1-phosphotransferase -related
  misc_feature (1)..(403): NCBI GI NO: 25314952 NR Description: hypothetical protein
  misc_feature (1)..(403): NCBI GI NO: 3790100 NR Description: pyrophosphate-dependent phosphofructokinase beta subunit
  misc_feature (1)..(402): NCBI GI NO: 2499489 NR Description: Pyrophosphate --fructose 6-phosphate 1-phosphotransferasebeta subunit
  misc_feature (1)..(403): NCBI GI NO: 30679628 NR Description: phosphofructokinase beta subunit -related
  misc_feature (1)..(401): NCBI GI NO: 2507174 NR Description: PYROPHOSPHATE --FRUCTOSE 6-PHOSPHATE 1-PHOSPHOTRANSFERASEBETA SUBUNIT
  misc_feature (1)..(403): NCBI GI NO: 7447689 NR Description: diphosphate -fructose-6-phosphate 1-phosphotransferase
  misc_feature (1)..(401): NCBI GI NO: 100462 NR Description: diphosphate -fructose-6-phosphate 1-phosphotransferase
  misc_feature (1)..(403): NCBI GI NO: 11528427 NR Description: pyrophosphate-dependent phosphofructokinase
  misc_feature (1)..(399): NCBI GI NO: 34540025 NR Description: phosphofructokinase [Porphyromonas gingivalis W83]
MICSGRDKIETPDQFKQAEETAKKLDLDGLVVIGGDDSNTNACLLAENFRSKNLKTRVIGCPKTIDGDLKCKEVPTSFGFDTACKIYSEMIGNVMIDARSTGKYYHFVRLMGRAASHITLECALQTHPNITIIGEEVSAQKQTLKNVTDYMVDVICKRAELGYNYGVILIPEGLIDFIPEVQELIAELNEILANEVVDENGLWKKKLTEQSLKLFDLLPEAIQEQLMLERDPHGNVQVAKIETEKMLIQMVETELEKRKQAGAYKGQFMGQSHFFGYEGRCGLPTNFDATYCYALGYGAGVLLNSGKTGLISSVGNLAAPVEEWTVGGTALTALMDVERRHGKFKPVIKKAMVELEGAPFKKFASLREEWALKNRYISPGPIQFTGPGSDSLSHTLLLELGAQ

SEQ ID NO: 3392 - DNA, 1110 bp, Arabidopsis thaliana
  misc_feature (1)..(1110): Ceres Seq. ID no. 13488521
acttcacttttgttctttgtcgcttcaattcaacgcttattcctaaattcgattttgcgttgtcaaattccttaaatttcgttacaaaggtttgatatttccgatgagatctccagcaaagacgatgccgtcgatgtcaccttcttcagtttccacggagaaatctccacctccgtcagatacttcaatggctatagtagctttcgataactccactactcacttctcttcttctccatcgccgccacattctcttgatcattccagtgaatcggagaaggaagatgcgaaaagtaaacccgagagtagaagaaacaagaatcctggaaaggttgaggaaactccatctccgattgtggtggttcataatcacaatcgctctgtgaaagaagtggttccgacgagaaagagtgcgagagttggttctgggagaagtagtggccaacgatctggagctgtttcggctattttgagaaggtctaggagagaagaggtggtaaagttttcagctttagggtttcggttgagtgaggttgtgttggctttgatatctttctcaattatggctgctgataaaactaaaggttggagtggtgattctttcgatcgttacaaggagtacaggttttgcctgtctgtgaacgtggttgcttttgtatattctagttttcaagcatgtgacttagcgtaccatcttgtcaaagagaagcatttgatcagccaccaccttcgacctctgtttgagttcattatagatcaggtacttgcatatctgcttatgtctgcctcaacagcagcagtcactcgcgttgatgattgggtttcaaactggggaaaagacgagttcacagagatggcaagtgcctcgattgctatgtccttcctggccttccttgcctttgctttcagttccctcatttcaggctataacctatttaaccaaggctctctctgatcctcccacctttttgtataggtccacactccttgtgtgatgtataataaaaatgatcaatatatcttagcattgtaattattatactatttttgtagcctatataaaggtttccaaaaactatgaggttaataagagaggcatatcctgttgtc

SEQ ID NO: 3393 - protein, 283 aa, Arabidopsis thaliana
  peptide (1)..(283): Ceres Seq. ID no. 13488522
  misc_feature (131)..(265): Pfam Name: DUF588 Pfam Description: Domain of unknown function
  misc_feature (1)..(283): NCBI GI NO: 27754604 NR Description: unknown protein [Arabidopsis thaliana]
  misc_feature (1)..(222): NCBI GI NO: 15227628 NR Description: expressed protein [Arabidopsis thaliana]
  misc_feature (1)..(282): NCBI GI NO: 15241975 NR Description: hypothetical protein [Arabidopsis thaliana]
  misc_feature (36)..(277): NCBI GI NO: 15242642 NR Description: expressed protein [Arabidopsis thaliana]
  misc_feature (188)..(283): NCBI GI NO: 15227628 NR Description: expressed protein [Arabidopsis thaliana]
  misc_feature (1)..(222): NCBI GI NO: 10177460 NR Description: gene_id:MQB2.14~unknown protein
  misc_feature (169)..(274): NCBI GI NO: 2598569 NR Description: putative start codon [Medicago truncatula]
  misc_feature (24)..(191): NCBI GI NO: 34911616 NR Description: P0039G05.10
  misc_feature (220)..(279): NCBI GI NO: 34911616 NR Description: P0039G05.10
  misc_feature (189)..(282): NCBI GI NO: 10177460 NR Description: gene_id:MQB2.14~unknown protein
MRSPAKTMPSMSPSSVSTEKSPPPSDTSMAIVAFDNSTTHFSSSPSPPHSLDHSSESEKEDAKSKPESRRNKNPGKVEETPSPIVVVHNHNRSVKEVVPTRKSARVGSGRSSGQRSGAVSAILRRSRREEVVKFSALGFRLSEVVLALISFSIMAADKTKGWSGDSFDRYKEYRFCLSVNVVAFVYSSFQACDLAYHLVKEKHLISHHLRPLFEFIIDQVLAYLLMSASTAAVTRVDDWVSNWGKDEFTEMASASIAMSFLAFLAFAFSSLISGYNLFNQGSL

SEQ ID NO: 3394 - protein, 276 aa, Arabidopsis thaliana
  peptide (1)..(276): Ceres Seq. ID no. 13488523
  misc_feature (124)..(258): Pfam Name: DUF588 Pfam Description: Domain of unknown function
  misc_feature (1)..(276): NCBI GI NO: 27754604 NR Description: unknown protein [Arabidopsis thaliana]
  misc_feature (1)..(215): NCBI GI NO: 15227628 NR Description: expressed protein [Arabidopsis thaliana]
  misc_feature (1)..(275): NCBI GI NO: 15241975 NR Description: hypothetical protein [Arabidopsis thaliana]
  misc_feature (29)..(270): NCBI GI NO: 15242642 NR Description: expressed protein [Arabidopsis thaliana]
  misc_feature (181)..(276): NCBI GI NO: 15227628 NR Description: expressed protein [Arabidopsis thaliana]
  misc_feature (1)..(215): NCBI GI NO: 10177460 NR Description: gene_id:MQB2.14~unknown protein
  misc_feature (162)..(267): NCBI GI NO: 2598569 NR Description: putative start codon [Medicago truncatula]
  misc_feature (17)..(184): NCBI GI NO: 34911616 NR Description: P0039G05.10
  misc_feature (213)..(272): NCBI GI NO: 34911616 NR Description: P0039G05.10
  misc_feature (182)..(275): NCBI GI NO: 10177460 NR Description: gene_id:MQB2.14~unknown protein
MPSMSPSSVSTEKSPPPSDTSMAIVAFDNSTTHFSSSPSPPHSLDHSSESEKEDAKSKPESRRNKNPGKVEETPSPIVVVHNHNRSVKEVVPTRKSARVGSGRSSGQRSGAVSAILRRSRREEVVKFSALGFRLSEVVLALISFSIMAADKTKGWSGDSFDRYKEYRFCLSVNVVAFVYSSFQACDLAYHLVKEKHLISHHLRPLFEFIIDQVLAYLLMSASTAAVTRVDDWVSNWGKDEFTEMASASIAMSFLAFLAFAFSSLISGYNLFNQGSL

SEQ ID NO: 3395 - protein, 273 aa, Arabidopsis thaliana
  peptide (1)..(273): Ceres Seq. ID no. 13488524
  misc_feature (121)..(255): Pfam Name: DUF588 Pfam Description: Domain of unknown function
  misc_feature (1)..(273): NCBI GI NO: 27754604 NR Description: unknown protein [Arabidopsis thaliana]
  misc_feature (1)..(212): NCBI GI NO: 15227628 NR Description: expressed protein [Arabidopsis thaliana]
  misc_feature (1)..(272): NCBI GI NO: 15241975 NR Description: hypothetical protein [Arabidopsis thaliana]
  misc_feature (26)..(267): NCBI GI NO: 15242642 NR Description: expressed protein [Arabidopsis thaliana]
  misc_feature (178)..(273): NCBI GI NO: 15227628 NR Description: expressed protein [Arabidopsis thaliana]
  misc_feature (1)..(212): NCBI GI NO: 10177460 NR Description: gene_id:MQB2.14~unknown protein
  misc_feature (159)..(264): NCBI GI NO: 2598569 NR Description: putative start codon [Medicago truncatula]
  misc_feature (14)..(181): NCBI GI NO: 34911616 NR Description: P0039G05.10
  misc_feature (210)..(269): NCBI GI NO: 34911616 NR Description: P0039G05.10
  misc_feature (179)..(272): NCBI GI NO: 10177460 NR Description: gene_id:MQB2.14~unknown protein
MSPSSVSTEKSPPPSDTSMAIVAFDNSTTHFSSSPSPPHSLDHSSESEKEDAKSKPESRRNKNPGKVEETPSPIVVVHNHNRSVKEVVPTRKSARVGSGRSSGQRSGAVSAILRRSRREEVVKFSALGFRLSEVVLALISFSIMAADKTKGWSGDSFDRYKEYRFCLSVNVVAFVYSSFQACDLAYHLVKEKHLISHHLRPLFEFIIDQVLAYLLMSASTAAVTRVDDWVSNWGKDEFTEMASASIAMSFLAFLAFAFSSLISGYNLFNQGSL

SEQ ID NO: 3396 - DNA, 1329 bp, Arabidopsis thaliana
  misc_feature (1)..(1329): Ceres Seq. ID no. 13619167
atggctgatagttgttgtatcagacttcacttattagcctctgttttcttgctcttattttcatccttcaacttgcagggtattgcagcggaaaatctttccaagcagaaactgacctcactgattcttcagaatgagattgtaaaggaagtcaatgagaatccaaacgctggttggaaagctgctttcaatgatcggtttgcaaatgccaccgttgcagagtttaagcgactcctcggtgttatacaaacaccaaagacggcatacttaggtgtacctattgtaagacatgatttatcgttgaagcttcctaaagaatttgatgctagaaccgcttggtcacattgcaccagtattcgaaggatcttagtgggttatatattgaacaatgtgttactctggtcgacgataactttatggttttggtttcttttgggtcattgtggttcttgctgggcatttggtgctgttgaatcactgtccgacaggttctgcatcaaatataacttgaatgtttccttatctgccaatgatgtcatagcatgttgtggattactttgcggttttggttgtaatggtggtttcccaatgggtgcatggttgtactttaagtaccacggtgtagtaacccaagagtgtgatccatactttgacaatactggttgctctcacccgggatgtgaacccacttaccctacaccaaaatgtgagaggaaatgtgtaagcagaaaccagctatggggtgaatcaaaacactatggtgtcggcgcatacagaatcaatcctgaccctcaagacattatggctgaggtttacaagaatggacctgtcgaggttgcttttaccgtttacgaggactttgcacattacaaatcaggagtatacaagtacataacgggtactaagattggaggtcatgcagttaagctcattggctggggaacttctgatgacggcgaagattattggttgcttgcaaatcaatggaaccgaagctggggtgatgatggttacttcaagatcaggagaggaacgaacgaatgtggcattgaacagagtgttgtagctggtttaccttcagagaagaacgtatttaaaggtattaccacttcagatgatcttctggtttcctcagtctaaacaagacgatgtgtccctacttctgtaatatatcatttgcaactgtgttgtaagtttaatataccattgaaagaatcaccttcaatcaaaacaaaagtatgtatagcttctgttaatattcaattttacatgttaccatgcaagaggactgttacagtgtttatttggttttggtaaattatagccacc

SEQ ID NO: 3397 - protein, 379 aa, Arabidopsis thaliana
  peptide (1)..(379): Ceres Seq. ID no. 13619168
  misc_feature (144)..(358): Pfam Name: Pfam Description:  Papain family cysteine protease
  misc_feature (1)..(379): NCBI GI NO: 18378945 NR Description: cathepsin B-like cysteine protease, putative
  misc_feature (144)..(379): NCBI GI NO: 2317912 NR Description: cathepsin B-like cysteine proteinase
  misc_feature (1)..(123): NCBI GI NO: 2317912 NR Description: cathepsin B-like cysteine proteinase
  misc_feature (146)..(378): NCBI GI NO: 18378947 NR Description: expressed protein [Arabidopsis thaliana]
  misc_feature (1)..(123): NCBI GI NO: 18378947 NR Description: expressed protein [Arabidopsis thaliana]
  misc_feature (145)..(379): NCBI GI NO: 30678927 NR Description: cathepsin B-like cysteine protease, putative
  misc_feature (12)..(123): NCBI GI NO: 30678927 NR Description: cathepsin B-like cysteine protease, putative
  misc_feature (146)..(379): NCBI GI NO: 18411686 NR Description: cathepsin B-like cysteine protease, putative
  misc_feature (12)..(123): NCBI GI NO: 18411686 NR Description: cathepsin B-like cysteine protease, putative
  misc_feature (146)..(375): NCBI GI NO: 609175 NR Description: cathepsin B-like cysteine proteinase
MADSCCIRLHLLASVFLLLFSSFNLQGIAAENLSKQKLTSLILQNEIVKEVNENPNAGWKAAFNDRFANATVAEFKRLLGVIQTPKTAYLGVPIVRHDLSLKLPKEFDARTAWSHCTSIRRILVGYILNNVLLWSTITLWFWFLLGHCGSCWAFGAVESLSDRFCIKYNLNVSLSANDVIACCGLLCGFGCNGGFPMGAWLYFKYHGVVTQECDPYFDNTGCSHPGCEPTYPTPKCERKCVSRNQLWGESKHYGVGAYRINPDPQDIMAEVYKNGPVEVAFTVYEDFAHYKSGVYKYITGTKIGGHAVKLIGWGTSDDGEDYWLLANQWNRSWGDDGYFKIRRGTNECGIEQSVVAGLPSEKNVFKGITTSDDLLVSSV

SEQ ID NO: 3398 - DNA, 1349 bp, Arabidopsis thaliana
  misc_feature (1)..(1349): Ceres Seq. ID no. 13592504
ggacggagcttcacatcgccgagagcttcgtcacgagatccatggcggccatttctcctctcttccttctcttcctcattcccattatcccactatcgcttctcgctatcttagccctaattgtacgtcctcgtcccattaagatccctatcaagtcccgtcacgtcttcatcaccggtggatctagcggcatcggtcttgctctcgcccaccgcgccgcttccgagggcgctcgtgtctcaatcctcgcccgatccggatcaaagctcgaggaggctaagaaatcgatccagctcgccactggtgtcgaagtcgccacattctctgcagacgttcgcgattacgatgcagtctcgaaggcgatagatgaatcgggaccgatcgatgtgttgattgttaaccaaggtgtgtttacggcgcaggagctggtgaaacatagtcctgaagatgtcaaattcacgattgacgtaaatctttttgggagcttcaatgtgattaaagccgctttgcctgccatgaaagcaaggaaagatcgtggacctgcttccatcagtctcgtctcctctcaagctggtcaggttggtgtctatggttatgctgcatattcagcaagcaagtttggtcttcagggtttagcgcaagcattgcaacaggaagttatatctgatgatattcatgtcactcttatttttcctcctgacactaatacacccggctttgaagaagaacagaagagcagacctgaagtcactgccataatagctgcatcctctggttcaatggaaacagaagaagtagcaaaaaaggctatggatggcataaaagcaggaaacttcaccgtctcatgcaactttgagggattcttactgtctctcgcgacaaccggcatgtcccctcaaagatcattttggcttgcttttcttgaagtttataaccgcagggcctataagattaatcgctctcttctttcaatgggattggtataaagccattgaaaaatggagcaaaaccaaaaccaaatgacagcccgacaatgtatcttgaagtgcttttggcagaagcttaaacattgatgggtattctcaaaccttcttctcagtccggtaccacgccagctagtcgactataccaattcagaatatcgacattgctgatagttttgtagaaactcgtcaagattcatgtttccggtctttgaacaagctctgttttttcttttttttatagagaaatcaaagaactcatttgaatgtattttttacttggtcaagaagtgaatgtttttcacaagatgaaatgtaaatgatgtatttgaaagaagtaaaaacttcaaaaccaaaatttgagtg

SEQ ID NO: 3399 - protein, 327 aa, Arabidopsis thaliana
  peptide (1)..(327): Ceres Seq. ID no. 13592505
  misc_feature (14)..(309): NCBI GI NO: 7658344 NR Description: unknown protein; 15741-13972
  misc_feature (14)..(309): NCBI GI NO: 30679701 NR Description: short-chain dehydrogenase/reductase family protein
  misc_feature (14)..(309): NCBI GI NO: 15239681 NR Description: short-chain dehydrogenase/reductase family protein
  misc_feature (33)..(301): NCBI GI NO: 27882572 NR Description: Similar to follicular lymphoma variant translocation 1
  misc_feature (24)..(301): NCBI GI NO: 4503817 NR Description: follicular lymphoma variant translocation 1
  misc_feature (24)..(301): NCBI GI NO: 30585239 NR Description: Homo sapiens follicular lymphoma variant translocation 1
  misc_feature (33)..(301): NCBI GI NO: 34878781 NR Description: similar to 6330410P18Rik protein
  misc_feature (22)..(307): NCBI GI NO: 21356301 NR Description: CG10425-PA [Drosophila melanogaster]
  misc_feature (23)..(308): NCBI GI NO: 39583655 NR Description: Hypothetical protein CBG08294
  misc_feature (54)..(303): NCBI GI NO: 15964328 NR Description: RIBITOL TYPE DEHYDROGENASE PROTEIN
TELHIAESFVTRSMAAISPLFLLFLIPIIPLSLLAILALIVRPRPIKIPIKSRHVFITGGSSGIGLALAHRAASEGARVSILARSGSKLEEAKKSIQLATGVEVATFSADVRDYDAVSKAIDESGPIDVLIVNQGVFTAQELVKHSPEDVKFTIDVNLFGSFNVIKAALPAMKARKDRGPASISLVSSQAGQVGVYGYAAYSASKFGLQGLAQALQQEVISDDIHVTLIFPPDTNTPGFEEEQKSRPEVTAIIAASSGSMETEEVAKKAMDGIKAGNFTVSCNFEGFLLSLATTGMSPQRSFWLAFLEVYNRRAYKINRSLLSMGLV

SEQ ID NO: 3400 - protein, 314 aa, Arabidopsis thaliana
  peptide (1)..(314): Ceres Seq. ID no. 13592506
  misc_feature (1)..(296): NCBI GI NO: 7658344 NR Description: unknown protein; 15741-13972
  misc_feature (1)..(296): NCBI GI NO: 30679701 NR Description: short-chain dehydrogenase/reductase family protein
  misc_feature (1)..(296): NCBI GI NO: 15239681 NR Description: short-chain dehydrogenase/reductase family protein
  misc_feature (20)..(288): NCBI GI NO: 27882572 NR Description: Similar to follicular lymphoma variant translocation 1
  misc_feature (11)..(288): NCBI GI NO: 4503817 NR Description: follicular lymphoma variant translocation 1
  misc_feature (11)..(288): NCBI GI NO: 30585239 NR Description: Homo sapiens follicular lymphoma variant translocation 1
  misc_feature (20)..(288): NCBI GI NO: 34878781 NR Description: similar to 6330410P18Rik protein
  misc_feature (9)..(294): NCBI GI NO: 21356301 NR Description: CG10425-PA [Drosophila melanogaster]
  misc_feature (10)..(295): NCBI GI NO: 39583655 NR Description: Hypothetical protein CBG08294
  misc_feature (41)..(290): NCBI GI NO: 15964328 NR Description: RIBITOL TYPE DEHYDROGENASE PROTEIN
MAAISPLFLLFLIPIIPLSLLAILALIVRPRPIKIPIKSRHVFITGGSSGIGLALAHRAASEGARVSILARSGSKLEEAKKSIQLATGVEVATFSADVRDYDAVSKAIDESGPIDVLIVNQGVFTAQELVKHSPEDVKFTIDVNLFGSFNVIKAALPAMKARKDRGPASISLVSSQAGQVGVYGYAAYSASKFGLQGLAQALQQEVISDDIHVTLIFPPDTNTPGFEEEQKSRPEVTAIIAASSGSMETEEVAKKAMDGIKAGNFTVSCNFEGFLLSLATTGMSPQRSFWLAFLEVYNRRAYKINRSLLSMGLV

SEQ ID NO: 3401 - DNA, 610 bp, Arabidopsis thaliana
  misc_feature (1)..(610): Ceres Seq. ID no. 12326739
aaccgactcttctaatctctgcgatcgtacatcagaaacctctatctcatcgccgaggaaaacagatcttacaatggctattaacaccatcacgaacgaagaagatgatgcatcaaacaactttggatgcaatatctgtcttgaattggcaagagaaccgatcgtgactctatgtggtcatttgttctgttggccttgtctctacaagtggctccattaccattctaaatcaaatcattgtcctgtttgtaaagctttggttaaggaagatactttggttcctttgtatggaatgggtaagccatcttctgatccgagatcgaaactcaatagtggtgttactgtccctaatcgaccagctgcgactaggactgaaacagctcgacctcgtcttgaacaaagacatcatgggtctagtttctttggtgggcattcaagttttgctgccatgccaactggtttacggttttcaaacttcttgttgtaatggaaagtatcttttgatgaatctgagtctgtttttttgacaatgtttttgaaactattattatacattgtctacgatttttgttattttgacaattaatgtttagagctacatttacattcc

SEQ ID NO: 3402 - protein, 161 aa, Arabidopsis thaliana
  peptide (1)..(161): Ceres Seq. ID no. 12326740
  misc_feature (43)..(83): Pfam Name: RING finger Pfam Description: Zinc finger, C3HC4 type
  misc_feature (25)..(161): NCBI GI NO: 15222064 NR Description: putative RING zinc finger protein
  misc_feature (31)..(161): NCBI GI NO: 18394721 NR Description: expressed protein; protein id: At1g19310
  misc_feature (32)..(159): NCBI GI NO: 15224062 NR Description: putative RING zinc finger protein
  misc_feature (32)..(159): NCBI GI NO: 21553849 NR Description: putative RING zinc finger protein
  misc_feature (38)..(159): NCBI GI NO: 34909840 NR Description: P0403C05.28
  misc_feature (35)..(158): NCBI GI NO: 29150403 NR Description: unknown protein
  misc_feature (11)..(133): NCBI GI NO: 34905296 NR Description: P0577B11.19
  misc_feature (24)..(161): NCBI GI NO: 31215747 NR Description: ENSANGP00000012621 [Anopheles gambiae]
  misc_feature (26)..(121): NCBI GI NO: 22795037 NR Description: putative RING protein [Populus x canescens]
  misc_feature (31)..(145): NCBI GI NO: 21912604 NR Description: putative ubiquitin ligase [Taenia solium]
TDSSNLCDRTSETSISSPRKTDLTMAINTITNEEDDASNNFGCNICLELAREPIVTLCGHLFCWPCLYKWLHYHSKSNHCPVCKALVKEDTLVPLYGMGKPSSDPRSKLNSGVTVPNRPAATRTETARPRLEQRHHGSSFFGGHSSFAAMPTGLRFSNFLL

SEQ ID NO: 3403 - protein, 137 aa, Arabidopsis thaliana
  peptide (1)..(137): Ceres Seq. ID no. 12326741
  misc_feature (19)..(59): Pfam Name: RING finger Pfam Description: Zinc finger, C3HC4 type
  misc_feature (1)..(137): NCBI GI NO: 15222064 NR Description: putative RING zinc finger protein
  misc_feature (7)..(137): NCBI GI NO: 18394721 NR Description: expressed protein; protein id: At1g19310
  misc_feature (8)..(135): NCBI GI NO: 15224062 NR Description: putative RING zinc finger protein
  misc_feature (8)..(135): NCBI GI NO: 21553849 NR Description: putative RING zinc finger protein
  misc_feature (14)..(135): NCBI GI NO: 34909840 NR Description: P0403C05.28
  misc_feature (11)..(134): NCBI GI NO: 29150403 NR Description: unknown protein
  misc_feature (1)..(109): NCBI GI NO: 34905296 NR Description: P0577B11.19
  misc_feature (1)..(137): NCBI GI NO: 31215747 NR Description: ENSANGP00000012621 [Anopheles gambiae]
  misc_feature (2)..(97): NCBI GI NO: 22795037 NR Description: putative RING protein [Populus x canescens]
  misc_feature (7)..(121): NCBI GI NO: 21912604 NR Description: putative ubiquitin ligase [Taenia solium]
MAINTITNEEDDASNNFGCNICLELAREPIVTLCGHLFCWPCLYKWLHYHSKSNHCPVCKALVKEDTLVPLYGMGKPSSDPRSKLNSGVTVPNRPAATRTETARPRLEQRHHGSSFFGGHSSFAAMPTGLRFSNFLL

SEQ ID NO: 3404 - DNA, 1669 bp, Arabidopsis thaliana
  misc_feature (1)..(1669): Ceres Seq. ID no. 13488602
cgatctcataacttagccattctaaaacccattcaccgtctctgtttcgttcgccgtgattcatagtcgtctcgtctcaccgtcaccatcaccgtcttcttcttccattgacaggatcttgtttagattctgcaatggctttcaggcaaactttatctataaggtccaggcttttcgctcgtcgtaaccaaccagtttatcatattatccctcgtgagagtgatcatgaaagggattcattctgtcaagaaacatctcagagaagttaccatagctttcttcaccaaagatccgttaacaattctgatttctccaaagtttctggaggaagcttacatttgcctcttgctcccacgtctggttttgctttctatcgttatatgtcaagtgcacctggtgttggttcagagaagattggtgtgatgtctgacattgcagaagtcataaccgactcaacattgcaagatgtgccagctcaggctgctgctgctgtcagtgaagttacacttgcagctgctgactctttcttccctatcgcggcccttcagcagtgcattgatatggtgcatacattcacaggctttgagtggtgggcatccattgttgtagcaaccattttgatccgatcatcaacagttcctctcttgatcaaacaaatgaaagacacaaccaagttagcgctgatgaggccacggttggagtccatccgggaggaaatgcaaaacaagggaatggactcggttacgatggcagaaggtcaaaaaaagatgaagaatttgtttaaagaatatggtgtcactccattcaccccaatgaaagggatgtttattcagggaccgctgttcatctgctttttccttgctattcgaaatatggcagagaaggtaccttcattccaaacaggaggtgcattatggtttaccgatctaacaactcccgacagcttatacatcttgccggttataacaggattgacattcttgataaccgttgagtgtaatgcacaagaaggcatggaagggaatccgatggctggcactgtaaaaactgtttgtcgggtttttgctctcctcacagtcccgatgacaatgagttttccacaggccatattttgttactggatcacatccaacctgttctctctcatgtatggacttgtgataaagcgtcctcaagtgaagaagatgttacgcatacctgatctgcctccacctcctccaggtcaacaaccttcatttgacctgttttcagctctcaagaaaatgaaagccatgacacaggaccatacacagaaccagatagaaccaccttcgccagtaaacccgaggctttcctcaacatcgctgagtcctgttagtaagaggctcaaggctttggagagccaagtaaagggaaggaagaagaatagcagcaagaagaagtgatttaaaacggtgcatactatttttgttaagagggccaaacgaaaaaaataataaagcttttgagtcgaaagtgaacacagaattttctcactgatgaaactactctgtgagctaaaaagctggaggcagctattgtaagtttgttttgaccaattatagaatagaagattgtttttatagaaacattttggataacatatacttttttatcttgttaagtaacagaacttgaacaacattggatc

SEQ ID NO: 3405 - protein, 429 aa, Arabidopsis thaliana
  peptide (1)..(429): Ceres Seq. ID no. 13488603
  misc_feature (151)..(348): Pfam Name: Pfam Description:  60Kd inner membrane protein
  misc_feature (1)..(429): NCBI GI NO: 15241690 NR Description: OXA1 protein (OXA1p) [Arabidopsis thaliana]
  misc_feature (10)..(422): NCBI GI NO: 15225991 NR Description: OXA1 protein (OXA1p), putative
  misc_feature (1)..(429): NCBI GI NO: 37536158 NR Description: putative Oxa1 protein
  misc_feature (1)..(428): NCBI GI NO: 22122905 NR Description: putative cytochrome oxidase assembly protein
  misc_feature (74)..(390): NCBI GI NO: 4826880 NR Description: oxidase (cytochrome c) assembly 1-like
  misc_feature (74)..(390): NCBI GI NO: 28193182 NR Description: unnamed protein product [Homo sapiens]
  misc_feature (124)..(368): NCBI GI NO: 11359300 NR Description: respiratory protein oxa1-2 - fission yeast
  misc_feature (124)..(368): NCBI GI NO: 19112969 NR Description: oxa1sp2 protein [Schizosaccharomyces pombe]
  misc_feature (74)..(390): NCBI GI NO: 37589026 NR Description: Oxidase (cytochrome c) assembly 1-like
  misc_feature (74)..(390): NCBI GI NO: 38372882 NR Description: Inner membrane protein OXA1L
MAFRQTLSIRSRLFARRNQPVYHIIPRESDHERDSFCQETSQRSYHSFLHQRSVNNSDFSKVSGGSLHLPLAPTSGFAFYRYMSSAPGVGSEKIGVMSDIAEVITDSTLQDVPAQAAAAVSEVTLAAADSFFPIAALQQCIDMVHTFTGFEWWASIVVATILIRSSTVPLLIKQMKDTTKLALMRPRLESIREEMQNKGMDSVTMAEGQKKMKNLFKEYGVTPFTPMKGMFIQGPLFICFFLAIRNMAEKVPSFQTGGALWFTDLTTPDSLYILPVITGLTFLITVECNAQEGMEGNPMAGTVKTVCRVFALLTVPMTMSFPQAIFCYWITSNLFSLMYGLVIKRPQVKKMLRIPDLPPPPPGQQPSFDLFSALKKMKAMTQDHTQNQIEPPSPVNPRLSSTSLSPVSKRLKALESQVKGRKKNSSKKK

SEQ ID NO: 3406 - protein, 347 aa, Arabidopsis thaliana
  peptide (1)..(347): Ceres Seq. ID no. 13488604
  misc_feature (69)..(266): Pfam Name: Pfam Description:  60Kd inner membrane protein
  misc_feature (1)..(347): NCBI GI NO: 15241690 NR Description: OXA1 protein (OXA1p) [Arabidopsis thaliana]
  misc_feature (1)..(340): NCBI GI NO: 15225991 NR Description: OXA1 protein (OXA1p), putative
  misc_feature (1)..(347): NCBI GI NO: 37536158 NR Description: putative Oxa1 protein
  misc_feature (1)..(346): NCBI GI NO: 22122905 NR Description: putative cytochrome oxidase assembly protein
  misc_feature (1)..(308): NCBI GI NO: 4826880 NR Description: oxidase (cytochrome c) assembly 1-like
  misc_feature (1)..(308): NCBI GI NO: 28193182 NR Description: unnamed protein product [Homo sapiens]
  misc_feature (42)..(286): NCBI GI NO: 11359300 NR Description: respiratory protein oxa1-2 - fission yeast
  misc_feature (42)..(286): NCBI GI NO: 19112969 NR Description: oxa1sp2 protein [Schizosaccharomyces pombe]
  misc_feature (1)..(308): NCBI GI NO: 37589026 NR Description: Oxidase (cytochrome c) assembly 1-like
  misc_feature (1)..(308): NCBI GI NO: 38372882 NR Description: Inner membrane protein OXA1L
MSSAPGVGSEKIGVMSDIAEVITDSTLQDVPAQAAAAVSEVTLAAADSFFPIAALQQCIDMVHTFTGFEWWASIVVATILIRSSTVPLLIKQMKDTTKLALMRPRLESIREEMQNKGMDSVTMAEGQKKMKNLFKEYGVTPFTPMKGMFIQGPLFICFFLAIRNMAEKVPSFQTGGALWFTDLTTPDSLYILPVITGLTFLITVECNAQEGMEGNPMAGTVKTVCRVFALLTVPMTMSFPQAIFCYWITSNLFSLMYGLVIKRPQVKKMLRIPDLPPPPPGQQPSFDLFSALKKMKAMTQDHTQNQIEPPSPVNPRLSSTSLSPVSKRLKALESQVKGRKKNSSKKK

SEQ ID NO: 3407 - protein, 333 aa, Arabidopsis thaliana
  peptide (1)..(333): Ceres Seq. ID no. 13488605
  misc_feature (55)..(252): Pfam Name: Pfam Description:  60Kd inner membrane protein
  misc_feature (1)..(333): NCBI GI NO: 15241690 NR Description: OXA1 protein (OXA1p) [Arabidopsis thaliana]
  misc_feature (1)..(326): NCBI GI NO: 15225991 NR Description: OXA1 protein (OXA1p), putative
  misc_feature (1)..(333): NCBI GI NO: 37536158 NR Description: putative Oxa1 protein
  misc_feature (1)..(332): NCBI GI NO: 22122905 NR Description: putative cytochrome oxidase assembly protein
  misc_feature (1)..(294): NCBI GI NO: 4826880 NR Description: oxidase (cytochrome c) assembly 1-like
  misc_feature (1)..(294): NCBI GI NO: 28193182 NR Description: unnamed protein product [Homo sapiens]
  misc_feature (28)..(272): NCBI GI NO: 11359300 NR Description: respiratory protein oxa1-2 - fission yeast
  misc_feature (28)..(272): NCBI GI NO: 19112969 NR Description: oxa1sp2 protein [Schizosaccharomyces pombe]
  misc_feature (1)..(294): NCBI GI NO: 37589026 NR Description: Oxidase (cytochrome c) assembly 1-like
  misc_feature (1)..(294): NCBI GI NO: 38372882 NR Description: Inner membrane protein OXA1L
MSDIAEVITDSTLQDVPAQAAAAVSEVTLAAADSFFPIAALQQCIDMVHTFTGFEWWASIVVATILIRSSTVPLLIKQMKDTTKLALMRPRLESIREEMQNKGMDSVTMAEGQKKMKNLFKEYGVTPFTPMKGMFIQGPLFICFFLAIRNMAEKVPSFQTGGALWFTDLTTPDSLYILPVITGLTFLITVECNAQEGMEGNPMAGTVKTVCRVFALLTVPMTMSFPQAIFCYWITSNLFSLMYGLVIKRPQVKKMLRIPDLPPPPPGQQPSFDLFSALKKMKAMTQDHTQNQIEPPSPVNPRLSSTSLSPVSKRLKALESQVKGRKKNSSKKK

SEQ ID NO: 3408 - DNA, 1540 bp, Arabidopsis thaliana
  misc_feature (1)..(1540): Ceres Seq. ID no. 13574941
cttttcctttgcctaattcccctaagtcatcgtctcttgaacggttcctgccattaatgtcgaactcttcctaaaccctttttgttcacatttccttctctttctcttcctccgtctctctctgaaaaaccctaattgactcgttgcgattgaaatggatccttgtccattcatccgtcttacaatcgggaacctagctttgaaagttccgttagcggcgaagacaacgagctccgtcgtgcatccgtcgtcttctccttgtttttgtaaaatcaaactcaaaaacttcccgccgcaaaccgccgcaatcccgtacattcctttggagacgactcagtttccggagatccaaaccctagccgccacgtttcatctcagcagctccgatattcaacgcttagcttccagatctatatttacttctaagccttgtcttaaaattttgatctacactggaagagccggcgctgcttgcggcgtacactccggtcgtcttctggcgaaagtctccgtaccgttggatctatctggtacgcaatcgaaaccgtgcgtcttccacaacggatggatatcagtcggaaaaggagctggaaaatcgtcgtcgtctgctcagtttcacctgaatgtgaaggcggagcctgatcctagattcgtttttcagtttgacggcgagcctgaatgtagtcctcaagtcgttcagattcaaggcaatatccggcaaccagttttcacatgcaaattcagttgccggcacaccggtgatcgtactcagagatcaagatcattgccgactgagacaagtgtttcacggagctggctaaactcgttcgggagtgagagagaacgtcctgggaaagagcgtaaaggatggtccataacagtccatgacttgtccggttcaccagtggccatggcgtcaatcgtcactccattcgtggcatctcctggaaccgatcgtgtgagccggtcaaaccctgggtcatggcttatactgcgtcccggagactgtacctggagaccgtggggaagacttgaagcatggcgggaacgcggtggagccactgatggtctaggttacagattcgaactcatcccagacggatcaagcggtgcaggaatcgtgcttgcggaatcaaccataagttctcacagaggtgggaaattctcaatcgagttgggatcgtcgccttcttcatcgtcgccaacaagtgtggtgaaccgatcgagaagccgtagaggtgggagtagtggaagcggtggaggagcatcgccggcgaatagtccgagaggagggagcggagattacggttacggattgtggccgtggaacgtgtacaaagggtttgtgatgtcagcaagtgtggaaggtgaagggaaatgtagtaagccttgtgtagaggtgagtgtgcagcacgttagctgtatggaagatgcggctgcttacgtggcgctttctgcagccattgatcttagtatggatgcttgcaggctgtttaatcaacggatgaggaaagagctttgccatgagtcactgagctga

SEQ ID NO: 3409 - protein, 461 aa, Arabidopsis thaliana
  peptide (1)..(461): Ceres Seq. ID no. 13574942
  misc_feature (256)..(460): Pfam Name: DUF1005 Pfam Description: Protein of unknown function
  misc_feature (1)..(461): NCBI GI NO: 15218372 NR Description: expressed protein [Arabidopsis thaliana]
  misc_feature (1)..(351): NCBI GI NO: 36104436 NR Description: unknown protein
  misc_feature (370)..(457): NCBI GI NO: 36104436 NR Description: unknown protein
  misc_feature (65)..(459): NCBI GI NO: 18176372 NR Description: unknown protein [Arabidopsis thaliana]
  misc_feature (1)..(89): NCBI GI NO: 18176372 NR Description: unknown protein [Arabidopsis thaliana]
  misc_feature (65)..(459): NCBI GI NO: 15230917 NR Description: expressed protein [Arabidopsis thaliana]
  misc_feature (1)..(89): NCBI GI NO: 15230917 NR Description: expressed protein [Arabidopsis thaliana]
  misc_feature (68)..(351): NCBI GI NO: 34896878 NR Description: unknown protein
  misc_feature (370)..(457): NCBI GI NO: 34896878 NR Description: unknown protein
  misc_feature (1)..(455): NCBI GI NO: 15222861 NR Description: expressed protein [Arabidopsis thaliana]
MDPCPFIRLTIGNLALKVPLAAKTTSSVVHPSSSPCFCKIKLKNFPPQTAAIPYIPLETTQFPEIQTLAATFHLSSSDIQRLASRSIFTSKPCLKILIYTGRAGAACGVHSGRLLAKVSVPLDLSGTQSKPCVFHNGWISVGKGAGKSSSSAQFHLNVKAEPDPRFVFQFDGEPECSPQVVQIQGNIRQPVFTCKFSCRHTGDRTQRSRSLPTETSVSRSWLNSFGSERERPGKERKGWSITVHDLSGSPVAMASIVTPFVASPGTDRVSRSNPGSWLILRPGDCTWRPWGRLEAWRERGGATDGLGYRFELIPDGSSGAGIVLAESTISSHRGGKFSIELGSSPSSSSPTSVVNRSRSRRGGSSGSGGGASPANSPRGGSGDYGYGLWPWNVYKGFVMSASVEGEGKCSKPCVEVSVQHVSCMEDAAAYVALSAAIDLSMDACRLFNQRMRKELCHESLS

SEQ ID NO: 3410 - DNA, 1523 bp, Arabidopsis thaliana
  misc_feature (1)..(1523): Ceres Seq. ID no. 12488230
ctcttcttcctctaattgcttttctccgtcactgagtaccttgcctctcgagctcccaatcttaagtagaggattgagcttaaggcaagatggtaagaaacttaaatatttattttgaatatttgatcaattatctatctttatgaattattgatcaagaaacaaaatttaaagaacatcggggacttgaaaaagtaatggaaatttcacaaaaccgaaaagcaaacggttaattcggttttacaaagaccaaacagaaaattcaataattcggtttggttcggtttaattacacctaacaaaaaagttggtatattcgtttttatttttccgccattcttgtcgatcttcttcagtcgtaaaaccgccgcgtctctgctgaccctcctcttctcatttcatcgacgggagaaaatctcataccatctgagatttccaacagtgaaattaagatgtcaacaggaatatccactgatctccatgtccattttggagctttgaatttctcaaaaacctacaaatctggtttaagaaatcgaacggtgtctttttcgagagtcgggtatgctcagaacaggaaattgagctgcagcgtttccaacacagagaatgtagctcctaaggatgatgaaagaggaaaggatagacctttggttaagatgtgtggcatcacatcagccagagatgcagctatggcagttgaggctggtgccgatttgattgggatgattatttggccacattcaaaacgatccatttctctttctgtcgcaaaggatatctctaaagtggccagggaaggtggggccaaacctgttggtgtttttgttgaagatgatgagaacacgatactgagagcagctgattactctgaccttgagcttgtgcagcttcatggtaatggttcgcgtgctgctttctcgaggttagtacgcaagaggagagtcatatatgtccttaatgcaaatcaggatggaaagctcttgaatgaagttcctgaagaggattgtcatcttgctgattggattcttgtggatagtgcaacgggtgggagtggacacggatttaactgggctcaattcaagttgccttccgtcagaagcagaaatgggtggctcttagctgggggaatcaatccaacaaatgtttcagaagctctttctatccttcaacctgatggaattgatgttagtagcggtatttgcggtacagatggtatccagaaggataagtctaagataagctcctttataactgcagttcgctctgtacactactaatggcaagcaatataaaccacggtaatttatcttgtaactatagttttgagcatcaacctattgtttccaatctatgtcattaagttttgaattgtaactggttgataataataataatgccctttcttttcatcagtagtagatttaaattaaaagcgttgggttgtcaccgtaataatgtcgttgggctctcaagaacaagatccttgtatgaaatgtattctactgatcatatattattcc

SEQ ID NO: 3411 - protein, 275 aa, Arabidopsis thaliana
  peptide (1)..(275): Ceres Seq. ID no. 12488231
  misc_feature (68)..(269): Pfam Name: 5'phosphoribosyl Pfam Description: N-
  misc_feature (1)..(275): NCBI GI NO: 1403670 NR Description: phosphoribosylanthranilate isomerase
  misc_feature (1)..(275): NCBI GI NO: 15223003 NR Description: phosphoribosylanthranilate isomerase
  misc_feature (1)..(275): NCBI GI NO: 30681012 NR Description: phosphoribosylanthranilate isomerase (PAI2)
  misc_feature (1)..(275): NCBI GI NO: 5031258 NR Description: phosphoribosylanthranilate isomerase
  misc_feature (2)..(275): NCBI GI NO: 25407008 NR Description: hypothetical protein
  misc_feature (1)..(275): NCBI GI NO: 1403671 NR Description: phosphoribosylanthranilate isomerase
  misc_feature (1)..(275): NCBI GI NO: 5031256 NR Description: phosphoribosylanthranilate isomerase
  misc_feature (2)..(275): NCBI GI NO: 10178136 NR Description: phosphoribosylanthranilate isomerase
  misc_feature (1)..(275): NCBI GI NO: 5031254 NR Description: phosphoribosylanthranilate isomerase
  misc_feature (1)..(275): NCBI GI NO: 5031264 NR Description: phosphoribosylanthranilate isomerase
MSTGISTDLHVHFGALNFSKTYKSGLRNRTVSFSRVGYAQNRKLSCSVSNTENVAPKDDERGKDRPLVKMCGITSARDAAMAVEAGADLIGMIIWPHSKRSISLSVAKDISKVAREGGAKPVGVFVEDDENTILRAADYSDLELVQLHGNGSRAAFSRLVRKRRVIYVLNANQDGKLLNEVPEEDCHLADWILVDSATGGSGHGFNWAQFKLPSVRSRNGWLLAGGINPTNVSEALSILQPDGIDVSSGICGTDGIQKDKSKISSFITAVRSVHY

SEQ ID NO: 3412 - protein, 206 aa, Arabidopsis thaliana
  peptide (1)..(206): Ceres Seq. ID no. 12488232
  misc_feature (1)..(200): Pfam Name: 5'phosphoribosyl Pfam Description: N-
  misc_feature (1)..(206): NCBI GI NO: 1403670 NR Description: phosphoribosylanthranilate isomerase
  misc_feature (1)..(206): NCBI GI NO: 15223003 NR Description: phosphoribosylanthranilate isomerase
  misc_feature (1)..(206): NCBI GI NO: 30681012 NR Description: phosphoribosylanthranilate isomerase (PAI2)
  misc_feature (1)..(206): NCBI GI NO: 5031258 NR Description: phosphoribosylanthranilate isomerase
  misc_feature (1)..(206): NCBI GI NO: 25407008 NR Description: hypothetical protein
  misc_feature (1)..(206): NCBI GI NO: 1403671 NR Description: phosphoribosylanthranilate isomerase
  misc_feature (1)..(206): NCBI GI NO: 5031256 NR Description: phosphoribosylanthranilate isomerase
  misc_feature (1)..(206): NCBI GI NO: 10178136 NR Description: phosphoribosylanthranilate isomerase
  misc_feature (1)..(206): NCBI GI NO: 5031254 NR Description: phosphoribosylanthranilate isomerase
  misc_feature (1)..(206): NCBI GI NO: 5031264 NR Description: phosphoribosylanthranilate isomerase
MCGITSARDAAMAVEAGADLIGMIIWPHSKRSISLSVAKDISKVAREGGAKPVGVFVEDDENTILRAADYSDLELVQLHGNGSRAAFSRLVRKRRVIYVLNANQDGKLLNEVPEEDCHLADWILVDSATGGSGHGFNWAQFKLPSVRSRNGWLLAGGINPTNVSEALSILQPDGIDVSSGICGTDGIQKDKSKISSFITAVRSVHY

SEQ ID NO: 3413 - protein, 195 aa, Arabidopsis thaliana
  peptide (1)..(195): Ceres Seq. ID no. 12488233
  misc_feature (1)..(189): Pfam Name: 5'phosphoribosyl Pfam Description: N-
  misc_feature (1)..(195): NCBI GI NO: 1403670 NR Description: phosphoribosylanthranilate isomerase
  misc_feature (1)..(195): NCBI GI NO: 15223003 NR Description: phosphoribosylanthranilate isomerase
  misc_feature (1)..(195): NCBI GI NO: 30681012 NR Description: phosphoribosylanthranilate isomerase (PAI2)
  misc_feature (1)..(195): NCBI GI NO: 5031258 NR Description: phosphoribosylanthranilate isomerase
  misc_feature (1)..(195): NCBI GI NO: 25407008 NR Description: hypothetical protein
  misc_feature (1)..(195): NCBI GI NO: 1403671 NR Description: phosphoribosylanthranilate isomerase
  misc_feature (1)..(195): NCBI GI NO: 5031256 NR Description: phosphoribosylanthranilate isomerase
  misc_feature (1)..(195): NCBI GI NO: 10178136 NR Description: phosphoribosylanthranilate isomerase
  misc_feature (1)..(195): NCBI GI NO: 5031254 NR Description: phosphoribosylanthranilate isomerase
  misc_feature (1)..(195): NCBI GI NO: 5031264 NR Description: phosphoribosylanthranilate isomerase
MAVEAGADLIGMIIWPHSKRSISLSVAKDISKVAREGGAKPVGVFVEDDENTILRAADYSDLELVQLHGNGSRAAFSRLVRKRRVIYVLNANQDGKLLNEVPEEDCHLADWILVDSATGGSGHGFNWAQFKLPSVRSRNGWLLAGGINPTNVSEALSILQPDGIDVSSGICGTDGIQKDKSKISSFITAVRSVHY

SEQ ID NO: 3414 - DNA, 910 bp, Arabidopsis thaliana
  misc_feature (1)..(910): Ceres Seq. ID no. 13488348
aacagtcaattggcggcgaagatgacgactcagtcgcagttcttagtgaacctctcttacggaggcctcgcctcccaaagtaatctcagagcgaataatcgtgtttcaccttcttcttgtcaaattacacgaacaaatcgctcatgggcattaccagtttcctttaaagttgagaaatttcaactccaacgaggaaggaggagaagaggatcaccatgttttggggagagcgaagggttggtcaaaaatgggattggtgatgctgatgggattataattgttgatcacggttctcgtcgccgtgaatccaatcttatgcttgaggagtttgtgaaaatgttcaaagaaaaaactggttacccaattgtagagcctgctcatatggaattggctgagccatctataaaagatgcattcagtttgtgtgtacaacaaggggcgaaacgtgtagttgtgagcccgttttttctatttcctggaagacattggcatacggacattccctcgttgacggctgatgctgcaaaggagttctctggcatctcatacctcataactgcacctctcggcccccataatctcctcctggacgttgtaaatgacagaatccaacattgcttgagccatgttgaaggtgatgctgacgagtgtcttgtttgtgctggaacaaataagtgcaagctctacaatagttcttaggtgtacatgtaagaacgtttttgtatatctgctcatcttctctaaccttcggatgcgggaaaaaaaggaggcatagtatattgttcatactcatcatttagtacgcgtcctatgtttcaacaagggagttttgagatttatgttcttttcttcttattgcagaccaatttgaaagactacgataatataataaaagctgtctgttaaatgc

SEQ ID NO: 3415 - protein, 232 aa, Arabidopsis thaliana
  peptide (1)..(232): Ceres Seq. ID no. 13488349
  misc_feature (127)..(206): Pfam Name: Pfam Description:  CbiX
  misc_feature (8)..(232): NCBI GI NO: 18402963 NR Description: expressed protein [Arabidopsis thaliana]
  misc_feature (8)..(128): NCBI GI NO: 25405354 NR Description: hypothetical protein F14I3.20
  misc_feature (127)..(232): NCBI GI NO: 25405354 NR Description: hypothetical protein F14I3.20
  misc_feature (8)..(232): NCBI GI NO: 21618095 NR Description: unknown [Arabidopsis thaliana]
  misc_feature (80)..(208): NCBI GI NO: 23054392 NR Description: hypothetical protein [Geobacter metallireducens]
  misc_feature (91)..(208): NCBI GI NO: 39998091 NR Description: cbiX protein [Geobacter sulfurreducens PCA]
  misc_feature (90)..(212): NCBI GI NO: 15614059 NR Description: BH1496~unknown conserved protein
  misc_feature (89)..(222): NCBI GI NO: 40642725 NR Description: ferrochelatase [Bacillus megaterium]
  misc_feature (89)..(170): NCBI GI NO: 15669160 NR Description: conserved hypothetical protein
  misc_feature (90)..(207): NCBI GI NO: 21400014 NR Description: CbiX, CbiX [Bacillus anthracis A2012]
NSQLAAKMTTQSQFLVNLSYGGLASQSNLRANNRVSPSSCQITRTNRSWALPVSFKVEKFQLQRGRRRRGSPCFGESEGLVKNGIGDADGIIIVDHGSRRRESNLMLEEFVKMFKEKTGYPIVEPAHMELAEPSIKDAFSLCVQQGAKRVVVSPFFLFPGRHWHTDIPSLTADAAKEFSGISYLITAPLGPHNLLLDVVNDRIQHCLSHVEGDADECLVCAGTNKCKLYNSS

SEQ ID NO: 3416 - protein, 225 aa, Arabidopsis thaliana
  peptide (1)..(225): Ceres Seq. ID no. 13488350
  misc_feature (120)..(199): Pfam Name: Pfam Description:  CbiX
  misc_feature (1)..(225): NCBI GI NO: 18402963 NR Description: expressed protein [Arabidopsis thaliana]
  misc_feature (1)..(121): NCBI GI NO: 25405354 NR Description: hypothetical protein F14I3.20
  misc_feature (120)..(225): NCBI GI NO: 25405354 NR Description: hypothetical protein F14I3.20
  misc_feature (1)..(225): NCBI GI NO: 21618095 NR Description: unknown [Arabidopsis thaliana]
  misc_feature (73)..(201): NCBI GI NO: 23054392 NR Description: hypothetical protein [Geobacter metallireducens]
  misc_feature (84)..(201): NCBI GI NO: 39998091 NR Description: cbiX protein [Geobacter sulfurreducens PCA]
  misc_feature (83)..(205): NCBI GI NO: 15614059 NR Description: BH1496~unknown conserved protein
  misc_feature (82)..(215): NCBI GI NO: 40642725 NR Description: ferrochelatase [Bacillus megaterium]
  misc_feature (82)..(163): NCBI GI NO: 15669160 NR Description: conserved hypothetical protein
  misc_feature (83)..(200): NCBI GI NO: 21400014 NR Description: CbiX, CbiX [Bacillus anthracis A2012]
MTTQSQFLVNLSYGGLASQSNLRANNRVSPSSCQITRTNRSWALPVSFKVEKFQLQRGRRRRGSPCFGESEGLVKNGIGDADGIIIVDHGSRRRESNLMLEEFVKMFKEKTGYPIVEPAHMELAEPSIKDAFSLCVQQGAKRVVVSPFFLFPGRHWHTDIPSLTADAAKEFSGISYLITAPLGPHNLLLDVVNDRIQHCLSHVEGDADECLVCAGTNKCKLYNSS

SEQ ID NO: 3417 - protein, 127 aa, Arabidopsis thaliana
  peptide (1)..(127): Ceres Seq. ID no. 13488351
  misc_feature (22)..(101): Pfam Name: Pfam Description:  CbiX
  misc_feature (1)..(127): NCBI GI NO: 18402963 NR Description: expressed protein [Arabidopsis thaliana]
  misc_feature (1)..(23): NCBI GI NO: 25405354 NR Description: hypothetical protein F14I3.20
  misc_feature (22)..(127): NCBI GI NO: 25405354 NR Description: hypothetical protein F14I3.20
  misc_feature (1)..(127): NCBI GI NO: 21618095 NR Description: unknown [Arabidopsis thaliana]
  misc_feature (1)..(103): NCBI GI NO: 23054392 NR Description: hypothetical protein [Geobacter metallireducens]
  misc_feature (1)..(103): NCBI GI NO: 39998091 NR Description: cbiX protein [Geobacter sulfurreducens PCA]
  misc_feature (1)..(107): NCBI GI NO: 15614059 NR Description: BH1496~unknown conserved protein
  misc_feature (1)..(117): NCBI GI NO: 40642725 NR Description: ferrochelatase [Bacillus megaterium]
  misc_feature (1)..(65): NCBI GI NO: 15669160 NR Description: conserved hypothetical protein
  misc_feature (1)..(102): NCBI GI NO: 21400014 NR Description: CbiX, CbiX [Bacillus anthracis A2012]
MLEEFVKMFKEKTGYPIVEPAHMELAEPSIKDAFSLCVQQGAKRVVVSPFFLFPGRHWHTDIPSLTADAAKEFSGISYLITAPLGPHNLLLDVVNDRIQHCLSHVEGDADECLVCAGTNKCKLYNSS

SEQ ID NO: 3418 - DNA, 1007 bp, Arabidopsis thaliana
  misc_feature (1)..(1007): Ceres Seq. ID no. 12325471
agaaacctcttcttcttcaatttcacagcttcacgtcgtcgtctttgagtcgccggagctgtagctactgatttggtaccagaaagagagtgcgacggtggacgatgacgctttttcacttcttcaactgtgcgattctcacattcggtcctcacgcggtctactactccgccactcccttatctgaatatgatacacttggaacctccgtgaaagctgctgttgtttaccttgctactgcattggttaagcttgtttgtttggcgacttttctgcaagtgtctgagactgaagtgtttgacccataccaggaagcattgaaagcgatgattggattcatagatgtcgctggtctgtattatgctctggcccagctgactcacaggaacatctcccaaaaccataagtttcaggctgttggtctcgggtgggcattcgcggattctgttttgcacaggttggcacctctctgggttggtgctcgaggactggagttcacttgggattatgttttgcaagggcttgaagccaatgcaaatctggtgttcacgatatctctagctgcactaggttcattaatgtggctacgcaagaacaagccgaagagtctgatccccatcatatacacatgtgcagtcatcattgcgacaatgccttcgatcacaagctatctaaagagagtcaatggatggcatttcccgaaaattgttgggtttgagctggcgacttctctggtaatggcttttatcagttgtcaactcttcatcctctgtcagagaccgtctttgtgagtgattccacttcccagcagagctttttgttaatgggaaactcttgcgacgcacttgccttgttttctgcaggactcggttccatggaaactttgatctttcccatctttatttgtagaagaatattgaaccatcctttcataacttattgatttgggaagtgtcattcgttagagcatagacttagaatcataattactaagagatgtttatctc

SEQ ID NO: 3419 - protein, 228 aa, Arabidopsis thaliana
  peptide (1)..(228): Ceres Seq. ID no. 12325472
  misc_feature (1)..(228): NCBI GI NO: 18401831 NR Description: expressed protein; protein id: At1g47640
  misc_feature (1)..(226): NCBI GI NO: 31415928 NR Description: unknown protein
  misc_feature (1)..(108): NCBI GI NO: 31415927 NR Description: unknown protein
  misc_feature (170)..(228): NCBI GI NO: 15220273 NR Description: cytochrome P450, putative; protein id: At1g47630.1
  misc_feature (109)..(146): NCBI GI NO: 15220273 NR Description: cytochrome P450, putative; protein id: At1g47630.1
  misc_feature (1)..(220): NCBI GI NO: 17556931 NR Description: Seven transmembrane domain protein like (25.0 kD)
  misc_feature (1)..(216): NCBI GI NO: 39593965 NR Description: Hypothetical protein CBG16516
  misc_feature (1)..(220): NCBI GI NO: 7511137 NR Description: hypothetical protein ZK418
  misc_feature (1)..(154): NCBI GI NO: 12841501 NR Description: unnamed protein product [Mus musculus]
  misc_feature (1)..(154): NCBI GI NO: 14249166 NR Description: seven transmembrane domain protein [Homo sapiens]
MTLFHFFNCAILTFGPHAVYYSATPLSEYDTLGTSVKAAVVYLATALVKLVCLATFLQVSETEVFDPYQEALKAMIGFIDVAGLYYALAQLTHRNISQNHKFQAVGLGWAFADSVLHRLAPLWVGARGLEFTWDYVLQGLEANANLVFTISLAALGSLMWLRKNKPKSLIPIIYTCAVIIATMPSITSYLKRVNGWHFPKIVGFELATSLVMAFISCQLFILCQRPSL

SEQ ID NO: 3420 - protein, 154 aa, Arabidopsis thaliana
  peptide (1)..(154): Ceres Seq. ID no. 12325473
  misc_feature (1)..(154): NCBI GI NO: 18401831 NR Description: expressed protein; protein id: At1g47640
  misc_feature (1)..(152): NCBI GI NO: 31415928 NR Description: unknown protein
  misc_feature (1)..(34): NCBI GI NO: 31415927 NR Description: unknown protein
  misc_feature (96)..(154): NCBI GI NO: 15220273 NR Description: cytochrome P450, putative; protein id: At1g47630.1
  misc_feature (35)..(72): NCBI GI NO: 15220273 NR Description: cytochrome P450, putative; protein id: At1g47630.1
  misc_feature (1)..(146): NCBI GI NO: 17556931 NR Description: Seven transmembrane domain protein like (25.0 kD)
  misc_feature (1)..(142): NCBI GI NO: 39593965 NR Description: Hypothetical protein CBG16516
  misc_feature (1)..(146): NCBI GI NO: 7511137 NR Description: hypothetical protein ZK418
  misc_feature (1)..(80): NCBI GI NO: 12841501 NR Description: unnamed protein product [Mus musculus]
  misc_feature (1)..(80): NCBI GI NO: 14249166 NR Description: seven transmembrane domain protein [Homo sapiens]
MIGFIDVAGLYYALAQLTHRNISQNHKFQAVGLGWAFADSVLHRLAPLWVGARGLEFTWDYVLQGLEANANLVFTISLAALGSLMWLRKNKPKSLIPIIYTCAVIIATMPSITSYLKRVNGWHFPKIVGFELATSLVMAFISCQLFILCQRPSL

SEQ ID NO: 3421 - DNA, 1306 bp, Arabidopsis thaliana
  misc_feature (1)..(1306): Ceres Seq. ID no. 12348661
aactgatcgtataatcattctcacggagacgagtgaccaaaacaaggtctcccgcttcttgcgaagattaaacgaatccatttagattttagaaaccacacaaaaaaatatgggtcggctcaagttcgcatgtccggttcttgagatcaatttaatctcagctcaagacttagcccctgtctcaagaaacatgaaaacgtattccgtcgcttggatcaacaccgatcctatgagaaaactcaccacgcgtgttgatcaatccaacagagctaaccctatatggaacgagaagttcgtgtttcgcgttaatgacaagattctcgatgttgacgcatcagcgattgtgattgagatatacgcagcggcttgggctaaagatgctcttgttggtactgtgaatgttcttctcagcgatctttttgctccttggtctggttttggtgatggtaacgacggtggtggtgggaataacaacatgaggcttgtgactcttcagattcgtcgtccttcagggaggctacaagggtttttacgtctcggtattgcacttcttgacggtggtcaacggagtatgcctttatctattgaggttttcgatggaagtcgaaaaggagagaggaatagtgttaaaagagatcaagaggcttcaagaatgatgcatcgccgtacgaatagcgatcaaacggatttaaccacgtctacgaatgattacggtgtgaaaacaggggttgttactggcaatggaggaggaggtggtggtggtggcggtattgttgttggtgcggatagtatggttaatggttcgctttgtagctctgatattggaccatcagcgtctgtggttgcggctgcgattgcgcaagggctttacaatagacagaaaacagcggttaaagcggctaacaaagaggacgcaagttcgatacttgaagggaaaacagagggaattgagtatagagttgaacggtggagagcagagaaaaatggcacggttggagcgggtggagcggctggatcaagcgatgattctagcgggaaaggaggagcgggaaggagaagaaggaggaggagaagaaaggagaaacaacaagggaggagaaacggtggaggagagggtaagaaagggttgttttcatgttttggaaacgtgtttggatgtgagatttcgataacatgtggcggtggaagcggcggagaaggagacagcacaaagaagagatataataacaataaagtagtaaatcttagtgctgtagacgaaacgtttagtcattctgcgacttgaaataagagaaagtgtttactt

SEQ ID NO: 3422 - protein, 391 aa, Arabidopsis thaliana
  peptide (1)..(391): Ceres Seq. ID no. 12348662
  misc_feature (11)..(97): Pfam Name: Pfam Description:  C2 domain
  misc_feature (1)..(391): NCBI GI NO: 21618096 NR Description: unknown [Arabidopsis thaliana]
  misc_feature (1)..(213): NCBI GI NO: 18396861 NR Description: expressed protein; protein id: At3g04360.1
  misc_feature (10)..(201): NCBI GI NO: 15225835 NR Description: hypothetical protein; protein id: At2g33320.1
  misc_feature (233)..(384): NCBI GI NO: 15225835 NR Description: hypothetical protein; protein id: At2g33320.1
  misc_feature (10)..(201): NCBI GI NO: 15219742 NR Description: hypothetical protein; protein id: At1g04540.1
  misc_feature (233)..(369): NCBI GI NO: 15219742 NR Description: hypothetical protein; protein id: At1g04540.1
  misc_feature (8)..(199): NCBI GI NO: 15225023 NR Description: hypothetical protein; protein id: At2g13350.1
  misc_feature (233)..(370): NCBI GI NO: 15225023 NR Description: hypothetical protein; protein id: At2g13350.1
  misc_feature (10)..(201): NCBI GI NO: 25372827 NR Description: hypothetical protein
  misc_feature (10)..(180): NCBI GI NO: 15234097 NR Description: hypothetical protein; protein id: At4g01200
MGRLKFACPVLEINLISAQDLAPVSRNMKTYSVAWINTDPMRKLTTRVDQSNRANPIWNEKFVFRVNDKILDVDASAIVIEIYAAAWAKDALVGTVNVLLSDLFAPWSGFGDGNDGGGGNNNMRLVTLQIRRPSGRLQGFLRLGIALLDGGQRSMPLSIEVFDGSRKGERNSVKRDQEASRMMHRRTNSDQTDLTTSTNDYGVKTGVVTGNGGGGGGGGGIVVGADSMVNGSLCSSDIGPSASVVAAAIAQGLYNRQKTAVKAANKEDASSILEGKTEGIEYRVERWRAEKNGTVGAGGAAGSSDDSSGKGGAGRRRRRRRRKEKQQGRRNGGGEGKKGLFSCFGNVFGCEISITCGGGSGGEGDSTKKRYNNNKVVNLSAVDETFSHSAT

SEQ ID NO: 3423 - protein, 364 aa, Arabidopsis thaliana
  peptide (1)..(364): Ceres Seq. ID no. 12348663
  misc_feature (1)..(70): Pfam Name: Pfam Description:  C2 domain
  misc_feature (1)..(364): NCBI GI NO: 21618096 NR Description: unknown [Arabidopsis thaliana]
  misc_feature (1)..(186): NCBI GI NO: 18396861 NR Description: expressed protein; protein id: At3g04360.1
  misc_feature (1)..(174): NCBI GI NO: 15225835 NR Description: hypothetical protein; protein id: At2g33320.1
  misc_feature (206)..(357): NCBI GI NO: 15225835 NR Description: hypothetical protein; protein id: At2g33320.1
  misc_feature (1)..(174): NCBI GI NO: 15219742 NR Description: hypothetical protein; protein id: At1g04540.1
  misc_feature (206)..(342): NCBI GI NO: 15219742 NR Description: hypothetical protein; protein id: At1g04540.1
  misc_feature (1)..(172): NCBI GI NO: 15225023 NR Description: hypothetical protein; protein id: At2g13350.1
  misc_feature (206)..(343): NCBI GI NO: 15225023 NR Description: hypothetical protein; protein id: At2g13350.1
  misc_feature (1)..(174): NCBI GI NO: 25372827 NR Description: hypothetical protein
  misc_feature (1)..(153): NCBI GI NO: 15234097 NR Description: hypothetical protein; protein id: At4g01200
MKTYSVAWINTDPMRKLTTRVDQSNRANPIWNEKFVFRVNDKILDVDASAIVIEIYAAAWAKDALVGTVNVLLSDLFAPWSGFGDGNDGGGGNNNMRLVTLQIRRPSGRLQGFLRLGIALLDGGQRSMPLSIEVFDGSRKGERNSVKRDQEASRMMHRRTNSDQTDLTTSTNDYGVKTGVVTGNGGGGGGGGGIVVGADSMVNGSLCSSDIGPSASVVAAAIAQGLYNRQKTAVKAANKEDASSILEGKTEGIEYRVERWRAEKNGTVGAGGAAGSSDDSSGKGGAGRRRRRRRRKEKQQGRRNGGGEGKKGLFSCFGNVFGCEISITCGGGSGGEGDSTKKRYNNNKVVNLSAVDETFSHSAT

SEQ ID NO: 3424 - protein, 351 aa, Arabidopsis thaliana
  peptide (1)..(351): Ceres Seq. ID no. 12348664
  misc_feature (1)..(57): Pfam Name: Pfam Description:  C2 domain
  misc_feature (1)..(351): NCBI GI NO: 21618096 NR Description: unknown [Arabidopsis thaliana]
  misc_feature (1)..(173): NCBI GI NO: 18396861 NR Description: expressed protein; protein id: At3g04360.1
  misc_feature (1)..(161): NCBI GI NO: 15225835 NR Description: hypothetical protein; protein id: At2g33320.1
  misc_feature (193)..(344): NCBI GI NO: 15225835 NR Description: hypothetical protein; protein id: At2g33320.1
  misc_feature (1)..(161): NCBI GI NO: 15219742 NR Description: hypothetical protein; protein id: At1g04540.1
  misc_feature (193)..(329): NCBI GI NO: 15219742 NR Description: hypothetical protein; protein id: At1g04540.1
  misc_feature (1)..(159): NCBI GI NO: 15225023 NR Description: hypothetical protein; protein id: At2g13350.1
  misc_feature (193)..(330): NCBI GI NO: 15225023 NR Description: hypothetical protein; protein id: At2g13350.1
  misc_feature (1)..(161): NCBI GI NO: 25372827 NR Description: hypothetical protein
  misc_feature (1)..(140): NCBI GI NO: 15234097 NR Description: hypothetical protein; protein id: At4g01200
MRKLTTRVDQSNRANPIWNEKFVFRVNDKILDVDASAIVIEIYAAAWAKDALVGTVNVLLSDLFAPWSGFGDGNDGGGGNNNMRLVTLQIRRPSGRLQGFLRLGIALLDGGQRSMPLSIEVFDGSRKGERNSVKRDQEASRMMHRRTNSDQTDLTTSTNDYGVKTGVVTGNGGGGGGGGGIVVGADSMVNGSLCSSDIGPSASVVAAAIAQGLYNRQKTAVKAANKEDASSILEGKTEGIEYRVERWRAEKNGTVGAGGAAGSSDDSSGKGGAGRRRRRRRRKEKQQGRRNGGGEGKKGLFSCFGNVFGCEISITCGGGSGGEGDSTKKRYNNNKVVNLSAVDETFSHSAT

SEQ ID NO: 3425 - DNA, 1768 bp, Arabidopsis thaliana
  misc_feature (1)..(1768): Ceres Seq. ID no. 13489028
atcttaatctgctttctcgacaaagaaaagcagagaaagagagacttgttatactaaactcaatctctggcttttagttttgttgtctctctccttcagtttccaggaaaaaatctctttctcattaagctgttatatagatctgtgttcatactcttcttccacaatctaacccaaaaaaaaataactctttatttctctctacaaatttcatttgttccattttctcaattttagaacttaagaaacccaaaaagcaaatttttagtacatttttaggtttaattaaagtaattaatttttgtgtgtttccatcaaaattccacttgttttctacagaaattttcaatctttttattattgtatctctctttaagacatgaactgtctgttcttgttcaaatcaaagaaacccagaaagcaacagaaagacaacaacaagaacaaaagaaaaggtaaagagttgttacaaaactcagctccagaactgacgaatcggagtgaaacgtcttcgtttaatctccagacaccaagatcgttgccttctccaagaagtatcaaagatttgtatacagagagagaacaaaatcttagggttttttcttacgaagaactcagtaaagccacttatgtgtttagcagaaagcttgtgatcggtgaaggtggatttggtattgtttataaaggaaagattctcagcaatggagattcttctgatcctccacttgtcgttgccatcaagaaactcaatcgacaaggtttacagggtcacaagcaatggctagcagaggttcagtttcttggagtagtgaatcatccgaacgttgtgaagctcataggttattgctcggaagacggcgagaccgggatcgagaggcttttggtttatgagtacatgtcgaatcgaagtttagaagaccatctcttccctcgtcgatcacacacattaccgtggaaaaaaagactcgagatcatgcttggtgctgctgaaggattgacttatttacatgatcttaaggtgatatatagagatttcaaatcctctaatgtgcttttagacgatcaattctgtccaaaattatcggactttgggcttgccagagaaggacctgatggcgacaatactcatgtcactaccgcaagagttggaacacacggctatgcggctccggaatacgtgcaaacaggtcatcttcggttaaagagcgacgtctatagcttcggtgttgtgctctacgagatcataaccggacgcagaaccattgagaggaacaagccagtggctgaacgaaggctattggattgggtcaaagagtatcctgctgatagtcaacgtttcagcatgatcgttgaccctcggttacgcaacaattatccagctgctggagctaggagtttggctaaattggctgatctttgcctgaaaaagaacgataaagagcgacctacgatggaaattgtagtggaaagattgaaaaagattatcgaagaatcggatagtgaagattatccgatggctacgactacgaccaaggaaagtagtcaggtaaggaggagacaagttgcaaaacctgagaaacaaagtttgagaggggttagtgtcagaggatgattttgagtttagaagtttttttgcaagtttatatattataaataagtttatgcaatttgttggtttattgtgagattagtagagaaaatgtatcttattgtgtgttttgtaaataaaattcaatacggtgaatgagaatcattgagatcaagtttt

SEQ ID NO: 3426 - protein, 410 aa, Arabidopsis thaliana
  peptide (1)..(410): Ceres Seq. ID no. 13489029
  misc_feature (86)..(365): Pfam Name: Pfam Description:  Protein kinase domain
  misc_feature (1)..(410): NCBI GI NO: 15238002 NR Description: protein kinase, putative [Arabidopsis thaliana]
  misc_feature (1)..(376): NCBI GI NO: 30684132 NR Description: protein kinase, putative [Arabidopsis thaliana]
  misc_feature (18)..(376): NCBI GI NO: 7434305 NR Description: probable protein kinase - Arabidopsis thaliana
  misc_feature (38)..(409): NCBI GI NO: 7488278 NR Description: probable protein kinase
  misc_feature (1)..(397): NCBI GI NO: 28416693 NR Description: At2g39110 [Arabidopsis thaliana]
  misc_feature (1)..(397): NCBI GI NO: 30687780 NR Description: protein kinase, putative [Arabidopsis thaliana]
  misc_feature (15)..(378): NCBI GI NO: 34901778 NR Description: protein serine/threonine kinase-like
  misc_feature (1)..(391): NCBI GI NO: 15232764 NR Description: protein kinase, putative [Arabidopsis thaliana]
  misc_feature (33)..(387): NCBI GI NO: 38345946 NR Description: OSJNBb0103I08.17
  misc_feature (1)..(397): NCBI GI NO: 25287613 NR Description: probable protein kinase
MNCLFLFKSKKPRKQQKDNNKNKRKGKELLQNSAPELTNRSETSSFNLQTPRSLPSPRSIKDLYTEREQNLRVFSYEELSKATYVFSRKLVIGEGGFGIVYKGKILSNGDSSDPPLVVAIKKLNRQGLQGHKQWLAEVQFLGVVNHPNVVKLIGYCSEDGETGIERLLVYEYMSNRSLEDHLFPRRSHTLPWKKRLEIMLGAAEGLTYLHDLKVIYRDFKSSNVLLDDQFCPKLSDFGLAREGPDGDNTHVTTARVGTHGYAAPEYVQTGHLRLKSDVYSFGVVLYEIITGRRTIERNKPVAERRLLDWVKEYPADSQRFSMIVDPRLRNNYPAAGARSLAKLADLCLKKNDKERPTMEIVVERLKKIIEESDSEDYPMATTTTKESSQVRRRQVAKPEKQSLRGVSVRG

SEQ ID NO: 3427 - protein, 238 aa, Arabidopsis thaliana
  peptide (1)..(238): Ceres Seq. ID no. 13489030
  misc_feature (1)..(193): Pfam Name: Pfam Description:  Protein kinase domain
  misc_feature (1)..(238): NCBI GI NO: 15238002 NR Description: protein kinase, putative [Arabidopsis thaliana]
  misc_feature (1)..(204): NCBI GI NO: 30684132 NR Description: protein kinase, putative [Arabidopsis thaliana]
  misc_feature (1)..(204): NCBI GI NO: 7434305 NR Description: probable protein kinase - Arabidopsis thaliana
  misc_feature (1)..(237): NCBI GI NO: 7488278 NR Description: probable protein kinase
  misc_feature (1)..(225): NCBI GI NO: 28416693 NR Description: At2g39110 [Arabidopsis thaliana]
  misc_feature (1)..(225): NCBI GI NO: 30687780 NR Description: protein kinase, putative [Arabidopsis thaliana]
  misc_feature (1)..(206): NCBI GI NO: 34901778 NR Description: protein serine/threonine kinase-like
  misc_feature (1)..(219): NCBI GI NO: 15232764 NR Description: protein kinase, putative [Arabidopsis thaliana]
  misc_feature (1)..(215): NCBI GI NO: 38345946 NR Description: OSJNBb0103I08.17
  misc_feature (1)..(225): NCBI GI NO: 25287613 NR Description: probable protein kinase
MSNRSLEDHLFPRRSHTLPWKKRLEIMLGAAEGLTYLHDLKVIYRDFKSSNVLLDDQFCPKLSDFGLAREGPDGDNTHVTTARVGTHGYAAPEYVQTGHLRLKSDVYSFGVVLYEIITGRRTIERNKPVAERRLLDWVKEYPADSQRFSMIVDPRLRNNYPAAGARSLAKLADLCLKKNDKERPTMEIVVERLKKIIEESDSEDYPMATTTTKESSQVRRRQVAKPEKQSLRGVSVRG

SEQ ID NO: 3428 - protein, 212 aa, Arabidopsis thaliana
  peptide (1)..(212): Ceres Seq. ID no. 13489031
  misc_feature (1)..(167): Pfam Name: Pfam Description:  Protein kinase domain
  misc_feature (1)..(212): NCBI GI NO: 15238002 NR Description: protein kinase, putative [Arabidopsis thaliana]
  misc_feature (1)..(178): NCBI GI NO: 30684132 NR Description: protein kinase, putative [Arabidopsis thaliana]
  misc_feature (1)..(178): NCBI GI NO: 7434305 NR Description: probable protein kinase - Arabidopsis thaliana
  misc_feature (1)..(211): NCBI GI NO: 7488278 NR Description: probable protein kinase
  misc_feature (1)..(199): NCBI GI NO: 28416693 NR Description: At2g39110 [Arabidopsis thaliana]
  misc_feature (1)..(199): NCBI GI NO: 30687780 NR Description: protein kinase, putative [Arabidopsis thaliana]
  misc_feature (1)..(180): NCBI GI NO: 34901778 NR Description: protein serine/threonine kinase-like
  misc_feature (1)..(193): NCBI GI NO: 15232764 NR Description: protein kinase, putative [Arabidopsis thaliana]
  misc_feature (1)..(189): NCBI GI NO: 38345946 NR Description: OSJNBb0103I08.17
  misc_feature (1)..(199): NCBI GI NO: 25287613 NR Description: probable protein kinase
MLGAAEGLTYLHDLKVIYRDFKSSNVLLDDQFCPKLSDFGLAREGPDGDNTHVTTARVGTHGYAAPEYVQTGHLRLKSDVYSFGVVLYEIITGRRTIERNKPVAERRLLDWVKEYPADSQRFSMIVDPRLRNNYPAAGARSLAKLADLCLKKNDKERPTMEIVVERLKKIIEESDSEDYPMATTTTKESSQVRRRQVAKPEKQSLRGVSVRG

SEQ ID NO: 3429 - DNA, 1307 bp, Arabidopsis thaliana; identical to SEQ ID NO: 1016
  misc_feature (1)..(1307): Ceres Seq. ID no. 12482093

SEQ ID NO: 3430 - protein, 255 aa, Arabidopsis thaliana; identical to SEQ ID NO: 1017
  peptide (1)..(255): Ceres Seq. ID no. 12482094
  misc_feature (179)..(253): Pfam Name: Pfam Description:  Biotin-requiring enzyme
  misc_feature (1)..(255): NCBI GI NO: 18417704 NR Description: biotin carboxyl carrier protein 2
  misc_feature (36)..(252): NCBI GI NO: 11357199 NR Description: biotin carboxyl carrier protein homolog T20K14.140
  misc_feature (1)..(255): NCBI GI NO: 2129789 NR Description: biotin carboxyl carrier protein precursor
  misc_feature (1)..(255): NCBI GI NO: 2129787 NR Description: biotin carboxyl carrier protein
  misc_feature (114)..(255): NCBI GI NO: 2129788 NR Description: biotin carboxyl carrier protein
  misc_feature (45)..(255): NCBI GI NO: 29169309 NR Description: biotin carboxylase carrier protein
  misc_feature (1)..(255): NCBI GI NO: 3334130 NR Description: Biotin carboxyl carrier protein of acetyl-CoA carboxylase
  misc_feature (15)..(255): NCBI GI NO: 1066348 NR Description: acetyl-CoA carboxylase biotin-containing subunit
  misc_feature (15)..(255): NCBI GI NO: 15237339 NR Description: biotin carboxyl carrier protein 1
  misc_feature (15)..(255): NCBI GI NO: 1588550 NR Description: Ac-CoA carboxylase

SEQ ID NO: 3431 - protein, 190 aa, Arabidopsis thaliana; identical to SEQ ID NO: 1018
  peptide (1)..(190): Ceres Seq. ID no. 12482095
  misc_feature (114)..(188): Pfam Name: Pfam Description:  Biotin-requiring enzyme
  misc_feature (1)..(190): NCBI GI NO: 18417704 NR Description: biotin carboxyl carrier protein 2
  misc_feature (1)..(187): NCBI GI NO: 11357199 NR Description: biotin carboxyl carrier protein homolog T20K14.140
  misc_feature (1)..(190): NCBI GI NO: 2129789 NR Description: biotin carboxyl carrier protein precursor
  misc_feature (1)..(190): NCBI GI NO: 2129787 NR Description: biotin carboxyl carrier protein
  misc_feature (49)..(190): NCBI GI NO: 2129788 NR Description: biotin carboxyl carrier protein
  misc_feature (1)..(190): NCBI GI NO: 29169309 NR Description: biotin carboxylase carrier protein
  misc_feature (1)..(190): NCBI GI NO: 3334130 NR Description: Biotin carboxyl carrier protein of acetyl-CoA carboxylase
  misc_feature (1)..(190): NCBI GI NO: 1066348 NR Description: acetyl-CoA carboxylase biotin-containing subunit
  misc_feature (1)..(190): NCBI GI NO: 15237339 NR Description: biotin carboxyl carrier protein 1
  misc_feature (1)..(190): NCBI GI NO: 1588550 NR Description: Ac-CoA carboxylase

SEQ ID NO: 3432 - protein, 184 aa, Arabidopsis thaliana; identical to SEQ ID NO: 1019
  peptide (1)..(184): Ceres Seq. ID no. 12482096
  misc_feature (108)..(182): Pfam Name: Pfam Description:  Biotin-requiring enzyme
  misc_feature (1)..(184): NCBI GI NO: 18417704 NR Description: biotin carboxyl carrier protein 2
  misc_feature (1)..(181): NCBI GI NO: 11357199 NR Description: biotin carboxyl carrier protein homolog T20K14.140
  misc_feature (1)..(184): NCBI GI NO: 2129789 NR Description: biotin carboxyl carrier protein precursor
  misc_feature (1)..(184): NCBI GI NO: 2129787 NR Description: biotin carboxyl carrier protein
  misc_feature (43)..(184): NCBI GI NO: 2129788 NR Description: biotin carboxyl carrier protein
  misc_feature (1)..(184): NCBI GI NO: 29169309 NR Description: biotin carboxylase carrier protein
  misc_feature (1)..(184): NCBI GI NO: 3334130 NR Description: Biotin carboxyl carrier protein of acetyl-CoA carboxylase
  misc_feature (1)..(184): NCBI GI NO: 1066348 NR Description: acetyl-CoA carboxylase biotin-containing subunit
  misc_feature (1)..(184): NCBI GI NO: 15237339 NR Description: biotin carboxyl carrier protein 1
  misc_feature (1)..(184): NCBI GI NO: 1588550 NR Description: Ac-CoA carboxylase

SEQ ID NO: 3433 - DNA, 1302 bp, Arabidopsis thaliana
  misc_feature (1)..(1302): Ceres Seq. ID no. 12327836
agagtttttcccattgaagaagatcgagtgaaattcgaagagcgaatcaaagaggaagaagaagaaggaggaggtatagcaatgggggtcgattattacaaggttcttcaggtggatcggaatgcgaaagacgacgacttgaagaaagcttatcgcaaactcgccatgaagtggcatccagacaagaaccctaacaacaaaaaagacgccgaagccaaattcaagcagatctctgaagcttacgatgttttgagtgatcctcaaaagagagccatctatgatcaatatggagaagaaggtctaacaagccaggctccgcctcccggagcaggcggcgggttttcggatggaggggcttcgttccggttcaacggtagaagcgcagatgatatcttctcggagttctttggcttcacaagaccatttggtgactcacgtggtgcaggtccctctaatgggttccggttcgaagaagacgttttctcgtcgaatgttgttccaccgaggaaagctgcccctattgagagacaacttccttgtagtttggaagatctctacaaaggagtcagtaagaagatgaagatctctcgggacgtcctcgattcaagcgggagacccacaacagttgaggagatcttgacgatagaaatcaagccagggtggaagaaagggacgaagattaccttcccggagaaaggaaacgagcagcgaggaatcataccatcagatcttgtattcatagttgatgagaagccgcatgctgtgttcaagcgagacgggaatgaccttgtgatgacacagaagatccctcttgtggaagccctcacgggatacactgctcaggtctcgactctggatggaagatcagtaacggttccaattaacaacgtgatcagcccttcttatgaagaggtggtgaaaggtgaaggcatgccaatccctaaagacccatcaaagaaagggaacttgagaatcaagttcactgttaagttcccatcgaggctaacaacagagcagaaatctggaatcaaacgaatgttttcgtcttcctagtctgtctctttctttcttactgctacgtttgattttcggttatgactaggtatgtggtagtgtgggtctttgtttgggagattgtgaggttcttgaacgatgtcgcattgagatttctcaacgtccttcagagcttttggtttgggtttggggttttacattttagcatattttttttttttcgttcttttaaatttgttattagattggggaaaaaataaaaaactaaataaagattctttgcttctc

SEQ ID NO: 3434 - protein, 350 aa, Arabidopsis thaliana
  peptide (1)..(350): Ceres Seq. ID no. 12327837
  misc_feature (225)..(347): Pfam Name: Pfam Description:  DnaJ C terminal region
  misc_feature (28)..(350): NCBI GI NO: 21618097 NR Description: putative heat shock protein [Arabidopsis thaliana]
  misc_feature (28)..(350): NCBI GI NO: 15231987 NR Description: putative heat shock protein; protein id: At3g08910
  misc_feature (28)..(348): NCBI GI NO: 15240968 NR Description: heat shock protein 40-like; protein id: At5g01390
  misc_feature (28)..(346): NCBI GI NO: 15225377 NR Description: putative heat shock protein; protein id: At2g20560
  misc_feature (119)..(346): NCBI GI NO: 15228294 NR Description: heat shock protein-like protein
  misc_feature (28)..(120): NCBI GI NO: 15228294 NR Description: heat shock protein-like protein
  misc_feature (28)..(350): NCBI GI NO: 15218901 NR Description: chaperone, putative; protein id: At1g59725.1
  misc_feature (108)..(349): NCBI GI NO: 11863723 NR Description: DnaJ like protein [Lycopersicon esculentum]
  misc_feature (108)..(349): NCBI GI NO: 6179940 NR Description: DnaJ-like protein [Nicotiana tabacum]
  misc_feature (28)..(346): NCBI GI NO: 34905276 NR Description: putative heat shock protein
RVFPIEEDRVKFEERIKEEEEEGGGIAMGVDYYKVLQVDRNAKDDDLKKAYRKLAMKWHPDKNPNNKKDAEAKFKQISEAYDVLSDPQKRAIYDQYGEEGLTSQAPPPGAGGGFSDGGASFRFNGRSADDIFSEFFGFTRPFGDSRGAGPSNGFRFEEDVFSSNVVPPRKAAPIERQLPCSLEDLYKGVSKKMKISRDVLDSSGRPTTVEEILTIEIKPGWKKGTKITFPEKGNEQRGIIPSDLVFIVDEKPHAVFKRDGNDLVMTQKIPLVEALTGYTAQVSTLDGRSVTVPINNVISPSYEEVVKGEGMPIPKDPSKKGNLRIKFTVKFPSRLTTEQKSGIKRMFSSS

SEQ ID NO: 3435 - protein, 323 aa, Arabidopsis thaliana
  peptide (1)..(323): Ceres Seq. ID no. 12327838
  misc_feature (198)..(320): Pfam Name: Pfam Description:  DnaJ C terminal region
  misc_feature (1)..(323): NCBI GI NO: 21618097 NR Description: putative heat shock protein [Arabidopsis thaliana]
  misc_feature (1)..(323): NCBI GI NO: 15231987 NR Description: putative heat shock protein; protein id: At3g08910
  misc_feature (1)..(321): NCBI GI NO: 15240968 NR Description: heat shock protein 40-like; protein id: At5g01390
  misc_feature (1)..(319): NCBI GI NO: 15225377 NR Description: putative heat shock protein; protein id: At2g20560
  misc_feature (92)..(319): NCBI GI NO: 15228294 NR Description: heat shock protein-like protein
  misc_feature (1)..(93): NCBI GI NO: 15228294 NR Description: heat shock protein-like protein
  misc_feature (1)..(323): NCBI GI NO: 15218901 NR Description: chaperone, putative; protein id: At1g59725.1
  misc_feature (81)..(322): NCBI GI NO: 11863723 NR Description: DnaJ like protein [Lycopersicon esculentum]
  misc_feature (81)..(322): NCBI GI NO: 6179940 NR Description: DnaJ-like protein [Nicotiana tabacum]
  misc_feature (1)..(319): NCBI GI NO: 34905276 NR Description: putative heat shock protein
MGVDYYKVLQVDRNAKDDDLKKAYRKLAMKWHPDKNPNNKKDAEAKFKQISEAYDVLSDPQKRAIYDQYGEEGLTSQAPPPGAGGGFSDGGASFRFNGRSADDIFSEFFGFTRPFGDSRGAGPSNGFRFEEDVFSSNVVPPRKAAPIERQLPCSLEDLYKGVSKKMKISRDVLDSSGRPTTVEEILTIEIKPGWKKGTKITFPEKGNEQRGIIPSDLVFIVDEKPHAVFKRDGNDLVMTQKIPLVEALTGYTAQVSTLDGRSVTVPINNVISPSYEEVVKGEGMPIPKDPSKKGNLRIKFTVKFPSRLTTEQKSGIKRMFSSS

SEQ ID NO: 3436 - protein, 295 aa, Arabidopsis thaliana
  peptide (1)..(295): Ceres Seq. ID no. 12327839
  misc_feature (170)..(292): Pfam Name: Pfam Description:  DnaJ C terminal region
  misc_feature (1)..(295): NCBI GI NO: 21618097 NR Description: putative heat shock protein [Arabidopsis thaliana]
  misc_feature (1)..(295): NCBI GI NO: 15231987 NR Description: putative heat shock protein; protein id: At3g08910
  misc_feature (1)..(293): NCBI GI NO: 15240968 NR Description: heat shock protein 40-like; protein id: At5g01390
  misc_feature (1)..(291): NCBI GI NO: 15225377 NR Description: putative heat shock protein; protein id: At2g20560
  misc_feature (64)..(291): NCBI GI NO: 15228294 NR Description: heat shock protein-like protein
  misc_feature (1)..(65): NCBI GI NO: 15228294 NR Description: heat shock protein-like protein
  misc_feature (1)..(295): NCBI GI NO: 15218901 NR Description: chaperone, putative; protein id: At1g59725.1
  misc_feature (53)..(294): NCBI GI NO: 11863723 NR Description: DnaJ like protein [Lycopersicon esculentum]
  misc_feature (53)..(294): NCBI GI NO: 6179940 NR Description: DnaJ-like protein [Nicotiana tabacum]
  misc_feature (1)..(291): NCBI GI NO: 34905276 NR Description: putative heat shock protein
MKWHPDKNPNNKKDAEAKFKQISEAYDVLSDPQKRAIYDQYGEEGLTSQAPPPGAGGGFSDGGASFRFNGRSADDIFSEFFGFTRPFGDSRGAGPSNGFRFEEDVFSSNVVPPRKAAPIERQLPCSLEDLYKGVSKKMKISRDVLDSSGRPTTVEEILTIEIKPGWKKGTKITFPEKGNEQRGIIPSDLVFIVDEKPHAVFKRDGNDLVMTQKIPLVEALTGYTAQVSTLDGRSVTVPINNVISPSYEEVVKGEGMPIPKDPSKKGNLRIKFTVKFPSRLTTEQKSGIKRMFSSS

SEQ ID NO: 3437 - DNA, 1188 bp, Arabidopsis thaliana
  misc_feature (1)..(1188): Ceres Seq. ID no. 12329150
aaatccagtttcgctcctccttgctctagctctgttatctgattcgtaaccattgatgaaatgcgagttctcgacgaaattgcagagtcaccatttctgatttcaccgctaaaccctaattcgacagccaatggatatagatgggtcgataagtgccatggattcttacataacacggttctcgttgcggcttctctcttcttcgtcgcttacttagcttacgaagcgaagaagagtctgtctaaactctcgaatcggagatcttatatcatgattgcttattatggttgtctttggcttgttagcttgctcaatcttgcttggtgctgtctccagggttgggaatgtactcctgggaaagaagttgtttggaatctgttaactttgttcacaacatctggaatgttgtttctggaagtaagcttggtggcttttctcttccaaggaaactatgcaagcggtgcagaagcattaactagaacgttcctaatctcgggttttattgttgctcttgatttgctttctcaaggcaatttttctctttggattggagtgccattgtttattgacaacaatgaaaatggaaaaacgttcaaatggggcttatggatcattcataagcttctactcactggcgtttatgggatggtgttcttgatgtacaactctaggtggagagaaaaattgcctgcaaggcctgcattctacaactacataatcatcatgttcgccttatacagcctttacctagttgcatctgcgtttaccgcaaacaacgcgcattttggtttctggttatatgggatcatgagtgtttgctaccacgcattataccttcctcttctttacataacgttcctcgcagactttttccaggaagaagatttgaacttggagaatgtatactactcagagatgaaggatgctggatttttcgactctgattgggaataggactaggataacaaacatcttcctcattttctcaatctgtaaatacacgttgggtaggatctcctagaagtcatggctgctttttccggctttggcgggttacattttagggtctagtcttttgtatgtctgtactttttcctcatgtttctttctcttttataaatccaaaatgtcttgtgaatctctttgttccttaagctgataatctaaaagaaagttttgtagtagtcc

SEQ ID NO: 3438 - protein, 297 aa, Arabidopsis thaliana
  peptide (1)..(297): Ceres Seq. ID no. 12329151
  misc_feature (1)..(297): NCBI GI NO: 14532472 NR Description: AT5g27210/T21B4_120 [Arabidopsis thaliana]
  misc_feature (1)..(297): NCBI GI NO: 15240462 NR Description: putative protein; protein id: At5g27210
  misc_feature (1)..(297): NCBI GI NO: 21618098 NR Description: unknown [Arabidopsis thaliana]
  misc_feature (1)..(297): NCBI GI NO: 18397089 NR Description: expressed protein; protein id: At3g05010
  misc_feature (1)..(297): NCBI GI NO: 12322847 NR Description: unknown protein; 15342-13483
  misc_feature (130)..(263): NCBI GI NO: 7485300 NR Description: hypothetical protein A_TM021B04
  misc_feature (148)..(297): NCBI GI NO: 21326119 NR Description: putative expressed protein [Sorghum bicolor]
  misc_feature (28)..(163): NCBI GI NO: 21326119 NR Description: putative expressed protein [Sorghum bicolor]
  misc_feature (40)..(274): NCBI GI NO: 6755859 NR Description: transmembrane domain protein regulated in adipocytes
  misc_feature (40)..(274): NCBI GI NO: 26354422 NR Description: unnamed protein product [Mus musculus]
MRVLDEIAESPFLISPLNPNSTANGYRWVDKCHGFLHNTVLVAASLFFVAYLAYEAKKSLSKLSNRRSYIMIAYYGCLWLVSLLNLAWCCLQGWECTPGKEVVWNLLTLFTTSGMLFLEVSLVAFLFQGNYASGAEALTRTFLISGFIVALDLLSQGNFSLWIGVPLFIDNNENGKTFKWGLWIIHKLLLTGVYGMVFLMYNSRWREKLPARPAFYNYIIIMFALYSLYLVASAFTANNAHFGFWLYGIMSVCYHALYLPLLYITFLADFFQEEDLNLENVYYSEMKDAGFFDSDWE

SEQ ID NO: 3439 - protein, 227 aa, Arabidopsis thaliana
  peptide (1)..(227): Ceres Seq. ID no. 12329152
  misc_feature (1)..(227): NCBI GI NO: 14532472 NR Description: AT5g27210/T21B4_120 [Arabidopsis thaliana]
  misc_feature (1)..(227): NCBI GI NO: 15240462 NR Description: putative protein; protein id: At5g27210
  misc_feature (1)..(227): NCBI GI NO: 21618098 NR Description: unknown [Arabidopsis thaliana]
  misc_feature (1)..(227): NCBI GI NO: 18397089 NR Description: expressed protein; protein id: At3g05010
  misc_feature (1)..(227): NCBI GI NO: 12322847 NR Description: unknown protein; 15342-13483
  misc_feature (60)..(193): NCBI GI NO: 7485300 NR Description: hypothetical protein A_TM021B04
  misc_feature (78)..(227): NCBI GI NO: 21326119 NR Description: putative expressed protein [Sorghum bicolor]
  misc_feature (1)..(93): NCBI GI NO: 21326119 NR Description: putative expressed protein [Sorghum bicolor]
  misc_feature (1)..(204): NCBI GI NO: 6755859 NR Description: transmembrane domain protein regulated in adipocytes
  misc_feature (1)..(204): NCBI GI NO: 26354422 NR Description: unnamed protein product [Mus musculus]
MIAYYGCLWLVSLLNLAWCCLQGWECTPGKEVVWNLLTLFTTSGMLFLEVSLVAFLFQGNYASGAEALTRTFLISGFIVALDLLSQGNFSLWIGVPLFIDNNENGKTFKWGLWIIHKLLLTGVYGMVFLMYNSRWREKLPARPAFYNYIIIMFALYSLYLVASAFTANNAHFGFWLYGIMSVCYHALYLPLLYITFLADFFQEEDLNLENVYYSEMKDAGFFDSDWE

SEQ ID NO: 3440 - protein, 183 aa, Arabidopsis thaliana
  peptide (1)..(183): Ceres Seq. ID no. 12329153
  misc_feature (1)..(183): NCBI GI NO: 14532472 NR Description: AT5g27210/T21B4_120 [Arabidopsis thaliana]
  misc_feature (1)..(183): NCBI GI NO: 15240462 NR Description: putative protein; protein id: At5g27210
  misc_feature (1)..(183): NCBI GI NO: 21618098 NR Description: unknown [Arabidopsis thaliana]
  misc_feature (1)..(183): NCBI GI NO: 18397089 NR Description: expressed protein; protein id: At3g05010
  misc_feature (1)..(183): NCBI GI NO: 12322847 NR Description: unknown protein; 15342-13483
  misc_feature (16)..(149): NCBI GI NO: 7485300 NR Description: hypothetical protein A_TM021B04
  misc_feature (34)..(183): NCBI GI NO: 21326119 NR Description: putative expressed protein [Sorghum bicolor]
  misc_feature (1)..(49): NCBI GI NO: 21326119 NR Description: putative expressed protein [Sorghum bicolor]
  misc_feature (1)..(160): NCBI GI NO: 6755859 NR Description: transmembrane domain protein regulated in adipocytes
  misc_feature (1)..(160): NCBI GI NO: 26354422 NR Description: unnamed protein product [Mus musculus]
MLFLEVSLVAFLFQGNYASGAEALTRTFLISGFIVALDLLSQGNFSLWIGVPLFIDNNENGKTFKWGLWIIHKLLLTGVYGMVFLMYNSRWREKLPARPAFYNYIIIMFALYSLYLVASAFTANNAHFGFWLYGIMSVCYHALYLPLLYITFLADFFQEEDLNLENVYYSEMKDAGFFDSDWE

SEQ ID NO: 3441 - DNA, 1213 bp, Arabidopsis thaliana
  misc_feature (1)..(1213): Ceres Seq. ID no. 12560121
  misc_feature (826)..(826): n is a, c, t, g, unknown, or other
aataatgtgttgcaaaagaggcaaagtatacaacgtgaaagtggtaggtctaccagatcccataccctcattttaatggcggagattacaagggaaagagacaactccaattcaaagctctgatttttccctttcacaattctttagctagttttatacttttcttcttcctttcatttgggttaagagaagccatggataccgagtttctccgaaccctagatcgtcagattcttttgggtgtcttcgttgctttcgtcgccgttggtgctggtgctgcttattttcttacatcctccaagaaacgcagagtgtgtttggatccagagaatttcaaggagttcaagcttgttaagagacatcagcttagtcacaatgtggccaagttcgtttttgaactcccaacttctacttctgtgttgggtcttcccattagacaacacatcaagttgcaggggaaaggatggtcaaggagaggatgttattaagccatacaccccgactacggttagactctgacgttggacgtttcgaacttgtcattaagatgtatccgcaaggacggatgtctcatcatttcagggagatgcgtgttggagaccatcttgccgaaaagggaccaaagggtaggttcaagatcaaccaggcagtttagggcatttggaatgcttgctggaggttcaggcatcactcccatgttccaagtggccagagcaattctagaaaacccaacagacaagacaaaggtgcatctcatttacgccaacgtcatatacgacgacattctcttgaaggaagaattggagggtcttactaccaattaccntgaacaatttaaaatcttctatgttttgaaccagcctccggaagtatgggatggtggtgttggatttgtatcaaaggaaatgattcagactcattgccctgcacctgcatctgatattcagatcctaagatgcggaccaccgccaatgaacaaggccatggctgcaaaccttgaagctctgggatactctccggagatgcaattccagttctgatctgaatatcttcttttggttgctctgaaacggaactcataataatttagttacaatcccaactacgagagttgtgtcttaactgagtgagagttgtatttctgttgtgtgtttgttagcccacttgaaagtttccattgattggtttacgaattggttagacattttggttc

SEQ ID NO: 3442 - protein, 124 aa, Arabidopsis thaliana
  peptide (1)..(124): Ceres Seq. ID no. 12560122
  misc_feature (1)..(110): Pfam Name: Pfam Description:  Oxidoreductase NAD-binding domain
  misc_feature (1)..(124): NCBI GI NO: 15238025 NR Description: NADH-cytochrome b5 reductase
  misc_feature (1)..(124): NCBI GI NO: 16648905 NR Description: NADH-cytochrome b5 reductase
  misc_feature (1)..(124): NCBI GI NO: 17221690 NR Description: cytochrome b5 reductase isoform II [Zea mays]
  misc_feature (1)..(124): NCBI GI NO: 4336205 NR Description: cytochrome b5 reductase [Zea mays]
  misc_feature (1)..(117): NCBI GI NO: 40739560 NR Description: hypothetical protein AN6366.2
  misc_feature (1)..(116): NCBI GI NO: 6070342 NR Description: NADH-cytochrome b5 reductase [Mortierella alpina]
  misc_feature (1)..(124): NCBI GI NO: 27712062 NR Description: similar to RIKEN cDNA 1500005G05
  misc_feature (1)..(124): NCBI GI NO: 21312524 NR Description: RIKEN cDNA 1500005G05 [Mus musculus]
  misc_feature (1)..(116): NCBI GI NO: 19075352 NR Description: putative nadh-cytochrome b5 reductase
  misc_feature (1)..(124): NCBI GI NO: 8052297 NR Description: NADH-cytochrome B5 reductase [Leishmania major]
  misc_feature (54)..(54): Xaa is any aa, unknown or other
MLAGGSGITPMFQVARAILENPTDKTKVHLIYANVIYDDILLKEELEGLTTNYXEQFKIFYVLNQPPEVWDGGVGFVSKEMIQTHCPAPASDIQILRCGPPPMNKAMAANLEALGYSPEMQFQF

SEQ ID NO: 3443 - protein, 114 aa, Arabidopsis thaliana
  peptide (1)..(114): Ceres Seq. ID no. 12560123
  misc_feature (1)..(100): Pfam Name: Pfam Description:  Oxidoreductase NAD-binding domain
  misc_feature (1)..(114): NCBI GI NO: 15238025 NR Description: NADH-cytochrome b5 reductase
  misc_feature (1)..(114): NCBI GI NO: 16648905 NR Description: NADH-cytochrome b5 reductase
  misc_feature (1)..(114): NCBI GI NO: 17221690 NR Description: cytochrome b5 reductase isoform II [Zea mays]
  misc_feature (1)..(114): NCBI GI NO: 4336205 NR Description: cytochrome b5 reductase [Zea mays]
  misc_feature (1)..(107): NCBI GI NO: 40739560 NR Description: hypothetical protein AN6366.2
  misc_feature (1)..(106): NCBI GI NO: 6070342 NR Description: NADH-cytochrome b5 reductase [Mortierella alpina]
  misc_feature (1)..(114): NCBI GI NO: 27712062 NR Description: similar to RIKEN cDNA 1500005G05
  misc_feature (1)..(114): NCBI GI NO: 21312524 NR Description: RIKEN cDNA 1500005G05 [Mus musculus]
  misc_feature (1)..(106): NCBI GI NO: 19075352 NR Description: putative nadh-cytochrome b5 reductase
  misc_feature (1)..(114): NCBI GI NO: 8052297 NR Description: NADH-cytochrome B5 reductase [Leishmania major]
  misc_feature (44)..(44): Xaa is any aa, unknown or other
MFQVARAILENPTDKTKVHLIYANVIYDDILLKEELEGLTTNYXEQFKIFYVLNQPPEVWDGGVGFVSKEMIQTHCPAPASDIQILRCGPPPMNKAMAANLEALGYSPEMQFQF

SEQ ID NO: 3444 - protein, 97 aa, Arabidopsis thaliana
  peptide (1)..(97): Ceres Seq. ID no. 12560124
  misc_feature (1)..(97): NCBI GI NO: 15238025 NR Description: NADH-cytochrome b5 reductase
  misc_feature (13)..(86): NCBI GI NO: 40739560 NR Description: hypothetical protein AN6366.2
  misc_feature (21)..(97): NCBI GI NO: 6070342 NR Description: NADH-cytochrome b5 reductase [Mortierella alpina]
  misc_feature (15)..(89): NCBI GI NO: 27712062 NR Description: similar to RIKEN cDNA 1500005G05
  misc_feature (15)..(89): NCBI GI NO: 21312524 NR Description: RIKEN cDNA 1500005G05 [Mus musculus]
  misc_feature (14)..(87): NCBI GI NO: 8052297 NR Description: NADH-cytochrome B5 reductase [Leishmania major]
  misc_feature (15)..(86): NCBI GI NO: 7706455 NR Description: cytochrome b5 reductase 1 (B5R.1) [Homo sapiens]
  misc_feature (42)..(97): NCBI GI NO: 40739937 NR Description: hypothetical protein AN3862.2
  misc_feature (43)..(86): NCBI GI NO: 1314248 NR Description: NADH:cytochrome c reductase
  misc_feature (38)..(97): NCBI GI NO: 28202143 NR Description: reductase [Gibberella zeae]
MDTEFLRTLDRQILLGVFVAFVAVGAGAAYFLTSSKKRRVCLDPENFKEFKLVKRHQLSHNVAKFVFELPTSTSVLGLPIRQHIKLQGKGWSRRGCY

SEQ ID NO: 3445 - DNA, 1280 bp, Arabidopsis thaliana; identical to SEQ ID NO: 2501
  misc_feature (1)..(1280): Ceres Seq. ID no. 12335829

SEQ ID NO: 3446 - protein, 252 aa, Arabidopsis thaliana; identical to SEQ ID NO: 2502
  peptide (1)..(252): Ceres Seq. ID no. 12335830
  misc_feature (197)..(247): Pfam Name: Pfam Description:  PHD-finger
  misc_feature (1)..(252): NCBI GI NO: 15223786 NR Description: nucleic acid binding protein
  misc_feature (34)..(252): NCBI GI NO: 25346630 NR Description: F14L17.29 protein - Arabidopsis thaliana
  misc_feature (1)..(32): NCBI GI NO: 25346630 NR Description: F14L17.29 protein - Arabidopsis thaliana
  misc_feature (1)..(248): NCBI GI NO: 21593407 NR Description: putative PHD-type zinc finger protein
  misc_feature (1)..(248): NCBI GI NO: 15226967 NR Description: putative PHD-type zinc finger protein
  misc_feature (1)..(248): NCBI GI NO: 7488751 NR Description: probable zinc finger protein - alfalfa (fragment)
  misc_feature (9)..(252): NCBI GI NO: 15229157 NR Description: nucleic acid binding protein-like
  misc_feature (9)..(248): NCBI GI NO: 15239624 NR Description: nucleic acid binding protein - like
  misc_feature (9)..(245): NCBI GI NO: 14192880 NR Description: Putative nucleic acid binding protein
  misc_feature (9)..(245): NCBI GI NO: 34394182 NR Description: putative nucleic acid binding protein

SEQ ID NO: 3447 - protein, 168 aa, Arabidopsis thaliana; identical to SEQ ID NO: 2503
  peptide (1)..(168): Ceres Seq. ID no. 12335831
  misc_feature (113)..(163): Pfam Name: Pfam Description:  PHD-finger
  misc_feature (1)..(168): NCBI GI NO: 15223786 NR Description: nucleic acid binding protein
  misc_feature (1)..(168): NCBI GI NO: 25346630 NR Description: F14L17.29 protein - Arabidopsis thaliana
  misc_feature (1)..(164): NCBI GI NO: 21593407 NR Description: putative PHD-type zinc finger protein
  misc_feature (1)..(164): NCBI GI NO: 15226967 NR Description: putative PHD-type zinc finger protein
  misc_feature (1)..(164): NCBI GI NO: 7488751 NR Description: probable zinc finger protein - alfalfa (fragment)
  misc_feature (1)..(168): NCBI GI NO: 15229157 NR Description: nucleic acid binding protein-like
  misc_feature (1)..(164): NCBI GI NO: 15239624 NR Description: nucleic acid binding protein - like
  misc_feature (1)..(161): NCBI GI NO: 14192880 NR Description: Putative nucleic acid binding protein
  misc_feature (1)..(161): NCBI GI NO: 34394182 NR Description: putative nucleic acid binding protein
  misc_feature (1)..(164): NCBI GI NO: 30687843 NR Description: zinc finger protein - like [Arabidopsis thaliana]

SEQ ID NO: 3448 - protein, 127 aa, Arabidopsis thaliana; identical to SEQ ID NO: 2504
  peptide (1)..(127): Ceres Seq. ID no. 12335832
  misc_feature (72)..(122): Pfam Name: Pfam Description:  PHD-finger
  misc_feature (1)..(127): NCBI GI NO: 15223786 NR Description: nucleic acid binding protein
  misc_feature (1)..(127): NCBI GI NO: 25346630 NR Description: F14L17.29 protein - Arabidopsis thaliana
  misc_feature (1)..(123): NCBI GI NO: 21593407 NR Description: putative PHD-type zinc finger protein
  misc_feature (1)..(123): NCBI GI NO: 15226967 NR Description: putative PHD-type zinc finger protein
  misc_feature (1)..(123): NCBI GI NO: 7488751 NR Description: probable zinc finger protein - alfalfa (fragment)
  misc_feature (1)..(127): NCBI GI NO: 15229157 NR Description: nucleic acid binding protein-like
  misc_feature (1)..(123): NCBI GI NO: 15239624 NR Description: nucleic acid binding protein - like
  misc_feature (1)..(120): NCBI GI NO: 14192880 NR Description: Putative nucleic acid binding protein
  misc_feature (1)..(120): NCBI GI NO: 34394182 NR Description: putative nucleic acid binding protein
  misc_feature (1)..(123): NCBI GI NO: 30687843 NR Description: zinc finger protein - like [Arabidopsis thaliana]

SEQ ID NO: 3449 - DNA, 1854 bp, Arabidopsis thaliana
  misc_feature (1)..(1854): Ceres Seq. ID no. 13653854
  misc_feature (1833)..(1833): n is a, c, t, g, unknown, or other
aaggaggggaaaatcagctttttggagaagaaaccaaagaaaacattcgaaaccctaaaatctccattagaattcgaaaatgacaaagaagagaaagctcgaaggagaagaatctaacgaagctgaagaaccgtcgcagaagctgaagcagacgccggaggaggagcagcagcttgtaattaaaaatcaggataatcaaggagacgttgaagaagttgaatacgaggaagtagaggaagagcaagaagaagaagtagaagatgatgacgatgaagatgatggtgatgagaatgaggatcagacggatgggaatcgtatagaggcggcggcgacgtctggatctggcgatcaagaagatgatgacgatgaaccaattcaggatctgttggaaccattttcaaaggagcaagttttgagtcttcttaaggaagcagcggagaagcatgttgatgtagccaatcgaattagggaagtagctgatgaggaccctgttcatcggaagatctttgtgcacggtcttggttgggatacgaaaacagagacgcttattgaagcttttaagcagtacggagagatcgaagattgcaaggctgtgtttgataagatctcagggaaatctaaaggttatggctttattctgtacaagtctcgttcaggtgctcgcaacgcactcaagcagcctcagaagaagattggtagtcgtatgacggcatgccaattagcttctaaaggacctgtctttggtggagctcctatcgctgctgcagctgtttcagcgcctgctcagcattcgaactcggagcatactcagaaaaagatttatgttagtaatgtcggagcagagcttgatccacagaagttgctgatgtttttctcaaagtttggagaaattgaagaaggtcctttgggtcttgataagtatactgggagacctaaaggtttctgtctctttgtttataagtcgtctgaaagcgccaagagggctttggaggagccacacaagacttttgaaggccatatcttgcattgccagaaagctatcgatggtcccaaaccgggcaagcagcagcagcatcaccataacccacacgcctataacaatcctcgttaccaaaggaatgataacaatggttatggtccgcctggaggtcatggacatctcatggctggtaacccagctgggatgggtggtccaacggcacaggtgataaacccggccattggacaggccttgacagctttattggcatctcagggagctggtttggcttttaatccggcaattggacaggctttgttgggttccttggggacagctgctggtgtaaacccagggaatggagttggaatgccaactggttacggtactcaagctatggcaccggggacaatgcctgggtacggtacacaacctgggttgcaaggcggttatcagactccgcaacctggtcaaggcggtacaagtagagggcaacatggtgtcgggccatacggtactccttacatgggtcactaaatgtatcatgtatccatccactcagatatcagaaatcagtgttttaatattggcctggtgattcttctcaagtttataaggagctgatgctaaatgaagtctttatgaaatgttactctttggtcactcctaaggccaaactcataaaaaaccttttaaggagttttagttttcatctacttgtttttcccaaactctctttatgaaattcctaaaaaaaactttgtactactattttcagtgtttatgtctctattttttcagttttctgaatatcccccttagactttcatttgtaaaactaaaaaagcgcaacnacgctccatgtgggtctttgc

SEQ ID NO: 3450 - protein, 478 aa, Arabidopsis thaliana
  peptide (1)..(478): Ceres Seq. ID no. 13653855
  misc_feature (247)..(317): Pfam Name: a.k.a. RRM, RBD, or RNP domain Pfam Description: RNA recognition motif.
  misc_feature (1)..(478): NCBI GI NO: 14596195 NR Description: putative protein [Arabidopsis thaliana]
  misc_feature (1)..(478): NCBI GI NO: 18410591 NR Description: RNA recognition motif (RRM)-containing protein
  misc_feature (1)..(477): NCBI GI NO: 15226817 NR Description: RNA recognition motif (RRM)-containing protein
  misc_feature (1)..(459): NCBI GI NO: 21666573 NR Description: RNA-binding protein AKIP1 [Vicia faba]
  misc_feature (15)..(466): NCBI GI NO: 34903096 NR Description: unnamed protein product
  misc_feature (47)..(478): NCBI GI NO: 34903096 NR Description: unnamed protein product
  misc_feature (81)..(449): NCBI GI NO: 21741248 NR Description: OSJNBb0034I13.9
  misc_feature (82)..(429): NCBI GI NO: 34912640 NR Description: P0410E01.24
  misc_feature (102)..(474): NCBI GI NO: 15232459 NR Description: RNA recognition motif (RRM)-containing protein
  misc_feature (82)..(244): NCBI GI NO: 21595502 NR Description: putative RNA-binding protein
MTKKRKLEGEESNEAEEPSQKLKQTPEEEQQLVIKNQDNQGDVEEVEYEEVEEEQEEEVEDDDDEDDGDENEDQTDGNRIEAAATSGSGDQEDDDDEPIQDLLEPFSKEQVLSLLKEAAEKHVDVANRIREVADEDPVHRKIFVHGLGWDTKTETLIEAFKQYGEIEDCKAVFDKISGKSKGYGFILYKSRSGARNALKQPQKKIGSRMTACQLASKGPVFGGAPIAAAAVSAPAQHSNSEHTQKKIYVSNVGAELDPQKLLMFFSKFGEIEEGPLGLDKYTGRPKGFCLFVYKSSESAKRALEEPHKTFEGHILHCQKAIDGPKPGKQQQHHHNPHAYNNPRYQRNDNNGYGPPGGHGHLMAGNPAGMGGPTAQVINPAIGQALTALLASQGAGLAFNPAIGQALLGSLGTAAGVNPGNGVGMPTGYGTQAMAPGTMPGYGTQPGLQGGYQTPQPGQGGTSRGQHGVGPYGTPYMGH

SEQ ID NO: 3451 - protein, 270 aa, Arabidopsis thaliana
  peptide (1)..(270): Ceres Seq. ID no. 13653856
  misc_feature (39)..(109): Pfam Name: a.k.a. RRM, RBD, or RNP domain Pfam Description: RNA recognition motif.
  misc_feature (1)..(270): NCBI GI NO: 14596195 NR Description: putative protein [Arabidopsis thaliana]
  misc_feature (1)..(270): NCBI GI NO: 18410591 NR Description: RNA recognition motif (RRM)-containing protein
  misc_feature (1)..(269): NCBI GI NO: 15226817 NR Description: RNA recognition motif (RRM)-containing protein
  misc_feature (1)..(251): NCBI GI NO: 21666573 NR Description: RNA-binding protein AKIP1 [Vicia faba]
  misc_feature (1)..(258): NCBI GI NO: 34903096 NR Description: unnamed protein product
  misc_feature (1)..(270): NCBI GI NO: 34903096 NR Description: unnamed protein product
  misc_feature (1)..(241): NCBI GI NO: 21741248 NR Description: OSJNBb0034I13.9
  misc_feature (1)..(221): NCBI GI NO: 34912640 NR Description: P0410E01.24
  misc_feature (1)..(266): NCBI GI NO: 15232459 NR Description: RNA recognition motif (RRM)-containing protein
  misc_feature (1)..(36): NCBI GI NO: 21595502 NR Description: putative RNA-binding protein
MTACQLASKGPVFGGAPIAAAAVSAPAQHSNSEHTQKKIYVSNVGAELDPQKLLMFFSKFGEIEEGPLGLDKYTGRPKGFCLFVYKSSESAKRALEEPHKTFEGHILHCQKAIDGPKPGKQQQHHHNPHAYNNPRYQRNDNNGYGPPGGHGHLMAGNPAGMGGPTAQVINPAIGQALTALLASQGAGLAFNPAIGQALLGSLGTAAGVNPGNGVGMPTGYGTQAMAPGTMPGYGTQPGLQGGYQTPQPGQGGTSRGQHGVGPYGTPYMGH

SEQ ID NO: 3452 - DNA, 1349 bp, Arabidopsis thaliana
  misc_feature (1)..(1349): Ceres Seq. ID no. 13488010
ttgtatgacataatgacgacgagacgaaggacaaaattgtcatttaaggaataaaagatattcttacaaagatattttttgctcgaaacgaggagaaaaaatcattagttatcgaaaatgctcacatgatgtgggcctaaccactaacccaattaaccacacatcttaatcagagtaagttgaaacaaatctttcagcaaaccctagaaaacatgtttaaccctagttattacgtcacacctgttctataaattaaggctgcgtcttatcacctcaaatcacataagtctctctcttacattttgaaaccctaatttctcaaaaaaaatgtctgaagttgagtaccggtgctttgtcggcggccttgcctgggccaccaatgatgaagatcttcaaaggacgttctcacagttcggcgacgttatcgattctaaggtctgttacacgagagatcggtctcccggatcgagccgattccgatgattctgatcctcgacggatctgattccgatctgtttctctgttacttgattcgattactgttactatgttctctctcgttctttgttactgttacttaatttgtcccatcggtacgttcatcttcctgcttctatgagctcggagatcgatcgatttttgctttattttcatcgctttgttttatattccttccacgattgtttttgctgatgtgtatgattttgtttgtttacagatcattaacgaccgcgagagtggaagatcaaggggattcggattcgtcaccttcaaggacgagaaagccatgagggatgcgattgaagagatgaacggtaaagagctcgatggacgtgtcatcaccgtgaacgaggctcagtcgagaggtagcggcggtggcggaggaggccgtggtggaagcggtggtggttaccgcagcggaggcggtggtggatactcaggaggcggtggcggcggatactcaggaggaggcggtggtggttacgagagacgtagcggaggttacggatctggtggaggcggtggtggccgaggatacggtggtggtggacgccgtgagggaggtggctacggaggcggtgatggtggaagttacggaggcggtggtggcggctggtaatcaaagatagagttgtttgcgtgctgctgctctgtttttggtttagatttggttttgtgtcaccacttctggtttggttatcgttcgtttggtttacttttttgatgaaacagtttcgtttaagtcttctttgtctggaacgaaatgttaattcgcgtgttgtttactaaatttataacgtttccttttaaccagattcgagattttccctcaaataatttatcttgtt

SEQ ID NO: 3453 - protein, 110 aa, Arabidopsis thaliana
  peptide (1)..(110): Ceres Seq. ID no. 13488011
  misc_feature (30)..(109): Pfam Name: Pfam Description:  Herpesvirus large structural phospho protein UL32
  misc_feature (1)..(110): NCBI GI NO: 15235002 NR Description: glycine-rich RNA-binding protein 8 (GRP8) (CCR1)
  misc_feature (1)..(110): NCBI GI NO: 1346180 NR Description: Glycine-rich RNA-binding protein GRP1A
  misc_feature (1)..(110): NCBI GI NO: 14334648 NR Description: putative glycine-rich protein
  misc_feature (1)..(106): NCBI GI NO: 20152613 NR Description: putative glycine rich protein [Rumex obtusifolius]
  misc_feature (1)..(110): NCBI GI NO: 2331131 NR Description: glycine-rich protein [Oryza sativa]
  misc_feature (1)..(104): NCBI GI NO: 7439987 NR Description: glycine-rich RNA-binding protein - rice
  misc_feature (1)..(108): NCBI GI NO: 7439982 NR Description: RNA-binding glycine-rich protein-1
  misc_feature (1)..(109): NCBI GI NO: 7439985 NR Description: glycine-rich RNA-binding protein - rice
  misc_feature (1)..(110): NCBI GI NO: 15226605 NR Description: glycine-rich RNA-binding protein (AtGRP7)
  misc_feature (1)..(108): NCBI GI NO: 18076086 NR Description: glycine-rich RNA-binding protein
MRDAIEEMNGKELDGRVITVNEAQSRGSGGGGGGRGGSGGGYRSGGGGGYSGGGGGGYSGGGGGGYERRSGGYGSGGGGGGRGYGGGGRREGGGYGGGDGGSYGGGGGGW

SEQ ID NO: 3454 - protein, 103 aa, Arabidopsis thaliana
  peptide (1)..(103): Ceres Seq. ID no. 13488012
  misc_feature (23)..(102): Pfam Name: Pfam Description:  Herpesvirus large structural phospho protein UL32
  misc_feature (1)..(103): NCBI GI NO: 15235002 NR Description: glycine-rich RNA-binding protein 8 (GRP8) (CCR1)
  misc_feature (1)..(103): NCBI GI NO: 1346180 NR Description: Glycine-rich RNA-binding protein GRP1A
  misc_feature (1)..(103): NCBI GI NO: 14334648 NR Description: putative glycine-rich protein
  misc_feature (1)..(99): NCBI GI NO: 20152613 NR Description: putative glycine rich protein [Rumex obtusifolius]
  misc_feature (1)..(103): NCBI GI NO: 2331131 NR Description: glycine-rich protein [Oryza sativa]
  misc_feature (1)..(97): NCBI GI NO: 7439987 NR Description: glycine-rich RNA-binding protein - rice
  misc_feature (1)..(101): NCBI GI NO: 7439982 NR Description: RNA-binding glycine-rich protein-1
  misc_feature (1)..(102): NCBI GI NO: 7439985 NR Description: glycine-rich RNA-binding protein - rice
  misc_feature (1)..(103): NCBI GI NO: 15226605 NR Description: glycine-rich RNA-binding protein (AtGRP7)
  misc_feature (1)..(101): NCBI GI NO: 18076086 NR Description: glycine-rich RNA-binding protein
MNGKELDGRVITVNEAQSRGSGGGGGGRGGSGGGYRSGGGGGYSGGGGGGYSGGGGGGYERRSGGYGSGGGGGGRGYGGGGRREGGGYGGGDGGSYGGGGGGW

SEQ ID NO: 3455 - DNA, 767 bp, Arabidopsis thaliana; identical to SEQ ID NO: 3358
  misc_feature (1)..(767): Ceres Seq. ID no. 13497708

SEQ ID NO: 3456 - protein, 193 aa, Arabidopsis thaliana; identical to SEQ ID NO: 3359
  peptide (1)..(193): Ceres Seq. ID no. 13497709
  misc_feature (1)..(193): NCBI GI NO: 21618071 NR Description: light-induced protein-like protein
  misc_feature (1)..(193): NCBI GI NO: 18414282 NR Description: expressed protein [Arabidopsis thaliana]
  misc_feature (1)..(192): NCBI GI NO: 7488128 NR Description: probable light induced protein - Arabidopsis thaliana
  misc_feature (8)..(193): NCBI GI NO: 25315849 NR Description: early light-inducable protein
  misc_feature (1)..(193): NCBI GI NO: 15228866 NR Description: early light-induced protein [Arabidopsis thaliana]
  misc_feature (1)..(193): NCBI GI NO: 38123375 NR Description: ELIP [Brassica rapa subsp. pekinensis]
  misc_feature (1)..(193): NCBI GI NO: 7447856 NR Description: early light-inducible protein precursor - soybean
  misc_feature (50)..(193): NCBI GI NO: 16930757 NR Description: early light-induced protein-like protein
  misc_feature (1)..(190): NCBI GI NO: 28194659 NR Description: putative early light induced protein
  misc_feature (5)..(193): NCBI GI NO: 14487954 NR Description: early light inducible protein [Medicago sativa]

SEQ ID NO: 3457 - protein, 186 aa, Arabidopsis thaliana; identical to SEQ ID NO: 3360
  peptide (1)..(186): Ceres Seq. ID no. 13497710
  misc_feature (1)..(186): NCBI GI NO: 21618071 NR Description: light-induced protein-like protein
  misc_feature (1)..(186): NCBI GI NO: 18414282 NR Description: expressed protein [Arabidopsis thaliana]
  misc_feature (1)..(185): NCBI GI NO: 7488128 NR Description: probable light induced protein - Arabidopsis thaliana
  misc_feature (1)..(186): NCBI GI NO: 25315849 NR Description: early light-inducable protein
  misc_feature (1)..(186): NCBI GI NO: 15228866 NR Description: early light-induced protein [Arabidopsis thaliana]
  misc_feature (1)..(186): NCBI GI NO: 38123375 NR Description: ELIP [Brassica rapa subsp. pekinensis]
  misc_feature (1)..(186): NCBI GI NO: 7447856 NR Description: early light-inducible protein precursor - soybean
  misc_feature (43)..(186): NCBI GI NO: 16930757 NR Description: early light-induced protein-like protein
  misc_feature (1)..(183): NCBI GI NO: 28194659 NR Description: putative early light induced protein
  misc_feature (1)..(186): NCBI GI NO: 14487954 NR Description: early light inducible protein [Medicago sativa]

SEQ ID NO: 3458 - protein, 151 aa, Arabidopsis thaliana; identical to SEQ ID NO: 3361
  peptide (1)..(151): Ceres Seq. ID no. 13497711
  misc_feature (1)..(151): NCBI GI NO: 21618071 NR Description: light-induced protein-like protein
  misc_feature (1)..(151): NCBI GI NO: 18414282 NR Description: expressed protein [Arabidopsis thaliana]
  misc_feature (1)..(150): NCBI GI NO: 7488128 NR Description: probable light induced protein - Arabidopsis thaliana
  misc_feature (1)..(151): NCBI GI NO: 25315849 NR Description: early light-inducable protein
  misc_feature (1)..(151): NCBI GI NO: 15228866 NR Description: early light-induced protein [Arabidopsis thaliana]
  misc_feature (1)..(151): NCBI GI NO: 38123375 NR Description: ELIP [Brassica rapa subsp. pekinensis]
  misc_feature (1)..(151): NCBI GI NO: 7447856 NR Description: early light-inducible protein precursor - soybean
  misc_feature (8)..(151): NCBI GI NO: 16930757 NR Description: early light-induced protein-like protein
  misc_feature (1)..(148): NCBI GI NO: 28194659 NR Description: putative early light induced protein
  misc_feature (1)..(151): NCBI GI NO: 14487954 NR Description: early light inducible protein [Medicago sativa]

SEQ ID NO: 3459 - DNA, 697 bp, Arabidopsis thaliana
  misc_feature (1)..(697): Ceres Seq. ID no. 12421143
agatcaaatcagcaggaaaatcaagaaccaaaagtctcccgaaaagcaacgaacaatgtctctcattccaagcatttttggaggacgcagatcaaacgtctttgatccgttctcgcaagacttatgggatccattcgaaggattcttcacgccatcttctgcgttggcaaacgcttcaaccgctcgtgatgtggcagcgtttacaaacgcaagagtggattggaaggaaacgccggaggcacatgtgttcaaagcggacttgccaggcctgaagaaggaagaagtcaaggttgaggttgaagacaagaacgttctgcagattagcggagagaggagcaaggagaacgaagagaagaacgataagtggcaccgtgtggagagagctagtgggaagtttatgagaaggtttaggttaccggagaatgcaaagatggaagaagtgaaggcaacaatggagaatggtgtgcttacggttgtggttccgaaagcgcctgagaagaagcctcaagtcaagtccatcgatatctccggggctaattgaatatgaagatgaagatgaaatatttggtgtgtcaaataaaaagcttgtgtgcttaagtttgtgtttttttcttggcttgttgtgttatgaatttgtggctttttctaatattaaatgaatgtaagatctcattataatgaataaacaaatgtttcc

SEQ ID NO: 3460 - protein, 179 aa, Arabidopsis thaliana
  peptide (1)..(179): Ceres Seq. ID no. 12421144
  misc_feature (19)..(179): NCBI GI NO: 15238509 NR Description: heat shock protein 18; protein id: At5g59720
  misc_feature (19)..(179): NCBI GI NO: 21618106 NR Description: heat shock protein 18 [Arabidopsis thaliana]
  misc_feature (18)..(177): NCBI GI NO: 8671873 NR Description: Contains similarity to 17
  misc_feature (19)..(177): NCBI GI NO: 15220832 NR Description: 17
  misc_feature (19)..(177): NCBI GI NO: 7441319 NR Description: heat-shock protein 17
  misc_feature (19)..(177): NCBI GI NO: 81639 NR Description: heat shock protein 17 - Arabidopsis thaliana
  misc_feature (19)..(177): NCBI GI NO: 15231372 NR Description: heat shock protein 17; protein id: At3g46230
  misc_feature (19)..(177): NCBI GI NO: 8250119 NR Description: HSP17.7-a protein [Brassica oleracea]
  misc_feature (19)..(177): NCBI GI NO: 15294150 NR Description: AT3g46230/F12M12_200 [Arabidopsis thaliana]
  misc_feature (19)..(177): NCBI GI NO: 11276924 NR Description: heat-shock protein, low molecular weight
DQISRKIKNQKSPEKQRTMSLIPSIFGGRRSNVFDPFSQDLWDPFEGFFTPSSALANASTARDVAAFTNARVDWKETPEAHVFKADLPGLKKEEVKVEVEDKNVLQISGERSKENEEKNDKWHRVERASGKFMRRFRLPENAKMEEVKATMENGVLTVVVPKAPEKKPQVKSIDISGAN

SEQ ID NO: 3461 - protein, 161 aa, Arabidopsis thaliana
  peptide (1)..(161): Ceres Seq. ID no. 12421145
  misc_feature (1)..(161): NCBI GI NO: 15238509 NR Description: heat shock protein 18; protein id: At5g59720
  misc_feature (1)..(161): NCBI GI NO: 21618106 NR Description: heat shock protein 18 [Arabidopsis thaliana]
  misc_feature (1)..(159): NCBI GI NO: 8671873 NR Description: Contains similarity to 17
  misc_feature (1)..(159): NCBI GI NO: 15220832 NR Description: 17
  misc_feature (1)..(159): NCBI GI NO: 7441319 NR Description: heat-shock protein 17
  misc_feature (1)..(159): NCBI GI NO: 81639 NR Description: heat shock protein 17 - Arabidopsis thaliana
  misc_feature (1)..(159): NCBI GI NO: 15231372 NR Description: heat shock protein 17; protein id: At3g46230
  misc_feature (1)..(159): NCBI GI NO: 8250119 NR Description: HSP17.7-a protein [Brassica oleracea]
  misc_feature (1)..(159): NCBI GI NO: 15294150 NR Description: AT3g46230/F12M12_200 [Arabidopsis thaliana]
  misc_feature (1)..(159): NCBI GI NO: 11276924 NR Description: heat-shock protein, low molecular weight
MSLIPSIFGGRRSNVFDPFSQDLWDPFEGFFTPSSALANASTARDVAAFTNARVDWKETPEAHVFKADLPGLKKEEVKVEVEDKNVLQISGERSKENEEKNDKWHRVERASGKFMRRFRLPENAKMEEVKATMENGVLTVVVPKAPEKKPQVKSIDISGAN

SEQ ID NO: 3462 - protein, 89 aa, Arabidopsis thaliana
  peptide (1)..(89): Ceres Seq. ID no. 12421146
IKSAGKSRTKSLPKSNEQCLSFQAFLEDADQTSLIRSRKTYGIHSKDSSRHLLRWQTLQPLVMWQRLQTQEWIGRKRRRHMCSKRTCQA

SEQ ID NO: 3463 - DNA, 678 bp, Arabidopsis thaliana
  misc_feature (1)..(678): Ceres Seq. ID no. 12326799
gacgcagatcatcatcagattcttgtctctctctgttatctgagtgataagaagtattttcagtgcttgaggatctgcaaaagatatccatctgcggtttaacaatggttctattacagttggatccattcctcaatgaactcacgagcatgtttgagaaaagcaaagagaagggttctgtgtgggttactttgaaaagatcatctctcaagtctaaggtgcagaagaggaaactgagctcagttggagaatccattgaatacagatgccttattcgagcaaccgatggaaagaaaactgtttctacttcggttggtgctaaggatcaccagagatttcaagcatcatatgccaccattcttaaggcccacatgactgctttgaagaagagggaaaggaaagaccggaagaaatcgacagaggcagagaagaaagaaagcacttcaaccactaaatctaagaaactttgatttctccttttgtgtttctcattgatttgcaattgctgcttaagagttgaattttgaaagctattgaaagatctaaaagattttgacttgtgttataatagagattttggtttgcatttgcttttccctcgagaatgttcatcgtgtataaataaaccaattccatacaaatgtacgaacataaatccaattcaaagaaactgattct

SEQ ID NO: 3464 - protein, 121 aa, Arabidopsis thaliana
  peptide (1)..(121): Ceres Seq. ID no. 12326800
  misc_feature (4)..(93): Pfam Name: Pfam Description:  Signal recognition particle 14kD protein
  misc_feature (1)..(121): NCBI GI NO: 15224325 NR Description: putative signal recognition particle protein 14kD
  misc_feature (1)..(121): NCBI GI NO: 6175053 NR Description: Signal recognition particle 14 kDa protein (SRP14)
  misc_feature (1)..(120): NCBI GI NO: 6094345 NR Description: SIGNAL RECOGNITION PARTICLE 14 KD PROTEIN (SRP14)
  misc_feature (1)..(111): NCBI GI NO: 5107800 NR Description: Signal Recognition Particle Alu Rna Binding Heterodimer
  misc_feature (1)..(108): NCBI GI NO: 6678133 NR Description: signal recognition particle
  misc_feature (1)..(107): NCBI GI NO: 1082198 NR Description: Alu RNA-binding protein - human
  misc_feature (1)..(107): NCBI GI NO: 586035 NR Description: Signal recognition particle 14 kDa protein
  misc_feature (1)..(107): NCBI GI NO: 31543653 NR Description: signal recognition particle 14kDa
  misc_feature (1)..(108): NCBI GI NO: 2507409 NR Description: SIGNAL RECOGNITION PARTICLE 14 KD PROTEIN (SRP14)
  misc_feature (2)..(106): NCBI GI NO: 11513833 NR Description: Chain B
MVLLQLDPFLNELTSMFEKSKEKGSVWVTLKRSSLKSKVQKRKLSSVGESIEYRCLIRATDGKKTVSTSVGAKDHQRFQASYATILKAHMTALKKRERKDRKKSTEAEKKESTSTTKSKKL

SEQ ID NO: 3465 - protein, 106 aa, Arabidopsis thaliana
  peptide (1)..(106): Ceres Seq. ID no. 12326801
  misc_feature (1)..(78): Pfam Name: Pfam Description:  Signal recognition particle 14kD protein
  misc_feature (1)..(106): NCBI GI NO: 15224325 NR Description: putative signal recognition particle protein 14kD
  misc_feature (1)..(106): NCBI GI NO: 6175053 NR Description: Signal recognition particle 14 kDa protein (SRP14)
  misc_feature (1)..(105): NCBI GI NO: 6094345 NR Description: SIGNAL RECOGNITION PARTICLE 14 KD PROTEIN (SRP14)
  misc_feature (1)..(96): NCBI GI NO: 5107800 NR Description: Signal Recognition Particle Alu Rna Binding Heterodimer
  misc_feature (1)..(93): NCBI GI NO: 6678133 NR Description: signal recognition particle
  misc_feature (1)..(92): NCBI GI NO: 1082198 NR Description: Alu RNA-binding protein - human
  misc_feature (1)..(92): NCBI GI NO: 586035 NR Description: Signal recognition particle 14 kDa protein
  misc_feature (1)..(92): NCBI GI NO: 31543653 NR Description: signal recognition particle 14kDa
  misc_feature (1)..(93): NCBI GI NO: 2507409 NR Description: SIGNAL RECOGNITION PARTICLE 14 KD PROTEIN (SRP14)
  misc_feature (1)..(91): NCBI GI NO: 11513833 NR Description: Chain B
MFEKSKEKGSVWVTLKRSSLKSKVQKRKLSSVGESIEYRCLIRATDGKKTVSTSVGAKDHQRFQASYATILKAHMTALKKRERKDRKKSTEAEKKESTSTTKSKKL

SEQ ID NO: 3466 - DNA, 805 bp, Arabidopsis thaliana
  misc_feature (1)..(805): Ceres Seq. ID no. 13592732
acttaaacgtcgccgtttccgtgttcgaagcttcgtgaaaatcttcaatctcgcgagagagaagaagaagaagaagaagaagaagaagcgatgttcctggtggattggttctatggagttctggcaactctgggactatggcagaaagaagcgaagattctgtttctaggtctcgacaacgccggcaaaaccaccttgcttcacatgttaaaggacgagagactggtccagcatcagccgacacagcatccgacatcgaaagagcttagtatcggcaaaatcaagttcaaagccttcgatttgggaggtcatcagattgctcgtagagtctggaaggactattacgctaaggttgatgcagtggtatacctagttgatgcatatgacaaagagaggtttgcagaatcaaagaaagagcttgacgctcttctctctgatgaatccctagcaaatgtccctttcctcatccttggaaacaaaatcgacattccgtacgctgcatcagaagacgagctgcgttatcatctaggcctcaccagtttcaccactgggaaaggtaaagtgaatctagcaggaacaaatgttcgtcctcttgaggtgttcatgtgcagcattgtcagaaagatgggttacggcgaaggatttaaatgggtttctcaatatatcgactagatcaatcatatttaagtcttatctatctatactgtgtgattggtatctgtacgtgttataacctaatgtataattacgattaatgtgtgtatacaacaagatttgacggcttttaaattatcaattttgtgtt

SEQ ID NO: 3467 - protein, 193 aa, Arabidopsis thaliana
  peptide (1)..(193): Ceres Seq. ID no. 13592733
  misc_feature (5)..(192): Pfam Name: Pfam Description:  ADP-ribosylation factor family
  misc_feature (1)..(193): NCBI GI NO: 15228793 NR Description: GTP-binding protein SAR1A, putative
  misc_feature (1)..(192): NCBI GI NO: 15235226 NR Description: GTP-binding protein SAR1A [Arabidopsis thaliana]
  misc_feature (1)..(192): NCBI GI NO: 3334321 NR Description: GTP-binding protein SAR1A
  misc_feature (1)..(193): NCBI GI NO: 25294172 NR Description: ras-like small monomeric GTP-binding protein
  misc_feature (1)..(192): NCBI GI NO: 25294173 NR Description: small GTP-binding protein Sar1BNt
  misc_feature (1)..(193): NCBI GI NO: 15223516 NR Description: GTP-binding protein SAR1B [Arabidopsis thaliana]
  misc_feature (1)..(192): NCBI GI NO: 34894960 NR Description: putative GTP-binding protein
  misc_feature (1)..(192): NCBI GI NO: 1549222 NR Description: NtSar1 protein [Nicotiana tabacum]
  misc_feature (1)..(193): NCBI GI NO: 3334322 NR Description: GTP-binding protein SAR1B
  misc_feature (1)..(192): NCBI GI NO: 34902852 NR Description: unnamed protein product
MFLVDWFYGVLATLGLWQKEAKILFLGLDNAGKTTLLHMLKDERLVQHQPTQHPTSKELSIGKIKFKAFDLGGHQIARRVWKDYYAKVDAVVYLVDAYDKERFAESKKELDALLSDESLANVPFLILGNKIDIPYAASEDELRYHLGLTSFTTGKGKVNLAGTNVRPLEVFMCSIVRKMGYGEGFKWVSQYID

SEQ ID NO: 3468 - protein, 155 aa, Arabidopsis thaliana
  peptide (1)..(155): Ceres Seq. ID no. 13592734
  misc_feature (1)..(154): Pfam Name: Pfam Description:  ADP-ribosylation factor family
  misc_feature (1)..(155): NCBI GI NO: 15228793 NR Description: GTP-binding protein SAR1A, putative
  misc_feature (1)..(154): NCBI GI NO: 15235226 NR Description: GTP-binding protein SAR1A [Arabidopsis thaliana]
  misc_feature (1)..(154): NCBI GI NO: 3334321 NR Description: GTP-binding protein SAR1A
  misc_feature (1)..(155): NCBI GI NO: 25294172 NR Description: ras-like small monomeric GTP-binding protein
  misc_feature (1)..(154): NCBI GI NO: 25294173 NR Description: small GTP-binding protein Sar1BNt
  misc_feature (1)..(155): NCBI GI NO: 15223516 NR Description: GTP-binding protein SAR1B [Arabidopsis thaliana]
  misc_feature (1)..(154): NCBI GI NO: 34894960 NR Description: putative GTP-binding protein
  misc_feature (1)..(154): NCBI GI NO: 1549222 NR Description: NtSar1 protein [Nicotiana tabacum]
  misc_feature (1)..(155): NCBI GI NO: 3334322 NR Description: GTP-binding protein SAR1B
  misc_feature (1)..(154): NCBI GI NO: 34902852 NR Description: unnamed protein product
MLKDERLVQHQPTQHPTSKELSIGKIKFKAFDLGGHQIARRVWKDYYAKVDAVVYLVDAYDKERFAESKKELDALLSDESLANVPFLILGNKIDIPYAASEDELRYHLGLTSFTTGKGKVNLAGTNVRPLEVFMCSIVRKMGYGEGFKWVSQYID

SEQ ID NO: 3469 - DNA, 664 bp, Arabidopsis thaliana
  misc_feature (1)..(664): Ceres Seq. ID no. 12738931
cccactctgtgcattaggtttcattttagcggcagacgagagagctaaagcaaggagcaaccctaaccatggcgactcaaccagctactgaatctgtgcaatgcttcggaaggaagaagaccgcagtggccgtcactcactgcaagcgtggatctggtttgatcaagctcaacggttgcccaatcgagcttttccagcctgagatcctccgattcaagatcttcgagccggttcttctcctcggaaagcaccgtttcgctggtgtgaacatgaggatccgtgtcaacggtggtggtcacacatcccaggtttacgccatccgtcagagtatcgcgaaggctcttgttgcgtactaccagaagtatgtggatgagcagtcgaagaaggagattaaggatatcttggtgaggtatgataggactctgcttgtggcggatccgaggaggtgtgagccgaagaagtttggtggtcgtggtgctcgttctcgttaccagaagagttaccgttaaacaaagctggtttgtgttttgtttttcaatttggaatcatcgtaaggtttttgtgggagtatggacttgtgagactctttagattttataatttctgctttattatgcttgttggattatggtgattctccaagaaacttatgttttgttatgtc

SEQ ID NO: 3470 - protein, 146 aa, Arabidopsis thaliana
  peptide (1)..(146): Ceres Seq. ID no. 12738932
  misc_feature (14)..(146): Pfam Name: Pfam Description:  Ribosomal protein S9/S16
  misc_feature (1)..(146): NCBI GI NO: 15238809 NR Description: 40S RIBOSOMAL PROTEIN S16; protein id: At5g18380
  misc_feature (1)..(146): NCBI GI NO: 15226676 NR Description: 40S ribosomal protein S16; protein id: At2g09990
  misc_feature (2)..(146): NCBI GI NO: 6984222 NR Description: 40S ribosomal protein S16 [Euphorbia esula]
  misc_feature (1)..(146): NCBI GI NO: 15229252 NR Description: putative 40S ribosomal protein S16
  misc_feature (1)..(146): NCBI GI NO: 3122800 NR Description: 40S RIBOSOMAL PROTEIN S16
  misc_feature (4)..(146): NCBI GI NO: 1173209 NR Description: 40S RIBOSOMAL PROTEIN S16
  misc_feature (6)..(146): NCBI GI NO: 17369864 NR Description: 40S ribosomal protein S16
  misc_feature (1)..(146): NCBI GI NO: 39850096 NR Description: Unknown (protein for IMAGE:6887619)
  misc_feature (1)..(146): NCBI GI NO: 4506691 NR Description: ribosomal protein S16; 40S ribosomal protein S16
  misc_feature (1)..(146): NCBI GI NO: 15294045 NR Description: 40S ribosomal protein S16 [Ictalurus punctatus]
MATQPATESVQCFGRKKTAVAVTHCKRGSGLIKLNGCPIELFQPEILRFKIFEPVLLLGKHRFAGVNMRIRVNGGGHTSQVYAIRQSIAKALVAYYQKYVDEQSKKEIKDILVRYDRTLLVADPRRCEPKKFGGRGARSRYQKSYR

SEQ ID NO: 3471 - protein, 79 aa, Arabidopsis thaliana
  peptide (1)..(79): Ceres Seq. ID no. 12738933
  misc_feature (1)..(79): Pfam Name: Pfam Description:  Ribosomal protein S9/S16
  misc_feature (1)..(79): NCBI GI NO: 15238809 NR Description: 40S RIBOSOMAL PROTEIN S16; protein id: At5g18380
  misc_feature (1)..(79): NCBI GI NO: 15226676 NR Description: 40S ribosomal protein S16; protein id: At2g09990
  misc_feature (1)..(79): NCBI GI NO: 6984222 NR Description: 40S ribosomal protein S16 [Euphorbia esula]
  misc_feature (1)..(79): NCBI GI NO: 15229252 NR Description: putative 40S ribosomal protein S16
  misc_feature (1)..(79): NCBI GI NO: 3122800 NR Description: 40S RIBOSOMAL PROTEIN S16
  misc_feature (1)..(79): NCBI GI NO: 1173209 NR Description: 40S RIBOSOMAL PROTEIN S16
  misc_feature (1)..(79): NCBI GI NO: 17369864 NR Description: 40S ribosomal protein S16
  misc_feature (1)..(79): NCBI GI NO: 39850096 NR Description: Unknown (protein for IMAGE:6887619)
  misc_feature (1)..(79): NCBI GI NO: 4506691 NR Description: ribosomal protein S16; 40S ribosomal protein S16
  misc_feature (1)..(79): NCBI GI NO: 15294045 NR Description: 40S ribosomal protein S16 [Ictalurus punctatus]
MRIRVNGGGHTSQVYAIRQSIAKALVAYYQKYVDEQSKKEIKDILVRYDRTLLVADPRRCEPKKFGGRGARSRYQKSYR

SEQ ID NO: 3472 - DNA, 903 bp, Arabidopsis thaliana
  misc_feature (1)..(903): Ceres Seq. ID no. 12337733
aaaaaaaaccaatcatttgctcgaaaaggaatcatgggtcttaaagctggaacctttgtgcttctcttgttgggtttgatcttggtctctgacgctagatctttcgttgactccaccatctcagagaaagtttccaacaaggaagacgtttgcactctgtgtgaggaatatgttactgatgctctcagctaccttgagaaaaatgtcacacaagcggagatcatcgaagatcttcatgatcggtgttcccaattgcgcggatattcgcagcagtgcataagtttggtggattactatgttcctcttttcttcttacaactagagtcgtttcaacctcattatttctgcaagaggatgaatctttgtggcaaagttgtagctcttgtcgaagaagctcgtcaggacagttgcggtgtatgccacaggactgtttcagagattctcatcaaactacaagatcctgacacacagctggatatcgttgaactgcttatcaagggatgcaaatcgctcaagaactacgagaagaagtgcaagacgttggtgtttgaatatggacctctgatactcgtaaatgcagaggaattcctagtgaaaaaagacgtctgcacactcttgcgcgcatgcccccctgagaaatcggttctaaggcagccggagttggctgattcttgaatgttcaaaacgttgctataacaggattttaattccttatgggttatacaagtaggaacacgagctgctccatgagaatggttgcagactttgtgtagtgtctatatgtatggattcaaacacatcctccaaaatgtccctttgcctttgtgtaaataatgatcgctacaacaattgtacctctactatgatatcactgtattctatttgaggtttgtcacattttat

SEQ ID NO: 3473 - protein, 224 aa, Arabidopsis thaliana
  peptide (1)..(224): Ceres Seq. ID no. 12337734
  misc_feature (48)..(86): Pfam Name: Pfam Description:  Saposin-like type B, region 1
  misc_feature (12)..(224): NCBI GI NO: 15231028 NR Description: putative protein; protein id: At3g51730
  misc_feature (17)..(210): NCBI GI NO: 15241065 NR Description: putative protein; protein id: At5g01800
  misc_feature (50)..(209): NCBI GI NO: 34896130 NR Description: P0701D05.19
  misc_feature (53)..(215): NCBI GI NO: 6942199 NR Description: putative protein [Vitis riparia]
  misc_feature (31)..(124): NCBI GI NO: 31227989 NR Description: ENSANGP00000021208 [Anopheles gambiae]
  misc_feature (137)..(216): NCBI GI NO: 31227989 NR Description: ENSANGP00000021208 [Anopheles gambiae]
KKNQSFARKGIMGLKAGTFVLLLLGLILVSDARSFVDSTISEKVSNKEDVCTLCEEYVTDALSYLEKNVTQAEIIEDLHDRCSQLRGYSQQCISLVDYYVPLFFLQLESFQPHYFCKRMNLCGKVVALVEEARQDSCGVCHRTVSEILIKLQDPDTQLDIVELLIKGCKSLKNYEKKCKTLVFEYGPLILVNAEEFLVKKDVCTLLRACPPEKSVLRQPELADS

SEQ ID NO: 3474 - protein, 213 aa, Arabidopsis thaliana
  peptide (1)..(213): Ceres Seq. ID no. 12337735
  misc_feature (37)..(75): Pfam Name: Pfam Description:  Saposin-like type B, region 1
  misc_feature (1)..(213): NCBI GI NO: 15231028 NR Description: putative protein; protein id: At3g51730
  misc_feature (6)..(199): NCBI GI NO: 15241065 NR Description: putative protein; protein id: At5g01800
  misc_feature (39)..(198): NCBI GI NO: 34896130 NR Description: P0701D05.19
  misc_feature (42)..(204): NCBI GI NO: 6942199 NR Description: putative protein [Vitis riparia]
  misc_feature (20)..(113): NCBI GI NO: 31227989 NR Description: ENSANGP00000021208 [Anopheles gambiae]
  misc_feature (126)..(205): NCBI GI NO: 31227989 NR Description: ENSANGP00000021208 [Anopheles gambiae]
MGLKAGTFVLLLLGLILVSDARSFVDSTISEKVSNKEDVCTLCEEYVTDALSYLEKNVTQAEIIEDLHDRCSQLRGYSQQCISLVDYYVPLFFLQLESFQPHYFCKRMNLCGKVVALVEEARQDSCGVCHRTVSEILIKLQDPDTQLDIVELLIKGCKSLKNYEKKCKTLVFEYGPLILVNAEEFLVKKDVCTLLRACPPEKSVLRQPELADS

SEQ ID NO: 3475 - DNA, 702 bp, Arabidopsis thaliana
  misc_feature (1)..(702): Ceres Seq. ID no. 13488314
attttgttttgcgtttctgaatttgtggccattatcttctcacactctcttctcttagctcacagaggaaagaaaaatggcgaattccatttcatcaatatctctgcctcgatgtttcatcttcaacaatggtagtcacaaatcaaggccatggccaagctcaagcagtttctttctcaacaaatcatcaaagcatcatcctcatccactactctctctttcttcttcgccgtcttccgtcgtagaaactgataatgacgacgacaacgacctcactttcagtggttgcagagcgtgtgggaaagaagagaaagagagtgggtgtaatggtgacggacggattcaaggtggcattgcaactgtccccggtttcggttggtggccaattaaggcttacaggccttgtcccgcgtttgttgaggccggaggtagataccgccgcatagggcagagcatggacgaggttgcatttggtcgtggtgactctaaatcctccacttctgtagacaccagtgattcactactacgccagacaaagccaacaagttctagcaaaagttcaaacaagtgatatatagcccagtttttcaagtccaagaagaactttttttggaaatgtgtaatgatgattgggcctaaacatattatcggcccatttataattttacggctcaatagttaagaaaccctaaagaaggtttt

SEQ ID NO: 3476 - protein, 164 aa, Arabidopsis thaliana
  peptide (1)..(164): Ceres Seq. ID no. 13488315
  misc_feature (1)..(164): NCBI GI NO: 18422170 NR Description: expressed protein [Arabidopsis thaliana]
  misc_feature (1)..(151): NCBI GI NO: 9757952 NR Description: dbj|BAA92898
  misc_feature (64)..(142): NCBI GI NO: 34904394 NR Description: unnamed protein product
MANSISSISLPRCFIFNNGSHKSRPWPSSSSFFLNKSSKHHPHPLLSLSSSPSSVVETDNDDDNDLTFSGCRACGKEEKESGCNGDGRIQGGIATVPGFGWWPIKAYRPCPAFVEAGGRYRRIGQSMDEVAFGRGDSKSSTSVDTSDSLLRQTKPTSSSKSSNK

SEQ ID NO: 3477 - DNA, 907 bp, Arabidopsis thaliana
  misc_feature (1)..(907): Ceres Seq. ID no. 13488344
cctctttaagagtcacttgactttaatatttctctttttgtttctttctccttttctctgttttttcttttcttttctctttgcgattcgctgagagcatgcctgaatgtcaagagaaagggagagatttgaagagatagggaagaagatcaaaagagaagcagatgcttggcctcatcaaatggctggaattagaagaccaatgtcgggtcctcccggaaccctcaataccattacgccttgtgctgcctgcaagcttttgcgccgtagatgtgctcaagaatgtcccttttcgccatatttctccccacacgagcctcataagttcgcttccgtccacaaagtctttggagctagtaacgtctccaagatgctaatggaagtacctgagagccagagagcagatgccgcgaatagccttgtgtatgaagcaaacgtgaggctaagagatccggtgtacggatgcatgggagccatctcagctctacaacaacaagtccaagctttacaagccgagctcacggccgtaagatccgagattcttaagtacaagcaacgagaagctgtcgccactttgatcgtaccttccaactcccaagttgccggatttcacaactccggcggtgtttccgtgattgcaccaccaccacaaagaccaacaactccaccacaacctacaacggctcatcctccttctccatcttcttgtgttttctctcaaccaaccacaagagacttagaatacggcaacattgaaagtgagaacaactacttcggttaaatttttattgtatcattctacaaacacatacaaatacatataattaatttatttcgataatttgtgatccggtgactaataaattaaattaaattaaattaatataagtgaacaaggttggtcttg

SEQ ID NO: 3478 - protein, 224 aa, Arabidopsis thaliana
  peptide (1)..(224): Ceres Seq. ID no. 13488345
  misc_feature (1)..(224): NCBI GI NO: 18405401 NR Description: lateral organ boundaries (LOB) domain family
  misc_feature (1)..(224): NCBI GI NO: 21618113 NR Description: LOB DOMAIN 13 [Arabidopsis thaliana]
  misc_feature (1)..(207): NCBI GI NO: 30684548 NR Description: lateral organ boundaries
  misc_feature (6)..(207): NCBI GI NO: 25408064 NR Description: hypothetical protein At2g30340
  misc_feature (6)..(181): NCBI GI NO: 34907878 NR Description: P0031D02.27
  misc_feature (35)..(146): NCBI GI NO: 18402268 NR Description: lateral organ boundaries (LOB) domain family
  misc_feature (44)..(153): NCBI GI NO: 15221679 NR Description: lateral organ boundaries (LOB) domain family
  misc_feature (35)..(146): NCBI GI NO: 21592574 NR Description: unknown [Arabidopsis thaliana]
  misc_feature (41)..(149): NCBI GI NO: 15218746 NR Description: lateral organ boundaries
  misc_feature (42)..(148): NCBI GI NO: 21618134 NR Description: unknown [Arabidopsis thaliana]
MSRERERFEEIGKKIKREADAWPHQMAGIRRPMSGPPGTLNTITPCAACKLLRRRCAQECPFSPYFSPHEPHKFASVHKVFGASNVSKMLMEVPESQRADAANSLVYEANVRLRDPVYGCMGAISALQQQVQALQAELTAVRSEILKYKQREAVATLIVPSNSQVAGFHNSGGVSVIAPPPQRPTTPPQPTTAHPPSPSSCVFSQPTTRDLEYGNIESENNYFG

SEQ ID NO: 3479 - protein, 199 aa, Arabidopsis thaliana
  peptide (1)..(199): Ceres Seq. ID no. 13488346
  misc_feature (1)..(199): NCBI GI NO: 18405401 NR Description: lateral organ boundaries (LOB) domain family
  misc_feature (1)..(199): NCBI GI NO: 21618113 NR Description: LOB DOMAIN 13 [Arabidopsis thaliana]
  misc_feature (1)..(182): NCBI GI NO: 30684548 NR Description: lateral organ boundaries
  misc_feature (1)..(182): NCBI GI NO: 25408064 NR Description: hypothetical protein At2g30340
  misc_feature (1)..(156): NCBI GI NO: 34907878 NR Description: P0031D02.27
  misc_feature (10)..(121): NCBI GI NO: 18402268 NR Description: lateral organ boundaries (LOB) domain family
  misc_feature (19)..(128): NCBI GI NO: 15221679 NR Description: lateral organ boundaries (LOB) domain family
  misc_feature (10)..(121): NCBI GI NO: 21592574 NR Description: unknown [Arabidopsis thaliana]
  misc_feature (16)..(124): NCBI GI NO: 15218746 NR Description: lateral organ boundaries
  misc_feature (17)..(123): NCBI GI NO: 21618134 NR Description: unknown [Arabidopsis thaliana]
MAGIRRPMSGPPGTLNTITPCAACKLLRRRCAQECPFSPYFSPHEPHKFASVHKVFGASNVSKMLMEVPESQRADAANSLVYEANVRLRDPVYGCMGAISALQQQVQALQAELTAVRSEILKYKQREAVATLIVPSNSQVAGFHNSGGVSVIAPPPQRPTTPPQPTTAHPPSPSSCVFSQPTTRDLEYGNIESENNYFG

SEQ ID NO: 3480 - protein, 192 aa, Arabidopsis thaliana
  peptide (1)..(192): Ceres Seq. ID no. 13488347
  misc_feature (1)..(192): NCBI GI NO: 18405401 NR Description: lateral organ boundaries (LOB) domain family
  misc_feature (1)..(192): NCBI GI NO: 21618113 NR Description: LOB DOMAIN 13 [Arabidopsis thaliana]
  misc_feature (1)..(175): NCBI GI NO: 30684548 NR Description: lateral organ boundaries
  misc_feature (1)..(175): NCBI GI NO: 25408064 NR Description: hypothetical protein At2g30340
  misc_feature (1)..(149): NCBI GI NO: 34907878 NR Description: P0031D02.27
  misc_feature (3)..(114): NCBI GI NO: 18402268 NR Description: lateral organ boundaries (LOB) domain family
  misc_feature (12)..(121): NCBI GI NO: 15221679 NR Description: lateral organ boundaries (LOB) domain family
  misc_feature (3)..(114): NCBI GI NO: 21592574 NR Description: unknown [Arabidopsis thaliana]
  misc_feature (9)..(117): NCBI GI NO: 15218746 NR Description: lateral organ boundaries
  misc_feature (10)..(116): NCBI GI NO: 21618134 NR Description: unknown [Arabidopsis thaliana]
MSGPPGTLNTITPCAACKLLRRRCAQECPFSPYFSPHEPHKFASVHKVFGASNVSKMLMEVPESQRADAANSLVYEANVRLRDPVYGCMGAISALQQQVQALQAELTAVRSEILKYKQREAVATLIVPSNSQVAGFHNSGGVSVIAPPPQRPTTPPQPTTAHPPSPSSCVFSQPTTRDLEYGNIESENNYFG

SEQ ID NO: 3481 - DNA, 819 bp, Arabidopsis thaliana
  misc_feature (1)..(819): Ceres Seq. ID no. 12420502
ccgacagagagagagaagcagatcgtatcatcacgagacgaccatcggaataacagagaaagagagaaaaagagagagagagagagagaggatgtctggtgtggttgctcttggtcatgcgagctcgtggggcgcagcgctggtaaggatctcgccgtatactttctccgcaatcggaatcgccatctcgatcggtgtctcagtcctcggtgccgcctggggaatttacattacgggaagtagtttgatcggtgcggctatagaagctcctcgtattacttcgaagaatctcatcagtgtcatcttttgcgaagctgttgctatatatggagttattgttgcaatcatactgcaaacaaagttggagagtgtcccatcttcaaagatgtatgatgctgagtctcttagagctggatatgcaatctttgcatctggaattatagttggattcgccaaccttgtatgcgggttatgtgtaggaatcattggaagcagttgtgcattgtccgatgctcagaactccacactttttgtaaagattcttgtgatcgagatattcgggagtgctctcgggttgtttggagttattgtgggaattattatgtctgcacaagcgacatggccaacgaaatagatatatatatatccggtctgtatatgttgtggtctacttgcaaatctggaaaaacatggcttcttgattatcttcattgttatatcgttccaatgtctagacgaaaatcttgtgtgaaaactgagaaccacttttggatccccaattttttgtatttgtttaaaacttttgaataagtccttttg

SEQ ID NO: 3482 - protein, 210 aa, Arabidopsis thaliana
  peptide (1)..(210): Ceres Seq. ID no. 12420503
  misc_feature (139)..(204): Pfam Name: Pfam Description:  ATP synthase subunit C
  misc_feature (31)..(210): NCBI GI NO: 15236838 NR Description: H+-transporting ATPase - like protein
  misc_feature (31)..(210): NCBI GI NO: 15224764 NR Description: putative vacuolar ATP synthase proteolipid subunit
  misc_feature (31)..(210): NCBI GI NO: 29423617 NR Description: vacuolar membrane ATPase subunit c''
  misc_feature (37)..(210): NCBI GI NO: 38640797 NR Description: V-ATPase subunit c'' proteolipid
  misc_feature (40)..(210): NCBI GI NO: 34912550 NR Description: putative H+-transporting ATPase
  misc_feature (38)..(206): NCBI GI NO: 6321815 NR Description: vacuolar ATPase V0 domain subunit c''; Ppa1p
  misc_feature (38)..(200): NCBI GI NO: 29840984 NR Description: similar to NM_033617 ATPase
  misc_feature (47)..(204): NCBI GI NO: 4757816 NR Description: ATPase
  misc_feature (47)..(204): NCBI GI NO: 15991795 NR Description: ATPase, H+ transporting, V0 subunit B
  misc_feature (47)..(204): NCBI GI NO: 30585227 NR Description: Homo sapiens ATPase
RQRERSRSYHHETTIGITEKERKRERERERMSGVVALGHASSWGAALVRISPYTFSAIGIAISIGVSVLGAAWGIYITGSSLIGAAIEAPRITSKNLISVIFCEAVAIYGVIVAIILQTKLESVPSSKMYDAESLRAGYAIFASGIIVGFANLVCGLCVGIIGSSCALSDAQNSTLFVKILVIEIFGSALGLFGVIVGIIMSAQATWPTK

SEQ ID NO: 3483 - protein, 180 aa, Arabidopsis thaliana
  peptide (1)..(180): Ceres Seq. ID no. 12420504
  misc_feature (109)..(174): Pfam Name: Pfam Description:  ATP synthase subunit C
  misc_feature (1)..(180): NCBI GI NO: 15236838 NR Description: H+-transporting ATPase - like protein
  misc_feature (1)..(180): NCBI GI NO: 15224764 NR Description: putative vacuolar ATP synthase proteolipid subunit
  misc_feature (1)..(180): NCBI GI NO: 29423617 NR Description: vacuolar membrane ATPase subunit c''
  misc_feature (7)..(180): NCBI GI NO: 38640797 NR Description: V-ATPase subunit c'' proteolipid
  misc_feature (10)..(180): NCBI GI NO: 34912550 NR Description: putative H+-transporting ATPase
  misc_feature (8)..(176): NCBI GI NO: 6321815 NR Description: vacuolar ATPase V0 domain subunit c''; Ppa1p
  misc_feature (8)..(170): NCBI GI NO: 29840984 NR Description: similar to NM_033617 ATPase
  misc_feature (17)..(174): NCBI GI NO: 4757816 NR Description: ATPase
  misc_feature (17)..(174): NCBI GI NO: 15991795 NR Description: ATPase, H+ transporting, V0 subunit B
  misc_feature (17)..(174): NCBI GI NO: 30585227 NR Description: Homo sapiens ATPase
MSGVVALGHASSWGAALVRISPYTFSAIGIAISIGVSVLGAAWGIYITGSSLIGAAIEAPRITSKNLISVIFCEAVAIYGVIVAIILQTKLESVPSSKMYDAESLRAGYAIFASGIIVGFANLVCGLCVGIIGSSCALSDAQNSTLFVKILVIEIFGSALGLFGVIVGIIMSAQATWPTK

SEQ ID NO: 3484 - protein, 115 aa, Arabidopsis thaliana
  peptide (1)..(115): Ceres Seq. ID no. 12420505
MRVMCRNHWKQLCIVRCSELHTFCKDSCDRDIRECSRVVWSYCGNYYVCTSDMANEIDIYISGLYMLWSTCKSGKTWLLDYLHCYIVPMSRRKSCVKTENHFWIPNFLYLFKTFE

SEQ ID NO: 3485 - DNA, 515 bp, Arabidopsis thaliana
  misc_feature (1)..(515): Ceres Seq. ID no. 12579436
attttcgttttcactttctccgaacatccaaaagcttgtagcttgctcctcaaatcttcttgaaaaatgaaggttgccgctgctttcctcctcgccgttttgggcggaaacgctaatccttcagccgagaatatcaaagatatcatcggagctgttggtgctgatgttgatggagagagcattgagcttctattgaaagaagtgagtggtaaggacattgctgagctgattgcttctggtagggagaaattagcgtctgtgccatctggtggtggtgtggctgtttcagctgctccatcaagcggtggtggtggtgctgctgctgctgcccctgcggagaagaaagaagccaagaaggaagagaaagaagagtctgatgatgacatgggattcagtctcttcgagtaaggtttttgtccccacggaaaggagtcgagatttgattttttgttctcttagtggttctggtttttgctcctctttgtaaccttggtctagttagcgggttttttatt

SEQ ID NO: 3486 - protein, 113 aa, Arabidopsis thaliana
  peptide (1)..(113): Ceres Seq. ID no. 12579437
  misc_feature (17)..(112): Pfam Name: Pfam Description:  60s Acidic ribosomal protein
  misc_feature (1)..(113): NCBI GI NO: 15230454 NR Description: acidic ribosomal protein P2 -like
  misc_feature (1)..(113): NCBI GI NO: 15226231 NR Description: 60S acidic ribosomal protein P2
  misc_feature (1)..(113): NCBI GI NO: 24473796 NR Description: 60s acidic ribosomal protein [Prunus dulcis]
  misc_feature (1)..(113): NCBI GI NO: 15226230 NR Description: 60S acidic ribosomal protein P2
  misc_feature (1)..(113): NCBI GI NO: 21593095 NR Description: 60S acidic ribosomal protein P2
  misc_feature (1)..(113): NCBI GI NO: 730583 NR Description: 60S acidic ribosomal protein P2
  misc_feature (1)..(113): NCBI GI NO: 32400796 NR Description: acidic ribosomal protein [Triticum aestivum]
  misc_feature (1)..(113): NCBI GI NO: 4204372 NR Description: acidic ribosomal protein P2a-2 [Zea mays]
  misc_feature (1)..(113): NCBI GI NO: 1173073 NR Description: 60S ACIDIC RIBOSOMAL PROTEIN P2A (P2)
  misc_feature (1)..(113): NCBI GI NO: 34906408 NR Description: putative 60S acidic ribosomal protein P2A
MKVAAAFLLAVLGGNANPSAENIKDIIGAVGADVDGESIELLLKEVSGKDIAELIASGREKLASVPSGGGVAVSAAPSSGGGGAAAAAPAEKKEAKKEEKEESDDDMGFSLFE

SEQ ID NO: 3487 - DNA, 658 bp, Arabidopsis thaliana
  misc_feature (1)..(658): Ceres Seq. ID no. 12602522
gaactttaggggttatcgattctttttgattcgttgtcattcgattatagaatttgtattagaaatcggaattttcgatcaatggggaggagaatattgaacgatgcattgagaacgatcgtgaatgctgagaagcgagggaaagcttcggtggagttgaaacctgtctctaccgtaatgtcttcgtttctcaaaatcatgaaagagaaagggtacatcaagaacttccaagtccatgatccacacagagttggaagaataactgttgatctacaaggaagggttaatgattgcaaagctctcacttataggcaggacgttaaggcaaatgagatcgggcaatacacagaacgcacacttccaacgcgccagtggggttatatagtgattacaactcccgatggcattttggatcatgaagaagctattaaacggaatgtgggtggtcaggttcttggtttctttcattgaactgcaatacggaaagaaactctgatggagggactttgatatgtcaaaccctgccataacatgtcatttgtctggctttttcgacattgtttgtttgtttgtttgttttcttgcactgcagtttcagcaagatggagaattagagaacaaaatttatttctattatgacaacatttcgaatggtatt

SEQ ID NO: 3488 - protein, 129 aa, Arabidopsis thaliana
  peptide (1)..(129): Ceres Seq. ID no. 12602523
  misc_feature (6)..(129): Pfam Name: Pfam Description:  Ribosomal protein S8
  misc_feature (1)..(129): NCBI GI NO: 15224834 NR Description: 40S ribosomal protein S15A; protein id: At2g19720
  misc_feature (1)..(129): NCBI GI NO: 15233571 NR Description: ribosomal protein S15a homolog
  misc_feature (5)..(129): NCBI GI NO: 28411802 NR Description: ribosomal protein S15
  misc_feature (5)..(129): NCBI GI NO: 13560779 NR Description: cytoplasmic ribosomal protein S15a [Daucus carota]
  misc_feature (5)..(129): NCBI GI NO: 133793 NR Description: 40S RIBOSOMAL PROTEIN S15A (PPCB8)
  misc_feature (5)..(129): NCBI GI NO: 15223001 NR Description: ribosomal protein S15; protein id: At1g07770
  misc_feature (5)..(129): NCBI GI NO: 6683481 NR Description: wrp15a [Citrullus lanatus]
  misc_feature (5)..(129): NCBI GI NO: 15225502 NR Description: 40S ribosomal protein S15A; protein id: At2g39590
  misc_feature (5)..(129): NCBI GI NO: 15231316 NR Description: cytoplasmic ribosomal protein S15a -like
  misc_feature (1)..(128): NCBI GI NO: 34854258 NR Description: similar to 40S ribosomal protein S15a
MGRRILNDALRTIVNAEKRGKASVELKPVSTVMSSFLKIMKEKGYIKNFQVHDPHRVGRITVDLQGRVNDCKALTYRQDVKANEIGQYTERTLPTRQWGYIVITTPDGILDHEEAIKRNVGGQVLGFFH

SEQ ID NO: 3489 - protein, 97 aa, Arabidopsis thaliana
  peptide (1)..(97): Ceres Seq. ID no. 12602524
  misc_feature (1)..(97): Pfam Name: Pfam Description:  Ribosomal protein S8
  misc_feature (1)..(97): NCBI GI NO: 15224834 NR Description: 40S ribosomal protein S15A; protein id: At2g19720
  misc_feature (1)..(97): NCBI GI NO: 15233571 NR Description: ribosomal protein S15a homolog
  misc_feature (1)..(97): NCBI GI NO: 28411802 NR Description: ribosomal protein S15
  misc_feature (1)..(97): NCBI GI NO: 13560779 NR Description: cytoplasmic ribosomal protein S15a [Daucus carota]
  misc_feature (1)..(97): NCBI GI NO: 133793 NR Description: 40S RIBOSOMAL PROTEIN S15A (PPCB8)
  misc_feature (1)..(97): NCBI GI NO: 15223001 NR Description: ribosomal protein S15; protein id: At1g07770
  misc_feature (1)..(97): NCBI GI NO: 6683481 NR Description: wrp15a [Citrullus lanatus]
  misc_feature (1)..(97): NCBI GI NO: 15225502 NR Description: 40S ribosomal protein S15A; protein id: At2g39590
  misc_feature (1)..(97): NCBI GI NO: 15231316 NR Description: cytoplasmic ribosomal protein S15a -like
  misc_feature (1)..(96): NCBI GI NO: 34854258 NR Description: similar to 40S ribosomal protein S15a
MSSFLKIMKEKGYIKNFQVHDPHRVGRITVDLQGRVNDCKALTYRQDVKANEIGQYTERTLPTRQWGYIVITTPDGILDHEEAIKRNVGGQVLGFFH

SEQ ID NO: 3490 - protein, 90 aa, Arabidopsis thaliana
  peptide (1)..(90): Ceres Seq. ID no. 12602525
  misc_feature (1)..(90): Pfam Name: Pfam Description:  Ribosomal protein S8
  misc_feature (1)..(90): NCBI GI NO: 15224834 NR Description: 40S ribosomal protein S15A; protein id: At2g19720
  misc_feature (1)..(90): NCBI GI NO: 15233571 NR Description: ribosomal protein S15a homolog
  misc_feature (1)..(90): NCBI GI NO: 28411802 NR Description: ribosomal protein S15
  misc_feature (1)..(90): NCBI GI NO: 13560779 NR Description: cytoplasmic ribosomal protein S15a [Daucus carota]
  misc_feature (1)..(90): NCBI GI NO: 133793 NR Description: 40S RIBOSOMAL PROTEIN S15A (PPCB8)
  misc_feature (1)..(90): NCBI GI NO: 15223001 NR Description: ribosomal protein S15; protein id: At1g07770
  misc_feature (1)..(90): NCBI GI NO: 6683481 NR Description: wrp15a [Citrullus lanatus]
  misc_feature (1)..(90): NCBI GI NO: 15225502 NR Description: 40S ribosomal protein S15A; protein id: At2g39590
  misc_feature (1)..(90): NCBI GI NO: 15231316 NR Description: cytoplasmic ribosomal protein S15a -like
  misc_feature (1)..(89): NCBI GI NO: 34854258 NR Description: similar to 40S ribosomal protein S15a
MKEKGYIKNFQVHDPHRVGRITVDLQGRVNDCKALTYRQDVKANEIGQYTERTLPTRQWGYIVITTPDGILDHEEAIKRNVGGQVLGFFH

SEQ ID NO: 3491 - DNA, 592 bp, Arabidopsis thaliana
  misc_feature (1)..(592): Ceres Seq. ID no. 12394119
attgttgtgaatttctgtgagattgagaatgcaggcggaggagataatatgccgtgtttcagacgaagagatcatcgagaattacctgaggccaaagataaacggtgaaacatcttcaatcccgagatatgttgtggaattggcagaggagctgtacactgtagagccttggctgcttcctcgacaaacagctccaattctcaaccctggcgagtggttctactttgggaaacgcaatcgaaagtatagtaacttggaaggtgttcattgcaagggatcgtggatactcgaagacggttgcatcgcagtcctgtccaaggagacgggtgaggaaattggtggaacgacgagatttaggtattactataggaacaagggggataaagagagtcgtctgaagatgagcaattggtttatgagagagtaacgtctctattacaaatccaggagagtcttcaatggacgtcaggttttctgcattatcacttgtaatgatgaacattttatcgaataattctctctgcttttttctaagataccattgtttaagatcctaattatgagtttgaatctataattataactctttgcc

SEQ ID NO: 3492 - protein, 132 aa, Arabidopsis thaliana
  peptide (1)..(132): Ceres Seq. ID no. 12394120
  misc_feature (11)..(132): Pfam Name: NAM Pfam Description: No apical meristem
  misc_feature (1)..(132): NCBI GI NO: 18407972 NR Description: Expressed protein; protein id: At1g64105
  misc_feature (2)..(132): NCBI GI NO: 15238786 NR Description: putative protein; protein id: At5g18300.1
  misc_feature (9)..(132): NCBI GI NO: 7486659 NR Description: hypothetical protein F8D20
  misc_feature (11)..(132): NCBI GI NO: 15218843 NR Description: jasmonic acid, putative; protein id: At1g65910.1
MQAEEIICRVSDEEIIENYLRPKINGETSSIPRYVVELAEELYTVEPWLLPRQTAPILNPGEWFYFGKRNRKYSNLEGVHCKGSWILEDGCIAVLSKETGEEIGGTTRFRYYYRNKGDKESRLKMSNWFMRE

SEQ ID NO: 3493 - DNA, 1504 bp, Arabidopsis thaliana
  misc_feature (1)..(1504): Ceres Seq. ID no. 13592972
aagctgaaatctagtttattttttctatttactaaaacctcccaaggaccaaagaacatcgacaaaggaagacgacgaagaagatttcgagcttcgacaaatcatgcggattcttactgctcgcatagctaaccatttttgcagggcacgaaacgcgaatcctcgatctcgaaatttctcctcgtcgaacaagaaagatgaccttacattggaggaagaagctgagaggaaaataggttggtgtctcaaaattttctttgcgggcacagcaacgtatattggataccagtttttcccttacttaggtgataacttaattcatcaatcaatatcgcttttacatgtgaaggatcctttgtttaagagaatgggagcttctcggctttcccgtttcgctattgatgatgaaaggaggatgaaggttgtagagatgggtggggctcaagagctactacatatgttgggaagtgctaaagatgacaagacaaggaaagaagccctaaaggctcttgctgctctctctaaatcaggtgaagctgctaaattcctaggctctaatggagcactctctatcgtcaaatcgactccaaattccttggaagattcagacatttcaacatacaagtcaaacatactcgagaagctagttgagaaaaacctcgctgtctcttccaactgaactacctttttacggacaaggataggtcaagaatcataagagcatgtccattgcagggaccttgcaagttttttaagaaaatccttatgaataatagcaaaaaattaaatcagaatggtgtaataaaccaaggtgcgaaccttgtttaaggtatttttgggtgtattaggtgcgctgacgtggctgtatattattggatgacaacttttcccgtgtttttttttctttcccattcccaaactatttttttctttctctcctctctcctctcctgttttctccgaatttcgacttcgacggatcaaattcttcatcgtctctttttttatcatgtctctcttctcatacgatccacaagattcgtgatcgaagaggtgtcagaaaatccaccggaagagctactcttaccggctttgctgaggtcaacgatgtggcgctgtttttcggtggattggttagaatgttgatgctcataggatcctgcttgtgggttcgtctgctggttgaatttgattgcaagttaaagtctggtgcttttgatctggtaattgcttcttacaagttgatctgtaacaattgatttcgaattcagtatatggatttgtatacagattctgggctttgctttatgttcaaatttgtgtttgatcttttggtttttaagataaaaatgtgactcttttggtgcttattcacttgtatgtcatgttatggtctatgttctctaagtggttttagcttagataacttgtatgtctgttttctttactttaagttcaatatgacttgtatcacttcggctttaatgatattgttgtttaaaag

SEQ ID NO: 3494 - protein, 191 aa, Arabidopsis thaliana
  peptide (1)..(191): Ceres Seq. ID no. 13592973
  misc_feature (1)..(191): NCBI GI NO: 30694398 NR Description: expressed protein [Arabidopsis thaliana]
  misc_feature (22)..(183): NCBI GI NO: 40538927 NR Description: expressed protein
  misc_feature (89)..(191): NCBI GI NO: 11281187 NR Description: hypothetical protein F18O21
MRILTARIANHFCRARNANPRSRNFSSSNKKDDLTLEEEAERKIGWCLKIFFAGTATYIGYQFFPYLGDNLIHQSISLLHVKDPLFKRMGASRLSRFAIDDERRMKVVEMGGAQELLHMLGSAKDDKTRKEALKALAALSKSGEAAKFLGSNGALSIVKSTPNSLEDSDISTYKSNILEKLVEKNLAVSSN

SEQ ID NO: 3495 - protein, 103 aa, Arabidopsis thaliana
  peptide (1)..(103): Ceres Seq. ID no. 13592974
  misc_feature (1)..(103): NCBI GI NO: 30694398 NR Description: expressed protein [Arabidopsis thaliana]
  misc_feature (1)..(95): NCBI GI NO: 40538927 NR Description: expressed protein
  misc_feature (1)..(103): NCBI GI NO: 11281187 NR Description: hypothetical protein F18O21
MGASRLSRFAIDDERRMKVVEMGGAQELLHMLGSAKDDKTRKEALKALAALSKSGEAAKFLGSNGALSIVKSTPNSLEDSDISTYKSNILEKLVEKNLAVSSN

SEQ ID NO: 3496 - DNA, 904 bp, Arabidopsis thaliana
  misc_feature (1)..(904): Ceres Seq. ID no. 12562653
atgaagaactaatgatatatacaaacaattcttaatacataaaaatcttctacaaatattgatttaagaagctctaaaatcatacaagtcatggatgaagaagcagcgattgatcgtttaccattagaccttcttgcatatatattttcgttggctacttctttcaccgttttggcccaggcaagtggtgtttgcaagaaatggagaaaagctgtaaatcaatcgatggcgagaagagaaactctgagctttgctggttggaaaatggacgatgattccacttctcgtctcgttcatcttgctttcaacctcaaagaactcgacatatctcgaagcagatggggttgtcatataactgataatggtctttaccaaatagcttctgcaagatgtgtatccaatttaaactctgtctctttatggggcatgaccgccattactgattctggtgttgttcaactgatttcaagaacttcctcactgcaacacctaaacataggaggaacatttataaccgatgagtctcttttcgcaattgcagaacgctgccatcagcttaagacaatcggaatgtggtgttgccgtcatgtgacagagagaggccttcttgttcttgtaaacaaatgcagaaaactcgaatccatcaacttatggggaactagagttcctgtagattgcttcattgctttacttaccatcagtcctgctcttcagatcaaacccatggaattgcttctcaatgctcagaatccaccaccgttgctgcatgctgtctagtgttgctcatcatatttcttgtttgttgtgtacatagtaattcatacaattgaatctgcatatatcttatgtgttctctcatcaatcaacaacatatatatataaatattcagtaaagtttctattg

SEQ ID NO: 3497 - protein, 228 aa, Arabidopsis thaliana
  peptide (1)..(228): Ceres Seq. ID no. 12562654
  misc_feature (1)..(228): NCBI GI NO: 15240225 NR Description: F-box protein family; protein id: At5g67140
  misc_feature (2)..(128): NCBI GI NO: 34898378 NR Description: Hypothetical protein
  misc_feature (156)..(222): NCBI GI NO: 34898376 NR Description: Hypothetical protein
  misc_feature (88)..(215): NCBI GI NO: 15237286 NR Description: putative protein; protein id: At5g23340
  misc_feature (52)..(189): NCBI GI NO: 18410977 NR Description: putative protein; protein id: At3g58530
  misc_feature (7)..(208): NCBI GI NO: 6456110 NR Description: F-box protein FBX13 [Mus musculus]
  misc_feature (52)..(189): NCBI GI NO: 15450960 NR Description: putative protein [Arabidopsis thaliana]
  misc_feature (44)..(208): NCBI GI NO: 34907434 NR Description: P0018C10.44
  misc_feature (58)..(189): NCBI GI NO: 18394987 NR Description: F-box protein family; protein id: At1g21410
  misc_feature (58)..(189): NCBI GI NO: 21554029 NR Description: F-box protein AtFBL5 [Arabidopsis thaliana]
MDEEAAIDRLPLDLLAYIFSLATSFTVLAQASGVCKKWRKAVNQSMARRETLSFAGWKMDDDSTSRLVHLAFNLKELDISRSRWGCHITDNGLYQIASARCVSNLNSVSLWGMTAITDSGVVQLISRTSSLQHLNIGGTFITDESLFAIAERCHQLKTIGMWCCRHVTERGLLVLVNKCRKLESINLWGTRVPVDCFIALLTISPALQIKPMELLLNAQNPPPLLHAV

SEQ ID NO: 3498 - protein, 183 aa, Arabidopsis thaliana
  peptide (1)..(183): Ceres Seq. ID no. 12562655
  misc_feature (1)..(183): NCBI GI NO: 15240225 NR Description: F-box protein family; protein id: At5g67140
  misc_feature (1)..(83): NCBI GI NO: 34898378 NR Description: Hypothetical protein
  misc_feature (111)..(177): NCBI GI NO: 34898376 NR Description: Hypothetical protein
  misc_feature (43)..(170): NCBI GI NO: 15237286 NR Description: putative protein; protein id: At5g23340
  misc_feature (7)..(144): NCBI GI NO: 18410977 NR Description: putative protein; protein id: At3g58530
  misc_feature (1)..(163): NCBI GI NO: 6456110 NR Description: F-box protein FBX13 [Mus musculus]
  misc_feature (7)..(144): NCBI GI NO: 15450960 NR Description: putative protein [Arabidopsis thaliana]
  misc_feature (1)..(163): NCBI GI NO: 34907434 NR Description: P0018C10.44
  misc_feature (13)..(144): NCBI GI NO: 18394987 NR Description: F-box protein family; protein id: At1g21410
  misc_feature (13)..(144): NCBI GI NO: 21554029 NR Description: F-box protein AtFBL5 [Arabidopsis thaliana]
MARRETLSFAGWKMDDDSTSRLVHLAFNLKELDISRSRWGCHITDNGLYQIASARCVSNLNSVSLWGMTAITDSGVVQLISRTSSLQHLNIGGTFITDESLFAIAERCHQLKTIGMWCCRHVTERGLLVLVNKCRKLESINLWGTRVPVDCFIALLTISPALQIKPMELLLNAQNPPPLLHAV

SEQ ID NO: 3499 - protein, 170 aa, Arabidopsis thaliana
  peptide (1)..(170): Ceres Seq. ID no. 12562656
  misc_feature (1)..(170): NCBI GI NO: 15240225 NR Description: F-box protein family; protein id: At5g67140
  misc_feature (1)..(70): NCBI GI NO: 34898378 NR Description: Hypothetical protein
  misc_feature (98)..(164): NCBI GI NO: 34898376 NR Description: Hypothetical protein
  misc_feature (30)..(157): NCBI GI NO: 15237286 NR Description: putative protein; protein id: At5g23340
  misc_feature (1)..(131): NCBI GI NO: 18410977 NR Description: putative protein; protein id: At3g58530
  misc_feature (1)..(150): NCBI GI NO: 6456110 NR Description: F-box protein FBX13 [Mus musculus]
  misc_feature (1)..(131): NCBI GI NO: 15450960 NR Description: putative protein [Arabidopsis thaliana]
  misc_feature (1)..(150): NCBI GI NO: 34907434 NR Description: P0018C10.44
  misc_feature (1)..(131): NCBI GI NO: 18394987 NR Description: F-box protein family; protein id: At1g21410
  misc_feature (1)..(131): NCBI GI NO: 21554029 NR Description: F-box protein AtFBL5 [Arabidopsis thaliana]
MDDDSTSRLVHLAFNLKELDISRSRWGCHITDNGLYQIASARCVSNLNSVSLWGMTAITDSGVVQLISRTSSLQHLNIGGTFITDESLFAIAERCHQLKTIGMWCCRHVTERGLLVLVNKCRKLESINLWGTRVPVDCFIALLTISPALQIKPMELLLNAQNPPPLLHAV

SEQ ID NO: 3500 - DNA, 911 bp, Arabidopsis thaliana
  misc_feature (1)..(911): Ceres Seq. ID no. 13574943
ccacgcgtccgctttatctatcttcgtacattatatataatgggatcaaccgtggccgccgctctcctcctcttcctagcggcagtccctgccgtctttgccgcaactttcaaggtcggcgatatttctggctggaccagtaatcttgattacacggtttggctcactggaaagactttcagagtcggtgacactctagagttcgtatatggtctttcacactcggtgtccgtggtggataaagctggctacgataactgcgacagtagcggagccacacagaactttgccgatggagacactaagatcgatcttaccacagttggaacaatgcacttcctttgccctacttttggtcactgcaagaacggcatgaaactcgccgttcctgtcctcgccgccgctccatctccttcgactccttcttcgcctccctccactccttcgactccttcttccccgccctccactccgtctaccccttcttcgcccccctcccctccttcgcctccttctccatcgctcccccctagctctctgcctccatctgcatctccgccgaccaatggcacgccggattcagagacattgacgcctccgccagctccattgccgccttcgctgtctccaaacgcggcatctaagggagtcatgagctatggaataattggagtcacgatgatattgatgtacgctgttatgacctaaataacagggtggaaacagagcattgttttgctccatgtcttttttggtcggcggcctttggaaatactacaccactacgtgctcttttgtgtgtaacggaatttttttgccattgacaatttttccttcttccttctttttttaattacttgtaggggttgataaacgttatagccatctccaagctattttatcttattctt

SEQ ID NO: 3501 - protein, 235 aa, Arabidopsis thaliana
  peptide (1)..(235): Ceres Seq. ID no. 13574944
  misc_feature (45)..(125): Pfam Name: Pfam Description:  Plastocyanin-like domain
  misc_feature (14)..(235): NCBI GI NO: 15232289 NR Description: uclacyanin 3 [Arabidopsis thaliana]
  misc_feature (14)..(167): NCBI GI NO: 15232287 NR Description: plastocyanin-like domain containing protein
  misc_feature (14)..(190): NCBI GI NO: 25453522 NR Description: blue copper-binding protein II
  misc_feature (14)..(190): NCBI GI NO: 15224960 NR Description: uclacyanin II [Arabidopsis thaliana]
  misc_feature (14)..(190): NCBI GI NO: 21554060 NR Description: phytocyanin [Arabidopsis thaliana]
  misc_feature (14)..(190): NCBI GI NO: 25453521 NR Description: blue copper-binding protein II
  misc_feature (13)..(179): NCBI GI NO: 14140127 NR Description: uclacyanin 3-like protein [Oryza sativa]
  misc_feature (14)..(135): NCBI GI NO: 25282796 NR Description: uclacyanin II [imported] - Arabidopsis thaliana
  misc_feature (13)..(214): NCBI GI NO: 15238868 NR Description: hypothetical protein [Arabidopsis thaliana]
  misc_feature (17)..(185): NCBI GI NO: 15241298 NR Description: plastocyanin-like domain containing protein
PRVRFIYLRTLYIMGSTVAAALLLFLAAVPAVFAATFKVGDISGWTSNLDYTVWLTGKTFRVGDTLEFVYGLSHSVSVVDKAGYDNCDSSGATQNFADGDTKIDLTTVGTMHFLCPTFGHCKNGMKLAVPVLAAAPSPSTPSSPPSTPSTPSSPPSTPSTPSSPPSPPSPPSPSLPPSSLPPSASPPTNGTPDSETLTPPPAPLPPSLSPNAASKGVMSYGIIGVTMILMYAVMT

SEQ ID NO: 3502 - protein, 222 aa, Arabidopsis thaliana
  peptide (1)..(222): Ceres Seq. ID no. 13574945
  misc_feature (32)..(112): Pfam Name: Pfam Description:  Plastocyanin-like domain
  misc_feature (1)..(222): NCBI GI NO: 15232289 NR Description: uclacyanin 3 [Arabidopsis thaliana]
  misc_feature (1)..(154): NCBI GI NO: 15232287 NR Description: plastocyanin-like domain containing protein
  misc_feature (1)..(177): NCBI GI NO: 25453522 NR Description: blue copper-binding protein II
  misc_feature (1)..(177): NCBI GI NO: 15224960 NR Description: uclacyanin II [Arabidopsis thaliana]
  misc_feature (1)..(177): NCBI GI NO: 21554060 NR Description: phytocyanin [Arabidopsis thaliana]
  misc_feature (1)..(177): NCBI GI NO: 25453521 NR Description: blue copper-binding protein II
  misc_feature (1)..(166): NCBI GI NO: 14140127 NR Description: uclacyanin 3-like protein [Oryza sativa]
  misc_feature (1)..(122): NCBI GI NO: 25282796 NR Description: uclacyanin II [imported] - Arabidopsis thaliana
  misc_feature (1)..(201): NCBI GI NO: 15238868 NR Description: hypothetical protein [Arabidopsis thaliana]
  misc_feature (4)..(172): NCBI GI NO: 15241298 NR Description: plastocyanin-like domain containing protein
MGSTVAAALLLFLAAVPAVFAATFKVGDISGWTSNLDYTVWLTGKTFRVGDTLEFVYGLSHSVSVVDKAGYDNCDSSGATQNFADGDTKIDLTTVGTMHFLCPTFGHCKNGMKLAVPVLAAAPSPSTPSSPPSTPSTPSSPPSTPSTPSSPPSPPSPPSPSLPPSSLPPSASPPTNGTPDSETLTPPPAPLPPSLSPNAASKGVMSYGIIGVTMILMYAVMT

SEQ ID NO: 3503 - protein, 125 aa, Arabidopsis thaliana
  peptide (1)..(125): Ceres Seq. ID no. 13574946
  misc_feature (20)..(93): Pfam Name: Pfam Description:  Extensin-like region
  misc_feature (1)..(125): NCBI GI NO: 15232289 NR Description: uclacyanin 3 [Arabidopsis thaliana]
  misc_feature (1)..(57): NCBI GI NO: 15232287 NR Description: plastocyanin-like domain containing protein
  misc_feature (1)..(80): NCBI GI NO: 25453522 NR Description: blue copper-binding protein II
  misc_feature (1)..(80): NCBI GI NO: 15224960 NR Description: uclacyanin II [Arabidopsis thaliana]
  misc_feature (1)..(80): NCBI GI NO: 21554060 NR Description: phytocyanin [Arabidopsis thaliana]
  misc_feature (1)..(80): NCBI GI NO: 25453521 NR Description: blue copper-binding protein II
  misc_feature (1)..(69): NCBI GI NO: 14140127 NR Description: uclacyanin 3-like protein [Oryza sativa]
  misc_feature (1)..(25): NCBI GI NO: 25282796 NR Description: uclacyanin II [imported] - Arabidopsis thaliana
  misc_feature (1)..(104): NCBI GI NO: 15238868 NR Description: hypothetical protein [Arabidopsis thaliana]
  misc_feature (1)..(75): NCBI GI NO: 15241298 NR Description: plastocyanin-like domain containing protein
MHFLCPTFGHCKNGMKLAVPVLAAAPSPSTPSSPPSTPSTPSSPPSTPSTPSSPPSPPSPPSPSLPPSSLPPSASPPTNGTPDSETLTPPPAPLPPSLSPNAASKGVMSYGIIGVTMILMYAVMT

SEQ ID NO: 3504 - DNA, 1622 bp, Arabidopsis thaliana
  misc_feature (1)..(1622): Ceres Seq. ID no. 12738553
ttcaaaggataaatacgcatggcttcgcgatgacgagttcgcacgccaagctatagctgggatcaacccggtcaacatagaacgagtcacgtcttatccaccggtcagcaatcttgaccctgaaatctacggaccaggtcttcactccgctctcacggaagaccacatcatcggtcaacttgatggcttaaccgtacaacaagcgttagagatgaaccgtttgtttatggtggactaccatgacatatacttaccgtttctagatagaatcaacgcgcttgatggacgcaaggcttacgcgactcgaaccatattgttcttgacccgactcggtacactcaagcctatcgccatcgagctaagcctcccttctcaatcaagctcaaaccaaaagtccaagcgcgtggtcacacctccagtagacgcaacctccaactggatgtggcagctagccaaggcccacgttgggtccaatgacgctggtgtccaccagcttgtgaatcattggttacgtactcatgcgtgtttggaaccgtttatattagctgctcatagacaattaagcgcaatgcatccgatattcaaattattagaccctcacatgaggtacactttggagatcaatgccgtggcacgacagactttgattagtgcggacggtgtgatcgagtcgtgcttcactgctggtcaatacggtctagagattagttccgctgcgtataagaacaaatggcggtttgatatggaaggtctccctgctgatctcatccgaagggggatggctgttccagacccaacacaaccacatgggcttaaattacttgttgaagactacccatgccaacgacggtctcttattatggtccgcaatccaaacttgggtccgaacctacgtggaacgttattacgcaaactcgaacctaatccaaaccgatactgagctccaagcctggtactctgagtcaatcaacgtaggtcacgctgatcaccgcgacgccgagtggtggccgaagctttccaccgtcgaagatctcgtctccgtcatcaccaccatcatctggctcgcctccgcacaacacgcggcactcaacttcggacaatatccttacggtggctacgtcccgaaccgaccaccgctaatgcgtcggttgattcccgacgagtcagatcccgagttcacgagttttatcgaagatcctcaaaagtattttttctcgtcgatgccgagtttattgcaaacgacgaagtttatggcggtggttgatacattgtcgacacattcgccggatgaggagtatatcggagagagacaacaaccgtcgatatggactggagatgctgagatcgtagatgcgttttatggattctcggcggaaatcggacggatagagaaggagattgacaagaggaatcgtgatcctagctgtaggaatcgctgtggcgcgggagtgttaccgtatgagttgatggctccgagttctgaaccgggtgttacgtgtagaggagtgcctaatagtgtatctatttagaattattcaatttttcaaagtatagagaattttataagtatataattagattttgacgcagtatggtttatttgccgatattgtaaaattctt

SEQ ID NO: 3505 - protein, 312 aa, Arabidopsis thaliana
  peptide (1)..(312): Ceres Seq. ID no. 12738554
  misc_feature (1)..(287): Pfam Name: Pfam Description:  Lipoxygenase
  misc_feature (1)..(287): NCBI GI NO: 12323766 NR Description: putative lipoxygenase, 5' partial; 101105-97928
  misc_feature (1)..(287): NCBI GI NO: 15218506 NR Description: putative lipoxygenase; protein id: At1g72520
  misc_feature (1)..(310): NCBI GI NO: 6002055 NR Description: lipoxygenase [Arabidopsis thaliana]
  misc_feature (1)..(310): NCBI GI NO: 9665131 NR Description: lipoxygenase [Arabidopsis thaliana]
  misc_feature (1)..(310): NCBI GI NO: 18394479 NR Description: lipoxygenase; protein id: At1g17420
  misc_feature (1)..(279): NCBI GI NO: 32454714 NR Description: lipoxygenase [Nicotiana attenuata]
  misc_feature (1)..(279): NCBI GI NO: 28911945 NR Description: lipoxygenase [Nicotiana attenuata]
  misc_feature (1)..(287): NCBI GI NO: 14589309 NR Description: lipoxygenase [Sesbania rostrata]
  misc_feature (1)..(279): NCBI GI NO: 7433167 NR Description: probable lipoxygenase (EC 1
  misc_feature (1)..(279): NCBI GI NO: 7433165 NR Description: lipoxygenase (EC 1.13.11.12) loxD - tomato
SKDKYAWLRDDEFARQAIAGINPVNIERVTSYPPVSNLDPEIYGPGLHSALTEDHIIGQLDGLTVQQALEMNRLFMVDYHDIYLPFLDRINALDGRKAYATRTILFLTRLGTLKPIAIELSLPSQSSSNQKSKRVVTPPVDATSNWMWQLAKAHVGSNDAGVHQLVNHWLRTHACLEPFILAAHRQLSAMHPIFKLLDPHMRYTLEINAVARQTLISADGVIESCFTAGQYGLEISSAAYKNKWRFDMEGLPADLIRRGMAVPDPTQPHGLKLLVEDYPCQRRSLIMVRNPNLGPNLRGTLLRKLEPNPNRY

SEQ ID NO: 3506 - protein, 242 aa, Arabidopsis thaliana
  peptide (1)..(242): Ceres Seq. ID no. 12738555
  misc_feature (1)..(217): Pfam Name: Pfam Description:  Lipoxygenase
  misc_feature (1)..(217): NCBI GI NO: 12323766 NR Description: putative lipoxygenase, 5' partial; 101105-97928
  misc_feature (1)..(217): NCBI GI NO: 15218506 NR Description: putative lipoxygenase; protein id: At1g72520
  misc_feature (1)..(240): NCBI GI NO: 6002055 NR Description: lipoxygenase [Arabidopsis thaliana]
  misc_feature (1)..(240): NCBI GI NO: 9665131 NR Description: lipoxygenase [Arabidopsis thaliana]
  misc_feature (1)..(240): NCBI GI NO: 18394479 NR Description: lipoxygenase; protein id: At1g17420
  misc_feature (1)..(209): NCBI GI NO: 32454714 NR Description: lipoxygenase [Nicotiana attenuata]
  misc_feature (1)..(209): NCBI GI NO: 28911945 NR Description: lipoxygenase [Nicotiana attenuata]
  misc_feature (1)..(217): NCBI GI NO: 14589309 NR Description: lipoxygenase [Sesbania rostrata]
  misc_feature (1)..(209): NCBI GI NO: 7433167 NR Description: probable lipoxygenase (EC 1
  misc_feature (1)..(209): NCBI GI NO: 7433165 NR Description: lipoxygenase (EC 1.13.11.12) loxD - tomato
MNRLFMVDYHDIYLPFLDRINALDGRKAYATRTILFLTRLGTLKPIAIELSLPSQSSSNQKSKRVVTPPVDATSNWMWQLAKAHVGSNDAGVHQLVNHWLRTHACLEPFILAAHRQLSAMHPIFKLLDPHMRYTLEINAVARQTLISADGVIESCFTAGQYGLEISSAAYKNKWRFDMEGLPADLIRRGMAVPDPTQPHGLKLLVEDYPCQRRSLIMVRNPNLGPNLRGTLLRKLEPNPNRY

SEQ ID NO: 3507 - protein, 240 aa, Arabidopsis thaliana
  peptide (1)..(240): Ceres Seq. ID no. 12738556
  misc_feature (2)..(224): Pfam Name: Pfam Description:  Lipoxygenase
  misc_feature (2)..(240): NCBI GI NO: 12323766 NR Description: putative lipoxygenase, 5' partial; 101105-97928
  misc_feature (2)..(240): NCBI GI NO: 15218506 NR Description: putative lipoxygenase; protein id: At1g72520
  misc_feature (2)..(240): NCBI GI NO: 6002055 NR Description: lipoxygenase [Arabidopsis thaliana]
  misc_feature (2)..(240): NCBI GI NO: 9665131 NR Description: lipoxygenase [Arabidopsis thaliana]
  misc_feature (2)..(240): NCBI GI NO: 18394479 NR Description: lipoxygenase; protein id: At1g17420
  misc_feature (2)..(240): NCBI GI NO: 32454714 NR Description: lipoxygenase [Nicotiana attenuata]
  misc_feature (2)..(231): NCBI GI NO: 28911945 NR Description: lipoxygenase [Nicotiana attenuata]
  misc_feature (2)..(239): NCBI GI NO: 14589309 NR Description: lipoxygenase [Sesbania rostrata]
  misc_feature (2)..(240): NCBI GI NO: 7433167 NR Description: probable lipoxygenase (EC 1
  misc_feature (2)..(240): NCBI GI NO: 7433165 NR Description: lipoxygenase (EC 1.13.11.12) loxD - tomato
MGLNYLLKTTHANDGLLLWSAIQTWVRTYVERYYANSNLIQTDTELQAWYSESINVGHADHRDAEWWPKLSTVEDLVSVITTIIWLASAQHAALNFGQYPYGGYVPNRPPLMRRLIPDESDPEFTSFIEDPQKYFFSSMPSLLQTTKFMAVVDTLSTHSPDEEYIGERQQPSIWTGDAEIVDAFYGFSAEIGRIEKEIDKRNRDPSCRNRCGAGVLPYELMAPSSEPGVTCRGVPNSVSI

SEQ ID NO: 3508 - DNA, 1336 bp, Arabidopsis thaliana
  misc_feature (1)..(1336): Ceres Seq. ID no. 12329843
attaaagagttttttttcgaaaagagttaaagaaaaaatgggaatgggaaggtatcagaaatctgcaacttctggtgtttcagctagatgggtttttgttctctgtatttctagcttccttcttggtgttcttgtcgttaacaggcttttggcaagttttgaaaccgtagatggcattgagagagcttcacctgagcaaaatgatcaatctagatcacttaatcctcttgttgattgtgagagcaaggaaggagacattctatctcgagtttcgcatactcatgatgttatcaagacattagacaagacaatttcttctcttgaggtagaactagctacagctcgagcagcaagatctgatggtagagatggatctccagctgttgcaaaaacagtagcagaccaatcgaagattcggcctcggatgttctttgtgatgggaatcatgactgctttcagtagcagaaaacgaagagactccataagaggaacttggcttcctaaagggaatgaattgaaaagattagagacagagaagggaatcattatgagatttgttataggtcacagttcttctcctggaggagtcttggaccacaccattgaagctgaagaagaacaacacaaagacttctttcgactgaatcacatagaaggttatcatgaattatcatctaaaacccaaatatacttctcatctgctgttgcaaaatgggatgcagacttctacatcaaagtggatgatgatgttcacgtaaatctcggaatgcttggttctacattggttgcatgaagtctggacctgtccttgctcaaaaaggagtcaaataccatgagccagaatattggaagtttggtgaagaaggaaacaaatacttcagacatgcaactggacaaatctatgcaatctccaaagatttagcaacttatatctcagttaaccggcaactacttcacaagtatgcaaatgaagatgtctctttaggttcttggttcattggtctcgatgttgaacatatcgacgatagaagcctctgctgtggaacacctttagattgtgagtggaagggtcaagcaggaaacccttgcgcagcatcgttcgattggagctgtagtggaatctgcaaatccgtagatagaatgcttgaagtacatcaacgttgtggtgaaggcgatggagcaatttggcatagtagtttctaaatattttctctctgtaatgtatagttttcagcttcttcttcttcttatggattattagtctaggttatgattatgattgatgttacatgtttaacattacagacatcatctaaaaggtcccaatttttgcctg

SEQ ID NO: 3509 - protein, 263 aa, Arabidopsis thaliana
  peptide (1)..(263): Ceres Seq. ID no. 12329844
  misc_feature (156)..(261): Pfam Name: Pfam Description:  Galactosyltransferase
  misc_feature (13)..(261): NCBI GI NO: 15223337 NR Description: Avr9 elicitor response protein, putative
  misc_feature (16)..(262): NCBI GI NO: 15220440 NR Description: putative AVR9 elicitor response protein
  misc_feature (21)..(261): NCBI GI NO: 18416895 NR Description: Avr9 elicitor response like protein
  misc_feature (21)..(261): NCBI GI NO: 7485336 NR Description: hypothetical protein F10M23
  misc_feature (26)..(262): NCBI GI NO: 15225684 NR Description: unknown protein; protein id: At2g32430.1
  misc_feature (27)..(261): NCBI GI NO: 15217544 NR Description: elicitor response protein, putative
  misc_feature (26)..(261): NCBI GI NO: 4138265 NR Description: Avr9 elicitor response protein [Nicotiana tabacum]
  misc_feature (31)..(261): NCBI GI NO: 34907342 NR Description: putative elicitor response protein
  misc_feature (26)..(261): NCBI GI NO: 12323294 NR Description: putative
  misc_feature (26)..(261): NCBI GI NO: 30699558 NR Description: Avr9 elicitor response protein -related
LKSFFSKRVKEKMGMGRYQKSATSGVSARWVFVLCISSFLLGVLVVNRLLASFETVDGIERASPEQNDQSRSLNPLVDCESKEGDILSRVSHTHDVIKTLDKTISSLEVELATARAARSDGRDGSPAVAKTVADQSKIRPRMFFVMGIMTAFSSRKRRDSIRGTWLPKGNELKRLETEKGIIMRFVIGHSSSPGGVLDHTIEAEEEQHKDFFRLNHIEGYHELSSKTQIYFSSAVAKWDADFYIKVDDDVHVNLGMLGSTLVA

SEQ ID NO: 3510 - protein, 251 aa, Arabidopsis thaliana
  peptide (1)..(251): Ceres Seq. ID no. 12329845
  misc_feature (144)..(249): Pfam Name: Pfam Description:  Galactosyltransferase
  misc_feature (1)..(249): NCBI GI NO: 15223337 NR Description: Avr9 elicitor response protein, putative
  misc_feature (4)..(250): NCBI GI NO: 15220440 NR Description: putative AVR9 elicitor response protein
  misc_feature (9)..(249): NCBI GI NO: 18416895 NR Description: Avr9 elicitor response like protein
  misc_feature (9)..(249): NCBI GI NO: 7485336 NR Description: hypothetical protein F10M23
  misc_feature (14)..(250): NCBI GI NO: 15225684 NR Description: unknown protein; protein id: At2g32430.1
  misc_feature (15)..(249): NCBI GI NO: 15217544 NR Description: elicitor response protein, putative
  misc_feature (14)..(249): NCBI GI NO: 4138265 NR Description: Avr9 elicitor response protein [Nicotiana tabacum]
  misc_feature (19)..(249): NCBI GI NO: 34907342 NR Description: putative elicitor response protein
  misc_feature (14)..(249): NCBI GI NO: 12323294 NR Description: putative
  misc_feature (14)..(249): NCBI GI NO: 30699558 NR Description: Avr9 elicitor response protein -related
MGMGRYQKSATSGVSARWVFVLCISSFLLGVLVVNRLLASFETVDGIERASPEQNDQSRSLNPLVDCESKEGDILSRVSHTHDVIKTLDKTISSLEVELATARAARSDGRDGSPAVAKTVADQSKIRPRMFFVMGIMTAFSSRKRRDSIRGTWLPKGNELKRLETEKGIIMRFVIGHSSSPGGVLDHTIEAEEEQHKDFFRLNHIEGYHELSSKTQIYFSSAVAKWDADFYIKVDDDVHVNLGMLGSTLVA

SEQ ID NO: 3511 - protein, 249 aa, Arabidopsis thaliana
  peptide (1)..(249): Ceres Seq. ID no. 12329846
  misc_feature (142)..(247): Pfam Name: Pfam Description:  Galactosyltransferase
  misc_feature (1)..(247): NCBI GI NO: 15223337 NR Description: Avr9 elicitor response protein, putative
  misc_feature (2)..(248): NCBI GI NO: 15220440 NR Description: putative AVR9 elicitor response protein
  misc_feature (7)..(247): NCBI GI NO: 18416895 NR Description: Avr9 elicitor response like protein
  misc_feature (7)..(247): NCBI GI NO: 7485336 NR Description: hypothetical protein F10M23
  misc_feature (12)..(248): NCBI GI NO: 15225684 NR Description: unknown protein; protein id: At2g32430.1
  misc_feature (13)..(247): NCBI GI NO: 15217544 NR Description: elicitor response protein, putative
  misc_feature (12)..(247): NCBI GI NO: 4138265 NR Description: Avr9 elicitor response protein [Nicotiana tabacum]
  misc_feature (17)..(247): NCBI GI NO: 34907342 NR Description: putative elicitor response protein
  misc_feature (12)..(247): NCBI GI NO: 12323294 NR Description: putative
  misc_feature (12)..(247): NCBI GI NO: 30699558 NR Description: Avr9 elicitor response protein -related
MGRYQKSATSGVSARWVFVLCISSFLLGVLVVNRLLASFETVDGIERASPEQNDQSRSLNPLVDCESKEGDILSRVSHTHDVIKTLDKTISSLEVELATARAARSDGRDGSPAVAKTVADQSKIRPRMFFVMGIMTAFSSRKRRDSIRGTWLPKGNELKRLETEKGIIMRFVIGHSSSPGGVLDHTIEAEEEQHKDFFRLNHIEGYHELSSKTQIYFSSAVAKWDADFYIKVDDDVHVNLGMLGSTLVA

SEQ ID NO: 3512 - DNA, 958 bp, Arabidopsis thaliana
  misc_feature (1)..(958): Ceres Seq. ID no. 12326648
tttatccagaacattccgactactctctccctgagcttcggccatggcggttcgtctcgcgaggtcattggctgcgtcaccctcgtcacgtccatcgtgtttatccctcggaaatcgcttctcagcctcagatatcacttcatctgcgattaacggcggcgagttttctgatttcgttagagctttcgccttttattcgtcttcgtcctcttggtggtcgtctcccgatgatttgacggcgtcatcgaagaggaaagagaagaagactacagagcgtttctctgccgtgattgacgcagtccatgaccggaaactcccgccggagctacgtgggcggcgcgatttcgtaaggtcagagactgatataatcaacgtggtcgagcaaaggatatggcattcaatggaagaaggccactttgagaacttacccggtaaaggcaaacccttgaacctccatacaaatcctcacgcagacccagcggaggatacattgtatcggattcttaacaagaacgggtttgctcccgaatgggtggagctcaacaaagagataagaaacaaagcaaaagaatggagagtttcactgaagaaagcatggacaatgaaactcgaggaagaccaatcgggatgggaagagagatcagatttgctgaaaaacgaattgaaacaaatcaataacatggtattcaggtacaatctgatcgttcctttcggccgtcaaatgtttggactgaagtgggagaaagagattgatcgcttgaaagaataacatcttcagaagccaaaaggttggtcacactactatgttcttgtgtttgtagtatatctattgatagtatacgagtcaatgtggctattggtgcttaggctagatataaaaagaataagaaacaagtgtttgagttgtttcatgtatgttgtatccatcaaatactctcttgaaagataattatagcta

SEQ ID NO: 3513 - protein, 241 aa, Arabidopsis thaliana
  peptide (1)..(241): Ceres Seq. ID no. 12326649
  misc_feature (1)..(241): NCBI GI NO: 18414270 NR Description: putative protein; protein id: At5g03560
  misc_feature (101)..(241): NCBI GI NO: 11357378 NR Description: hypothetical protein F12E4
  misc_feature (1)..(110): NCBI GI NO: 11357378 NR Description: hypothetical protein F12E4
  misc_feature (98)..(241): NCBI GI NO: 24582398 NR Description: CG13776-PA [Drosophila melanogaster]
  misc_feature (108)..(241): NCBI GI NO: 20149746 NR Description: cDNA sequence BC020175; cDNA, sequence BC020175
  misc_feature (108)..(241): NCBI GI NO: 26349033 NR Description: unnamed protein product [Mus musculus]
  misc_feature (111)..(234): NCBI GI NO: 31233474 NR Description: ENSANGP00000015813 [Anopheles gambiae]
  misc_feature (108)..(241): NCBI GI NO: 40254908 NR Description: chromosome 21 open reading frame 55 [Homo sapiens]
  misc_feature (130)..(241): NCBI GI NO: 13542805 NR Description: Unknown (protein for IMAGE:3483507) [Mus musculus]
  misc_feature (108)..(222): NCBI GI NO: 7020577 NR Description: unnamed protein product [Homo sapiens]
MAVRLARSLAASPSSRPSCLSLGNRFSASDITSSAINGGEFSDFVRAFAFYSSSSSWWSSPDDLTASSKRKEKKTTERFSAVIDAVHDRKLPPELRGRRDFVRSETDIINVVEQRIWHSMEEGHFENLPGKGKPLNLHTNPHADPAEDTLYRILNKNGFAPEWVELNKEIRNKAKEWRVSLKKAWTMKLEEDQSGWEERSDLLKNELKQINNMVFRYNLIVPFGRQMFGLKWEKEIDRLKE

SEQ ID NO: 3514 - protein, 122 aa, Arabidopsis thaliana
  peptide (1)..(122): Ceres Seq. ID no. 12326650
  misc_feature (1)..(122): NCBI GI NO: 18414270 NR Description: putative protein; protein id: At5g03560
  misc_feature (1)..(122): NCBI GI NO: 11357378 NR Description: hypothetical protein F12E4
  misc_feature (1)..(122): NCBI GI NO: 24582398 NR Description: CG13776-PA [Drosophila melanogaster]
  misc_feature (1)..(122): NCBI GI NO: 20149746 NR Description: cDNA sequence BC020175; cDNA, sequence BC020175
  misc_feature (1)..(122): NCBI GI NO: 26349033 NR Description: unnamed protein product [Mus musculus]
  misc_feature (1)..(115): NCBI GI NO: 31233474 NR Description: ENSANGP00000015813 [Anopheles gambiae]
  misc_feature (1)..(122): NCBI GI NO: 40254908 NR Description: chromosome 21 open reading frame 55 [Homo sapiens]
  misc_feature (11)..(122): NCBI GI NO: 13542805 NR Description: Unknown (protein for IMAGE:3483507) [Mus musculus]
  misc_feature (1)..(103): NCBI GI NO: 7020577 NR Description: unnamed protein product [Homo sapiens]
  misc_feature (1)..(103): NCBI GI NO: 20810277 NR Description: Unknown (protein for MGC:33722) [Homo sapiens]
MEEGHFENLPGKGKPLNLHTNPHADPAEDTLYRILNKNGFAPEWVELNKEIRNKAKEWRVSLKKAWTMKLEEDQSGWEERSDLLKNELKQINNMVFRYNLIVPFGRQMFGLKWEKEIDRLKE

SEQ ID NO: 3515 - DNA, 871 bp, Arabidopsis thaliana
  misc_feature (1)..(871): Ceres Seq. ID no. 12421004
gaaacaaaaactcgtggaggagatatgcaattgctgacgctaaatccggcggccatttccaggacgccgccgcaagccatagacccttcctcatcctcgagtcttcttcttccttttcctcagattttgagctcccaacgcgctcttggtcttgtagctaggccttgtaatccacttcgacgaggattatctaggtttttatcaagtcgacagcttttccgacgatccaaagttgtcaaggcagtagcaaccccagaccccatcttggaagtacctttaactgaggaaaatgtagaaagcgttttggatgaaatccgaccttaccttatgtctgatggtggtaatgtggcattacatgagatcgatggaaatattgtgcgggttaagctgcagggagcatgcggatcatgtccaagttctactatgacaatgaagatgggtattgagcgtcgtctaatggaaaagatccctgaaatagtggctgtagaagctcttccagatgaagagactggccttgaactgaatgaggaaaacattgaaaaggtgctggaagaaatcaggccttacttaatcggaacagcagatggatcgcttgatctagtggagattgaagatccaatcgtgaagataagaatcacaggacctgcagctggagtcatgacagttcgtgtagcagtcactcagaaactaagagagaaaattccatcaatcgcagctgttcaacttatatagaaacaacaactcttcttgtatgctttgtattagctcccttgtatagttgttgtgcatagattatgtgttttgttgacatttgctatttgtcctcaaataagttttcaacatttttgttttacttagaaaaaaagtcctt

SEQ ID NO: 3516 - protein, 243 aa, Arabidopsis thaliana
  peptide (1)..(243): Ceres Seq. ID no. 12421005
  misc_feature (98)..(165): Pfam Name: Pfam Description:  NifU-like domain
  misc_feature (9)..(243): NCBI GI NO: 18423084 NR Description: Expressed protein; protein id: At5g49940
  misc_feature (9)..(222): NCBI GI NO: 8777425 NR Description: gene_id:K9P8
  misc_feature (56)..(243): NCBI GI NO: 30698492 NR Description: NifU1 [Oryza sativa (japonica cultivar-group)]
  misc_feature (7)..(243): NCBI GI NO: 18416645 NR Description: nitrogen fixation like protein
  misc_feature (28)..(243): NCBI GI NO: 7485833 NR Description: hypothetical protein F20B18
  misc_feature (42)..(243): NCBI GI NO: 21554503 NR Description: nitrogen fixation like protein
  misc_feature (91)..(162): NCBI GI NO: 33860975 NR Description: NifU-like protein
  misc_feature (93)..(163): NCBI GI NO: 16332125 NR Description: NifU protein [Synechocystis sp. PCC 6803]
  misc_feature (93)..(163): NCBI GI NO: 17228804 NR Description: NifU like protein [Nostoc sp. PCC 7120]
  misc_feature (93)..(163): NCBI GI NO: 22298836 NR Description: ORF_ID:tsl1293~similar to NifU protein
ETKTRGGDMQLLTLNPAAISRTPPQAIDPSSSSSLLLPFPQILSSQRALGLVARPCNPLRRGLSRFLSSRQLFRRSKVVKAVATPDPILEVPLTEENVESVLDEIRPYLMSDGGNVALHEIDGNIVRVKLQGACGSCPSSTMTMKMGIERRLMEKIPEIVAVEALPDEETGLELNEENIEKVLEEIRPYLIGTADGSLDLVEIEDPIVKIRITGPAAGVMTVRVAVTQKLREKIPSIAAVQLI

SEQ ID NO: 3517 - protein, 235 aa, Arabidopsis thaliana
  peptide (1)..(235): Ceres Seq. ID no. 12421006
  misc_feature (90)..(157): Pfam Name: Pfam Description:  NifU-like domain
  misc_feature (1)..(235): NCBI GI NO: 18423084 NR Description: Expressed protein; protein id: At5g49940
  misc_feature (1)..(214): NCBI GI NO: 8777425 NR Description: gene_id:K9P8
  misc_feature (48)..(235): NCBI GI NO: 30698492 NR Description: NifU1 [Oryza sativa (japonica cultivar-group)]
  misc_feature (1)..(235): NCBI GI NO: 18416645 NR Description: nitrogen fixation like protein
  misc_feature (20)..(235): NCBI GI NO: 7485833 NR Description: hypothetical protein F20B18
  misc_feature (34)..(235): NCBI GI NO: 21554503 NR Description: nitrogen fixation like protein
  misc_feature (83)..(154): NCBI GI NO: 33860975 NR Description: NifU-like protein
  misc_feature (85)..(155): NCBI GI NO: 16332125 NR Description: NifU protein [Synechocystis sp. PCC 6803]
  misc_feature (85)..(155): NCBI GI NO: 17228804 NR Description: NifU like protein [Nostoc sp. PCC 7120]
  misc_feature (85)..(155): NCBI GI NO: 22298836 NR Description: ORF_ID:tsl1293~similar to NifU protein
MQLLTLNPAAISRTPPQAIDPSSSSSLLLPFPQILSSQRALGLVARPCNPLRRGLSRFLSSRQLFRRSKVVKAVATPDPILEVPLTEENVESVLDEIRPYLMSDGGNVALHEIDGNIVRVKLQGACGSCPSSTMTMKMGIERRLMEKIPEIVAVEALPDEETGLELNEENIEKVLEEIRPYLIGTADGSLDLVEIEDPIVKIRITGPAAGVMTVRVAVTQKLREKIPSIAAVQLI

SEQ ID NO: 3518 - protein, 134 aa, Arabidopsis thaliana
  peptide (1)..(134): Ceres Seq. ID no. 12421007
  misc_feature (1)..(56): Pfam Name: Pfam Description:  NifU-like domain
  misc_feature (1)..(134): NCBI GI NO: 18423084 NR Description: Expressed protein; protein id: At5g49940
  misc_feature (1)..(113): NCBI GI NO: 8777425 NR Description: gene_id:K9P8
  misc_feature (1)..(134): NCBI GI NO: 30698492 NR Description: NifU1 [Oryza sativa (japonica cultivar-group)]
  misc_feature (1)..(134): NCBI GI NO: 18416645 NR Description: nitrogen fixation like protein
  misc_feature (1)..(134): NCBI GI NO: 7485833 NR Description: hypothetical protein F20B18
  misc_feature (1)..(134): NCBI GI NO: 21554503 NR Description: nitrogen fixation like protein
  misc_feature (1)..(53): NCBI GI NO: 33860975 NR Description: NifU-like protein
  misc_feature (1)..(54): NCBI GI NO: 16332125 NR Description: NifU protein [Synechocystis sp. PCC 6803]
  misc_feature (1)..(54): NCBI GI NO: 17228804 NR Description: NifU like protein [Nostoc sp. PCC 7120]
  misc_feature (1)..(54): NCBI GI NO: 22298836 NR Description: ORF_ID:tsl1293~similar to NifU protein
MSDGGNVALHEIDGNIVRVKLQGACGSCPSSTMTMKMGIERRLMEKIPEIVAVEALPDEETGLELNEENIEKVLEEIRPYLIGTADGSLDLVEIEDPIVKIRITGPAAGVMTVRVAVTQKLREKIPSIAAVQLI

SEQ ID NO: 3519 - DNA, 1207 bp, Arabidopsis thaliana
  misc_feature (1)..(1207): Ceres Seq. ID no. 12327556
aagtacattatcatcatttcaagaaacagagagagactaatggcgcaaaaaccacgaacggtgatctgcgtcggagacatccatggatacatatcaaagctcaataacctctggcttaatctccaatctgccatcgacccatcagatttcagctcagctctcgtcatattccttggcgattactgcgatcgtggaccggagactcgaaaagtcatcgatttcttaatctctctgccggagaaacatcccgatcaaactcatgtctttctcgccgggaaccatgactttgccttctctgggttcttaggtttgttgcctcgtccttcagatggatctgatttgaaggatacgtggaaggagtactcaaaaagtgaggagacagaaggatggtatacaggtgaagggttcgaagatatgcatcttcaaggtagaagatgggctggtaaaattaaggctacgttcaattctgtgaaagggatggcttataaaggatcgatttacgatgctggatcgacttttgaatcttatggcgttccacatggatcttctgatttgatgaaggcagtacctgagagtcacaagaagttcttgaccaatatggtatgggttcatgaagaggacgatgtttgtatagaaacagaggaagggcttaagcattgtaagttgatcgccgtacatgctggtttagagaaagggaataacgtagaagaacaactgaagcttttgagagctaaagacactagcatctcaaaaatacaacatctaagtggtaggaaaaacgtttgggacatcccacaggagctggatgataaacatactgttgttgttagcgggcaccatggaaaacttcacatcgatggtatgagattgatcatcgatgaaggcggtggattcccggataaaccagtggcagcaattgttcttccttccaagaagattatccgtgacaccgataatttgtctagttaagtttttctcatctactattgtaccaaagtcaattttgatttcaaaataaatgtagtaaggtttagcactaaattgaatttacttttcttacaaagaaaataaatgggcctctgaaagagtaagcccagattttggaagcggtctagtggtgtaatgtagctcgaaatcttttgggttgttcaaaaaagcccaaacaaaacatgctataatccatttttaatcgaaattatttttccgc

SEQ ID NO: 3520 - protein, 322 aa, Arabidopsis thaliana
  peptide (1)..(322): Ceres Seq. ID no. 12327557
  misc_feature (19)..(283): Pfam Name: Pfam Description:  Calcineurin-like phosphoesterase
  misc_feature (14)..(322): NCBI GI NO: 18398699 NR Description: expressed protein; protein id: At3g09970
  misc_feature (14)..(322): NCBI GI NO: 21618122 NR Description: unknown [Arabidopsis thaliana]
  misc_feature (13)..(322): NCBI GI NO: 18398696 NR Description: expressed protein; protein id: At3g09960
  misc_feature (14)..(322): NCBI GI NO: 6143880 NR Description: unknown protein [Arabidopsis thaliana]
  misc_feature (18)..(322): NCBI GI NO: 38347604 NR Description: OSJNBa0042I15.17
  misc_feature (172)..(322): NCBI GI NO: 19424085 NR Description: unknown protein [Arabidopsis thaliana]
  misc_feature (24)..(108): NCBI GI NO: 13475753 NR Description: serine/threonine protein phosphatase
KYIIIISRNRERLMAQKPRTVICVGDIHGYISKLNNLWLNLQSAIDPSDFSSALVIFLGDYCDRGPETRKVIDFLISLPEKHPDQTHVFLAGNHDFAFSGFLGLLPRPSDGSDLKDTWKEYSKSEETEGWYTGEGFEDMHLQGRRWAGKIKATFNSVKGMAYKGSIYDAGSTFESYGVPHGSSDLMKAVPESHKKFLTNMVWVHEEDDVCIETEEGLKHCKLIAVHAGLEKGNNVEEQLKLLRAKDTSISKIQHLSGRKNVWDIPQELDDKHTVVVSGHHGKLHIDGMRLIIDEGGGFPDKPVAAIVLPSKKIIRDTDNLSS

SEQ ID NO: 3521 - protein, 309 aa, Arabidopsis thaliana
  peptide (1)..(309): Ceres Seq. ID no. 12327558
  misc_feature (6)..(270): Pfam Name: Pfam Description:  Calcineurin-like phosphoesterase
  misc_feature (1)..(309): NCBI GI NO: 18398699 NR Description: expressed protein; protein id: At3g09970
  misc_feature (1)..(309): NCBI GI NO: 21618122 NR Description: unknown [Arabidopsis thaliana]
  misc_feature (1)..(309): NCBI GI NO: 18398696 NR Description: expressed protein; protein id: At3g09960
  misc_feature (1)..(309): NCBI GI NO: 6143880 NR Description: unknown protein [Arabidopsis thaliana]
  misc_feature (5)..(309): NCBI GI NO: 38347604 NR Description: OSJNBa0042I15.17
  misc_feature (159)..(309): NCBI GI NO: 19424085 NR Description: unknown protein [Arabidopsis thaliana]
  misc_feature (11)..(95): NCBI GI NO: 13475753 NR Description: serine/threonine protein phosphatase
MAQKPRTVICVGDIHGYISKLNNLWLNLQSAIDPSDFSSALVIFLGDYCDRGPETRKVIDFLISLPEKHPDQTHVFLAGNHDFAFSGFLGLLPRPSDGSDLKDTWKEYSKSEETEGWYTGEGFEDMHLQGRRWAGKIKATFNSVKGMAYKGSIYDAGSTFESYGVPHGSSDLMKAVPESHKKFLTNMVWVHEEDDVCIETEEGLKHCKLIAVHAGLEKGNNVEEQLKLLRAKDTSISKIQHLSGRKNVWDIPQELDDKHTVVVSGHHGKLHIDGMRLIIDEGGGFPDKPVAAIVLPSKKIIRDTDNLSS

SEQ ID NO: 3522 - protein, 184 aa, Arabidopsis thaliana
  peptide (1)..(184): Ceres Seq. ID no. 12327559
  misc_feature (1)..(145): Pfam Name: Pfam Description:  Calcineurin-like phosphoesterase
  misc_feature (1)..(184): NCBI GI NO: 18398699 NR Description: expressed protein; protein id: At3g09970
  misc_feature (1)..(184): NCBI GI NO: 21618122 NR Description: unknown [Arabidopsis thaliana]
  misc_feature (1)..(184): NCBI GI NO: 18398696 NR Description: expressed protein; protein id: At3g09960
  misc_feature (1)..(184): NCBI GI NO: 6143880 NR Description: unknown protein [Arabidopsis thaliana]
  misc_feature (1)..(184): NCBI GI NO: 38347604 NR Description: OSJNBa0042I15.17
  misc_feature (34)..(184): NCBI GI NO: 19424085 NR Description: unknown protein [Arabidopsis thaliana]
MHLQGRRWAGKIKATFNSVKGMAYKGSIYDAGSTFESYGVPHGSSDLMKAVPESHKKFLTNMVWVHEEDDVCIETEEGLKHCKLIAVHAGLEKGNNVEEQLKLLRAKDTSISKIQHLSGRKNVWDIPQELDDKHTVVVSGHHGKLHIDGMRLIIDEGGGFPDKPVAAIVLPSKKIIRDTDNLSS

SEQ ID NO: 3523 - DNA, 1799 bp, Arabidopsis thaliana
  misc_feature (1)..(1799): Ceres Seq. ID no. 12326657
acatctatctctttctctctctttccttgcaaattttcagctctcaaagagttaagagttagagagagagaggatggccattagggaaatcaaagatgtagagaggggtgaaatagtgaataaggtagaagatcttgggaaaccatttttgactcatgaagatgatgaaaaagagagtgagaataatgaatcatatttgatggttctcttcagtacttttgttgctgtctgtggctcctttgagtttggctcttgtgttggatactcagcgcctactcagtcatctataagacaagatctcaatctctcccttgcagagttctccatgtttggatccatcttaactatcggtgcaatgcttggtgctgttatgagtgggaaaatttcagatttctccggccgaaaaggggcaatgaggacatcagcttgcttctgcattacaggttggctcgctgtcttcttcaccaagggggcattgttacttgatgtaggaaggttctttacaggatatggaattggagttttttcttatgtggtccctgtgtacattgctgagatatctcccaagaatctccgaggtggactcacaacactgaaccaactcatgattgtgatcggctcatcggtttctttcttgatcggatctctcatttcttggaaaactcttgccctaaccggacttgctccctgcattgttttgctctttggcttgtgcttcatacccgaatctcctcgatggctggcaaaagcaggccatgagaaagagtttcgcgtagccctgcaaaagctgcgaggaaaagatgcagatatcacaaatgaagcagacggtattcaagtctcgattcaagctctagagattcttccaaaagcaagaatccaagaccttgtgtccaagaaatatggtcgatctgtcatcattggtgtttccctgatggtattccaacagtttgttggaatcaatgggatcggattctacgcaagtgaaacgtttgtaaaagccggatttacctctgggaaactaggaacaatcgctatcgcttgtgttcaggtgccaataactgttcttggaacaatcttgatagataaatctggacgaaggccactaattatgatttcagctggtggtatcttcttgggatgcatactcacaggcacatctttcttactcaagggacagagcttgttgcttgaatgggtcccttccttagccgttggaggtgtacttatctatgtagctgctttctccatcggaatgggacctgttccttgggtgataatgtctgagatatttccgataaacgtaaagggaatcgcaggaagcttagtggtactagtgaattggtctggtgcttgggctgtttcttacactttcaacttcctcatgagctggagctctccaggtacattctatttgtactcggcttttgcagctgcgacgataatatttgtggcgaagatggtgccagagacgaaagggaagacactggaagagatccaagcttgtattcgaagagaaacataagaagaaagatacaatcaatgttatgggaatgttatcaaatgaaaagactcgaactattcccgttggtgagctcaaagtggagtagagtaaaaattatcgccgggagataacgttgaaagtccgatgatgaggcataagggttttgcatgaatgttatgagaataggtttacttttatgtatttgttcacgttttaagttttcatcaaataggtttttgattggtatacagtatgtggaatattaatagaatggagtggcagatttcatattcaatca

SEQ ID NO: 3524 - protein, 482 aa, Arabidopsis thaliana
  peptide (1)..(482): Ceres Seq. ID no. 12326658
  misc_feature (47)..(478): Pfam Name: and other Pfam Description: Sugar
  misc_feature (1)..(482): NCBI GI NO: 18419741 NR Description: sugar transporter - like protein
  misc_feature (1)..(482): NCBI GI NO: 21592787 NR Description: sugar transporter-like protein
  misc_feature (7)..(478): NCBI GI NO: 23504385 NR Description: putative sugar transporter
  misc_feature (11)..(476): NCBI GI NO: 30679397 NR Description: sugar transporter family [Arabidopsis thaliana]
  misc_feature (15)..(476): NCBI GI NO: 6729025 NR Description: putative sugar transporter [Arabidopsis thaliana]
  misc_feature (43)..(478): NCBI GI NO: 18407508 NR Description: putative sugar transporter; protein id: At2g48020
  misc_feature (43)..(478): NCBI GI NO: 21536914 NR Description: putative sugar transporter [Arabidopsis thaliana]
  misc_feature (33)..(478): NCBI GI NO: 30695810 NR Description: sugar transporter, putative [Arabidopsis thaliana]
  misc_feature (1)..(326): NCBI GI NO: 25405762 NR Description: hypothetical protein T22H22.15
  misc_feature (378)..(478): NCBI GI NO: 25405762 NR Description: hypothetical protein T22H22.15
MAIREIKDVERGEIVNKVEDLGKPFLTHEDDEKESENNESYLMVLFSTFVAVCGSFEFGSCVGYSAPTQSSIRQDLNLSLAEFSMFGSILTIGAMLGAVMSGKISDFSGRKGAMRTSACFCITGWLAVFFTKGALLLDVGRFFTGYGIGVFSYVVPVYIAEISPKNLRGGLTTLNQLMIVIGSSVSFLIGSLISWKTLALTGLAPCIVLLFGLCFIPESPRWLAKAGHEKEFRVALQKLRGKDADITNEADGIQVSIQALEILPKARIQDLVSKKYGRSVIIGVSLMVFQQFVGINGIGFYASETFVKAGFTSGKLGTIAIACVQVPITVLGTILIDKSGRRPLIMISAGGIFLGCILTGTSFLLKGQSLLLEWVPSLAVGGVLIYVAAFSIGMGPVPWVIMSEIFPINVKGIAGSLVVLVNWSGAWAVSYTFNFLMSWSSPGTFYLYSAFAAATIIFVAKMVPETKGKTLEEIQACIRRET

SEQ ID NO: 3525 - protein, 440 aa, Arabidopsis thaliana
  peptide (1)..(440): Ceres Seq. ID no. 12326659
  misc_feature (5)..(436): Pfam Name: and other Pfam Description: Sugar
  misc_feature (1)..(440): NCBI GI NO: 18419741 NR Description: sugar transporter - like protein
  misc_feature (1)..(440): NCBI GI NO: 21592787 NR Description: sugar transporter-like protein
  misc_feature (1)..(436): NCBI GI NO: 23504385 NR Description: putative sugar transporter
  misc_feature (1)..(434): NCBI GI NO: 30679397 NR Description: sugar transporter family [Arabidopsis thaliana]
  misc_feature (1)..(434): NCBI GI NO: 6729025 NR Description: putative sugar transporter [Arabidopsis thaliana]
  misc_feature (1)..(436): NCBI GI NO: 18407508 NR Description: putative sugar transporter; protein id: At2g48020
  misc_feature (1)..(436): NCBI GI NO: 21536914 NR Description: putative sugar transporter [Arabidopsis thaliana]
  misc_feature (1)..(436): NCBI GI NO: 30695810 NR Description: sugar transporter, putative [Arabidopsis thaliana]
  misc_feature (1)..(284): NCBI GI NO: 25405762 NR Description: hypothetical protein T22H22.15
  misc_feature (336)..(436): NCBI GI NO: 25405762 NR Description: hypothetical protein T22H22.15
MVLFSTFVAVCGSFEFGSCVGYSAPTQSSIRQDLNLSLAEFSMFGSILTIGAMLGAVMSGKISDFSGRKGAMRTSACFCITGWLAVFFTKGALLLDVGRFFTGYGIGVFSYVVPVYIAEISPKNLRGGLTTLNQLMIVIGSSVSFLIGSLISWKTLALTGLAPCIVLLFGLCFIPESPRWLAKAGHEKEFRVALQKLRGKDADITNEADGIQVSIQALEILPKARIQDLVSKKYGRSVIIGVSLMVFQQFVGINGIGFYASETFVKAGFTSGKLGTIAIACVQVPITVLGTILIDKSGRRPLIMISAGGIFLGCILTGTSFLLKGQSLLLEWVPSLAVGGVLIYVAAFSIGMGPVPWVIMSEIFPINVKGIAGSLVVLVNWSGAWAVSYTFNFLMSWSSPGTFYLYSAFAAATIIFVAKMVPETKGKTLEEIQACIRRET

SEQ ID NO: 3526 - protein, 398 aa, Arabidopsis thaliana
  peptide (1)..(398): Ceres Seq. ID no. 12326660
  misc_feature (1)..(394): Pfam Name: and other Pfam Description: Sugar
  misc_feature (1)..(398): NCBI GI NO: 18419741 NR Description: sugar transporter - like protein
  misc_feature (1)..(398): NCBI GI NO: 21592787 NR Description: sugar transporter-like protein
  misc_feature (1)..(394): NCBI GI NO: 23504385 NR Description: putative sugar transporter
  misc_feature (1)..(392): NCBI GI NO: 30679397 NR Description: sugar transporter family [Arabidopsis thaliana]
  misc_feature (1)..(392): NCBI GI NO: 6729025 NR Description: putative sugar transporter [Arabidopsis thaliana]
  misc_feature (1)..(394): NCBI GI NO: 18407508 NR Description: putative sugar transporter; protein id: At2g48020
  misc_feature (1)..(394): NCBI GI NO: 21536914 NR Description: putative sugar transporter [Arabidopsis thaliana]
  misc_feature (1)..(394): NCBI GI NO: 30695810 NR Description: sugar transporter, putative [Arabidopsis thaliana]
  misc_feature (1)..(242): NCBI GI NO: 25405762 NR Description: hypothetical protein T22H22.15
  misc_feature (294)..(394): NCBI GI NO: 25405762 NR Description: hypothetical protein T22H22.15
MFGSILTIGAMLGAVMSGKISDFSGRKGAMRTSACFCITGWLAVFFTKGALLLDVGRFFTGYGIGVFSYVVPVYIAEISPKNLRGGLTTLNQLMIVIGSSVSFLIGSLISWKTLALTGLAPCIVLLFGLCFIPESPRWLAKAGHEKEFRVALQKLRGKDADITNEADGIQVSIQALEILPKARIQDLVSKKYGRSVIIGVSLMVFQQFVGINGIGFYASETFVKAGFTSGKLGTIAIACVQVPITVLGTILIDKSGRRPLIMISAGGIFLGCILTGTSFLLKGQSLLLEWVPSLAVGGVLIYVAAFSIGMGPVPWVIMSEIFPINVKGIAGSLVVLVNWSGAWAVSYTFNFLMSWSSPGTFYLYSAFAAATIIFVAKMVPETKGKTLEEIQACIRRET

SEQ ID NO: 3527 - DNA, 793 bp, Arabidopsis thaliana
  misc_feature (1)..(793): Ceres Seq. ID no. 12394112
aagtcattcaaattgtcacccgtatctgccaaaaaccctctaaccactcaaaaaaatatctctgctctgctccaatggcgtcgttactcgattccgtcaccgtgacccgcgtgttttctctgccgattgcggcttcggtctcgtcttcttcagctgctccgtcggtttcacgacgccggatttctcccgccaggtttctggaattcagaggtttgaagtcttcgcggagtttggtgactcagtcggccagtctgggtgcgaatcgtagaaccagaatcgctcgcggtggacgaatcgcctgtgaggctcaggacaccactgccgccgccgtcgaagtaccaaatctgtctgattcagaatggcaaacaaaggttctggaatcagatgtcccagttctggtcgagttctgggcaccatggtgtggaccttgccgtatgattcaccccatagttgaccagctaggccaaagatttcgcagggaagttcaaattctacaaaatcaacactgacgagagcccaaatacagcaaaccgttacgggatacgaagcgttccaacagtaatcatcttcaaaggcggtgagaagaaagatagcatcattggagctgtgcctagagagacgttggagaaaactatagaaagattcttggtcgagtaacaaaatttgactcttttgtcactctgaaccattttaccttatcttctctcttgtaatctctgtaaagtcttttaagtttttgactattatgttatcgtgggtcctctttgtcttcttcaataaaaaaaatggaaac

SEQ ID NO: 3528 - protein, 168 aa, Arabidopsis thaliana
  peptide (1)..(168): Ceres Seq. ID no. 12394113
  misc_feature (25)..(157): NCBI GI NO: 15232567 NR Description: thioredoxin m4; protein id: At3g15360
  misc_feature (25)..(157): NCBI GI NO: 6539614 NR Description: thioredoxin m4 [Arabidopsis thaliana]
  misc_feature (38)..(157): NCBI GI NO: 15594012 NR Description: putative thioredoxin m2 [Pisum sativum]
  misc_feature (46)..(162): NCBI GI NO: 15236327 NR Description: putative M-type thioredoxin; protein id: At4g03520
  misc_feature (46)..(162): NCBI GI NO: 6539610 NR Description: thioredoxin m2 [Arabidopsis thaliana]
  misc_feature (46)..(162): NCBI GI NO: 21618235 NR Description: putative M-type thioredoxin [Arabidopsis thaliana]
  misc_feature (39)..(165): NCBI GI NO: 11135407 NR Description: Thioredoxin M-type, chloroplast precursor (TRX-M)
  misc_feature (48)..(157): NCBI GI NO: 30678634 NR Description: thioredoxin M-type 1, chloroplast precursor
  misc_feature (25)..(162): NCBI GI NO: 38346628 NR Description: OSJNBa0074L08.22
  misc_feature (40)..(163): NCBI GI NO: 21354 NR Description: thioredoxin M precursor (AA -67 to 114)
VIQIVTRICQKPSNHSKKYLCSAPMASLLDSVTVTRVFSLPIAASVSSSSAAPSVSRRRISPARFLEFRGLKSSRSLVTQSASLGANRRTRIARGGRIACEAQDTTAAAVEVPNLSDSEWQTKVLESDVPVLVEFWAPWCGPCRMIHPIVDQLGQRFRREVQILQNQH

SEQ ID NO: 3529 - protein, 144 aa, Arabidopsis thaliana
  peptide (1)..(144): Ceres Seq. ID no. 12394114
  misc_feature (1)..(133): NCBI GI NO: 15232567 NR Description: thioredoxin m4; protein id: At3g15360
  misc_feature (1)..(133): NCBI GI NO: 6539614 NR Description: thioredoxin m4 [Arabidopsis thaliana]
  misc_feature (14)..(133): NCBI GI NO: 15594012 NR Description: putative thioredoxin m2 [Pisum sativum]
  misc_feature (22)..(138): NCBI GI NO: 15236327 NR Description: putative M-type thioredoxin; protein id: At4g03520
  misc_feature (22)..(138): NCBI GI NO: 6539610 NR Description: thioredoxin m2 [Arabidopsis thaliana]
  misc_feature (22)..(138): NCBI GI NO: 21618235 NR Description: putative M-type thioredoxin [Arabidopsis thaliana]
  misc_feature (15)..(141): NCBI GI NO: 11135407 NR Description: Thioredoxin M-type, chloroplast precursor (TRX-M)
  misc_feature (24)..(133): NCBI GI NO: 30678634 NR Description: thioredoxin M-type 1, chloroplast precursor
  misc_feature (1)..(138): NCBI GI NO: 38346628 NR Description: OSJNBa0074L08.22
  misc_feature (16)..(139): NCBI GI NO: 21354 NR Description: thioredoxin M precursor (AA -67 to 114)
MASLLDSVTVTRVFSLPIAASVSSSSAAPSVSRRRISPARFLEFRGLKSSRSLVTQSASLGANRRTRIARGGRIACEAQDTTAAAVEVPNLSDSEWQTKVLESDVPVLVEFWAPWCGPCRMIHPIVDQLGQRFRREVQILQNQH

SEQ ID NO: 3530 - DNA, 1175 bp, Arabidopsis thaliana
  misc_feature (1)..(1175): Ceres Seq. ID no. 13489378
atcaattcaataaggaggaggaatagagagctaaagaaaaagaaaaaagactacatttctacaaggacgttggttcttttagtcgtcgtcggtcgtcgaagaaagatcttctccttctttcttcgccgtacgatcgtcgtctaatgggagaatcatcaaatccaatggctacaagttcttcttcctcctcctcctcaattcctccttcgtctccaacaccctctccgacgtccacaaccactccgccacgtcaacatcctctcctccagccaccatcttcaaaaaagaagaaaaacagaacaaacgttttcagagtcttacgcaccgtgtttcgatctttcccaatctttacaacaccatccgtagcatgcaaaatcccggttatacatcccggtttaggcttaccggatccacatcacaacacgtcaagaatcaccggaacgttattcggataccgtaaaggccgagtaagtctttccattcaagaaaaccctaaatgtttaccttctttagtcgtggagctcgccatgcaaaccacaacgcttcaaaaagagctaagcacgggaatggtgagaatagctctcgagactgagaaacagcctcgagctgataataacaattctaaaaccgagaagaagacagatattttggaagaaccgttatggacaatgtattgtaaaggagagaaaacgggttacggtgtgaaacgagaagcgaccgaagaagatcttaacgtgatggagttgttacgtccggtgtctatgggcgccggagttttgccgggaaactcggagtcggaaggacccgacggcgaaatggcgtatatgagagcttattttgagagagttattgggtctaaagattcagagactttttatatgttgagtcctgaagggaataatggacccgaacttagctttttctttgtgagagtttgacttattttgttatggttcaaattaatgtaacgtgtatgtaaatgaccggaaacggcggtggtcgtcgacgttatatactattgtttaggataattgtaagaattttttgttgttctttcgttgttaatctctcgatctttataaaaagattgaattgtaagtgtgtgtatatacacacttcttcgtcctgaaaggaaatgtatgtgatgacattggataggaggaggtttaattgac

SEQ ID NO: 3531 - protein, 264 aa, Arabidopsis thaliana
  peptide (1)..(264): Ceres Seq. ID no. 13489379
  misc_feature (96)..(264): Pfam Name: Pfam Description:  Protein of unknown function, DUF617
  misc_feature (1)..(264): NCBI GI NO: 15235158 NR Description: expressed protein [Arabidopsis thaliana]
  misc_feature (8)..(264): NCBI GI NO: 21618123 NR Description: unknown [Arabidopsis thaliana]
  misc_feature (1)..(264): NCBI GI NO: 15227126 NR Description: hypothetical protein [Arabidopsis thaliana]
  misc_feature (8)..(264): NCBI GI NO: 15240220 NR Description: hypothetical protein [Arabidopsis thaliana]
  misc_feature (7)..(264): NCBI GI NO: 34909066 NR Description: P0702B09.30
  misc_feature (7)..(264): NCBI GI NO: 32129319 NR Description: hypothetical protein
  misc_feature (96)..(264): NCBI GI NO: 40253867 NR Description: unknown protein
  misc_feature (96)..(264): NCBI GI NO: 21741231 NR Description: OSJNBb0034I13.25
  misc_feature (16)..(263): NCBI GI NO: 34903148 NR Description: unnamed protein product
  misc_feature (45)..(263): NCBI GI NO: 15239035 NR Description: expressed protein [Arabidopsis thaliana]
MGESSNPMATSSSSSSSSIPPSSPTPSPTSTTTPPRQHPLLQPPSSKKKKNRTNVFRVLRTVFRSFPIFTTPSVACKIPVIHPGLGLPDPHHNTSRITGTLFGYRKGRVSLSIQENPKCLPSLVVELAMQTTTLQKELSTGMVRIALETEKQPRADNNNSKTEKKTDILEEPLWTMYCKGEKTGYGVKREATEEDLNVMELLRPVSMGAGVLPGNSESEGPDGEMAYMRAYFERVIGSKDSETFYMLSPEGNNGPELSFFFVRV

SEQ ID NO: 3532 - protein, 257 aa, Arabidopsis thaliana
  peptide (1)..(257): Ceres Seq. ID no. 13489380
  misc_feature (89)..(257): Pfam Name: Pfam Description:  Protein of unknown function, DUF617
  misc_feature (1)..(257): NCBI GI NO: 15235158 NR Description: expressed protein [Arabidopsis thaliana]
  misc_feature (1)..(257): NCBI GI NO: 21618123 NR Description: unknown [Arabidopsis thaliana]
  misc_feature (1)..(257): NCBI GI NO: 15227126 NR Description: hypothetical protein [Arabidopsis thaliana]
  misc_feature (1)..(257): NCBI GI NO: 15240220 NR Description: hypothetical protein [Arabidopsis thaliana]
  misc_feature (1)..(257): NCBI GI NO: 34909066 NR Description: P0702B09.30
  misc_feature (1)..(257): NCBI GI NO: 32129319 NR Description: hypothetical protein
  misc_feature (89)..(257): NCBI GI NO: 40253867 NR Description: unknown protein
  misc_feature (89)..(257): NCBI GI NO: 21741231 NR Description: OSJNBb0034I13.25
  misc_feature (9)..(256): NCBI GI NO: 34903148 NR Description: unnamed protein product
  misc_feature (38)..(256): NCBI GI NO: 15239035 NR Description: expressed protein [Arabidopsis thaliana]
MATSSSSSSSSIPPSSPTPSPTSTTTPPRQHPLLQPPSSKKKKNRTNVFRVLRTVFRSFPIFTTPSVACKIPVIHPGLGLPDPHHNTSRITGTLFGYRKGRVSLSIQENPKCLPSLVVELAMQTTTLQKELSTGMVRIALETEKQPRADNNNSKTEKKTDILEEPLWTMYCKGEKTGYGVKREATEEDLNVMELLRPVSMGAGVLPGNSESEGPDGEMAYMRAYFERVIGSKDSETFYMLSPEGNNGPELSFFFVRV

SEQ ID NO: 3533 - protein, 136 aa, Arabidopsis thaliana
  peptide (1)..(136): Ceres Seq. ID no. 13489381
  misc_feature (1)..(136): Pfam Name: Pfam Description:  Protein of unknown function, DUF617
  misc_feature (1)..(136): NCBI GI NO: 15235158 NR Description: expressed protein [Arabidopsis thaliana]
  misc_feature (1)..(136): NCBI GI NO: 21618123 NR Description: unknown [Arabidopsis thaliana]
  misc_feature (1)..(136): NCBI GI NO: 15227126 NR Description: hypothetical protein [Arabidopsis thaliana]
  misc_feature (1)..(136): NCBI GI NO: 15240220 NR Description: hypothetical protein [Arabidopsis thaliana]
  misc_feature (1)..(136): NCBI GI NO: 34909066 NR Description: P0702B09.30
  misc_feature (1)..(136): NCBI GI NO: 32129319 NR Description: hypothetical protein
  misc_feature (1)..(136): NCBI GI NO: 40253867 NR Description: unknown protein
  misc_feature (1)..(136): NCBI GI NO: 21741231 NR Description: OSJNBb0034I13.25
  misc_feature (1)..(135): NCBI GI NO: 34903148 NR Description: unnamed protein product
  misc_feature (1)..(135): NCBI GI NO: 15239035 NR Description: expressed protein [Arabidopsis thaliana]
MQTTTLQKELSTGMVRIALETEKQPRADNNNSKTEKKTDILEEPLWTMYCKGEKTGYGVKREATEEDLNVMELLRPVSMGAGVLPGNSESEGPDGEMAYMRAYFERVIGSKDSETFYMLSPEGNNGPELSFFFVRV

SEQ ID NO: 3534 - DNA, 798 bp, Arabidopsis thaliana
  misc_feature (1)..(798): Ceres Seq. ID no. 12562120
atctgtcgaaagctcagtcatcactagacagttggaagcaacacattgtctccaagaacccgagaatagaaaattgccgtgcaatcttgagcagccttgttcagaccttgaatctccccaaggaaaaactcggccaaagggaaagtcttgatgagagctctatatggtgtaaaggttaagaccttatacatctctggtgtttttgctgcagcgttctcaggttcatcgcagaatctgatgtaccttacagtctcaaacgagcttccatgggcacaatcattcatggaagtgcagaacaccatgaacgcagaaatcaagaacatatttttgtcagacgggttaacggttctgaaagagctagaggcagttgcttcaggtgtcaagaaactctaccctgcgatccaacaaggatcaatagatcccatatcgctgcagccactgaaggactcggtcacagaattatcgaatgggatagatcttgtttcgaaagaagtggattgtttcttcaagattctgttatcggggagagacacattactagagaacctaaggtcgatgggtgcatcaaccctacaggcaacatcgccaaaaaaggctgccggaaaaaattacagaggattctgataaactataaatgtttgtacagatggttttacttcaagtgttccatcttcttggtattgaatgtattattaggtgtttgtgcaatcgtagtcgtttgtatgagatgctttgaaagtagtagttgtataagtaaaggttttaccaacttatctatatatattatgaatatctttg

SEQ ID NO: 3535 - protein, 177 aa, Arabidopsis thaliana
  peptide (1)..(177): Ceres Seq. ID no. 12562121
MGTIIHGSAEHHERRNQEHIFVRRVNGSERARGSCFRCQETLPCDPTRINRSHIAAATEGLGHRIIEWDRSCFERSGLFLQDSVIGERHITREPKVDGCINPTGNIAKKGCRKKLQRILINYKCLYRWFYFKCSIFLVLNVLLGVCAIVVVCMRCFESSSCISKGFTNLSIYIMNIF

SEQ ID NO: 3536 - protein, 157 aa, Arabidopsis thaliana
  peptide (1)..(157): Ceres Seq. ID no. 12562122
  misc_feature (1)..(157): NCBI GI NO: 18378853 NR Description: expressed protein; protein id: At1g01550
  misc_feature (1)..(153): NCBI GI NO: 7485228 NR Description: hypothetical protein A_IG002N01
  misc_feature (1)..(153): NCBI GI NO: 30678866 NR Description: expressed protein [Arabidopsis thaliana]
  misc_feature (1)..(153): NCBI GI NO: 28392962 NR Description: unknown protein [Arabidopsis thaliana]
  misc_feature (1)..(135): NCBI GI NO: 18406969 NR Description: expressed protein; protein id: At2g46080
  misc_feature (1)..(135): NCBI GI NO: 16604342 NR Description: At2g46080/T3F17.27 [Arabidopsis thaliana]
  misc_feature (1)..(133): NCBI GI NO: 15233126 NR Description: putative protein; protein id: At3g61500.1
  misc_feature (1)..(121): NCBI GI NO: 37536014 NR Description: unknown protein
MRALYGVKVKTLYISGVFAAAFSGSSQNLMYLTVSNELPWAQSFMEVQNTMNAEIKNIFLSDGLTVLKELEAVASGVKKLYPAIQQGSIDPISLQPLKDSVTELSNGIDLVSKEVDCFFKILLSGRDTLLENLRSMGASTLQATSPKKAAGKNYRGF

SEQ ID NO: 3537 - protein, 128 aa, Arabidopsis thaliana
  peptide (1)..(128): Ceres Seq. ID no. 12562123
  misc_feature (1)..(128): NCBI GI NO: 18378853 NR Description: expressed protein; protein id: At1g01550
  misc_feature (1)..(124): NCBI GI NO: 7485228 NR Description: hypothetical protein A_IG002N01
  misc_feature (1)..(124): NCBI GI NO: 30678866 NR Description: expressed protein [Arabidopsis thaliana]
  misc_feature (1)..(124): NCBI GI NO: 28392962 NR Description: unknown protein [Arabidopsis thaliana]
  misc_feature (1)..(106): NCBI GI NO: 18406969 NR Description: expressed protein; protein id: At2g46080
  misc_feature (1)..(106): NCBI GI NO: 16604342 NR Description: At2g46080/T3F17.27 [Arabidopsis thaliana]
  misc_feature (1)..(104): NCBI GI NO: 15233126 NR Description: putative protein; protein id: At3g61500.1
  misc_feature (1)..(92): NCBI GI NO: 37536014 NR Description: unknown protein
MYLTVSNELPWAQSFMEVQNTMNAEIKNIFLSDGLTVLKELEAVASGVKKLYPAIQQGSIDPISLQPLKDSVTELSNGIDLVSKEVDCFFKILLSGRDTLLENLRSMGASTLQATSPKKAAGKNYRGF

SEQ ID NO: 3538 - DNA, 2957 bp, Arabidopsis thaliana
  misc_feature (1)..(2957): Ceres Seq. ID no. 12560451
ataaaccttctcttctctcgataaacttcagatattaaaaaacccaaacttttatttcccccaatcaaaaaccctaatttcttcttatcttgtttggatttttcatttcttctgtttgattttattccacaaacacaataaaaaagtttgcattttttcctcttctaagctcgtttcagatcttcgatttcaccatttttataaactattatgcgaacttagttttgttctttgtgattttgtatgacaatgatcttcttctctaagcttaatcgctccatttctcgttcaaagggatttttgtacggtggtggtgttagatcggcggcaaggctacttacttcgccgggacttgaggcggcgtctgtgaatgaagtggaaggtggattagggtttataagaagacactttgcttctttagcttcacggaagggtttagtcaataatgatttgattggtgtttttgctaatccaagacttcgtagattcttctctgatgaagctcctaagaagaagaattatgagaactattttcctaaagataagcaagaacccaagagtgatcagaaatcagagcataaagagggttcagaaaagaatgaaaatgagaatgtgggagatatgttcatgaaccgattccaaaatttgctaattcctctactagctcttgctgtattcttttctactttctcgtttggctctggggaacaacaacagataagtttccaggagttcaaaaacaagctactcgagcctggtttagttgaccacatagatgtttcaaacaaatcagtagcaaaagtctacgtgaggagcacaccgaaagaccaacaaacaactgacgttgtccatggtaatggtaacggtattcctgctaaaagaactggtggtcagtataagtactacttcaatatcggtagtgttgattcttttgaggagaaactcgaagaagctcaagaagcgttaggtgttgatcgtcatgaatatgttcctgtcacatacgtctctgaaatggtctggtatcaagagttcatgaggtttgcaccgactttgttgctcttgggtactctgatctatggtgcgagacggatgcaaggtggattgggtgtaggaggaactggcggtaagaatggtcgtggaattttcaatataggcaaagctacaataacgagagctgataaacattccaagaataagatttatttcaaggatgttgctggatgtgacgaggctaaacaagaaattatggagtttgtacatttccttaagaacccaaagaagtatgaagatttgggtgctaaaattccgaaaggtgcacttttagtcggtccgcctggaaccggaaagacccttttagcaaaagccacagcaggagaatctggtgtgccatttctgtctatttctggctcagatttcatggagatgtttgttggtgttgggccttcgagggtgagacatttgttccaagaggcgagacaagctgcaccgagcattatatttatcgatgagattgatgctattggtcgggcaagaggtcgtggaggtttaggcggaaatgatgagcgtgaaagcactctgaatcagttgctagttgaaatggatggttttggtacaaccgctggtgttgtggttcttgctggaaccaacagaccggatattttggataaagctttgttaaggcctggacgttttgatcgccagataactattgataaacctgatatcaaagggcgtgatcagattttcaagatttacttgaagaagatcaaacttgatcatgagccatcatattactctcaaaggcttgctgctctcactcccgggtttgcaggagctgacattgcgaatgtctgtaacgaagcagctcttattgctgctagacacgaaggagcaacggttactatggcacactttgaatctgcgattgatcgtgttattggtggtcttgagaagaaaaaccgggtgataagcaagttggagcgacgtacagttgcatatcatgaatctggtcacgcagttgtagggtggttccttgaacatgcagagccgttactgaaagtgactattgtaccacgtggcacagcggctctcggatttgcacaatacgttccaaacgaaaaccttctcatgaccaaagagcaactctttgacatgacttgcatgactctcggaggccgtgcagctgagcaggtattgataggtaaaatctcaacgggtgcgcagaacgatctagagaaggtgacgaagatgacttacgcgcaagtagctgtgtatggtttcagtgacaaggttgggctactctcgtttccaccaagggatgatggctacgacttctctaaaccatacagcaacaaaaccggtgctatcatagacgaagaagttagggactgggtggccaaagcttatgagcggaccgtagagctggttgaggaacacaaagtgaaagtggctgagatcgccgagcttttactagagaaagaggtgttgcatcaggatgatctcttaaaaattttaggtgaacgtccgtttaagtcagctgaggtcactaattatgaccggttcaagtctgggtttgaagagactgagaaggactcagccgccacccctacagtggagcctgtggtggatgatggagctcccccgccgtttgaaccccaggttgttccgacgtaagagaaacgtcactgttacaactgtaaatttgatcaagtatgcaataacacaattcaaaaaaagcattctcttgttcttcaatgtttttagtgacgacggaatttgttagcaatgaacattttttgttttctaaattattgcttctaataagatttttatttgcttttcagtctcattcttatagtttgcgttttgtaataaaggattgaatatgatgatgatattgttacatcttccaatatttaccaaataccatcatgtaagaatgatggcatcatgtgtct

SEQ ID NO: 3539 - protein, 809 aa, Arabidopsis thaliana
  peptide (1)..(809): Ceres Seq. ID no. 12560452
  misc_feature (552)..(756): Pfam Name: Pfam Description:  Peptidase family M41
  misc_feature (7)..(783): NCBI GI NO: 25406980 NR Description: protein F22G5.10 [imported] - Arabidopsis thaliana
  misc_feature (7)..(786): NCBI GI NO: 34908198 NR Description: putative AAA-metalloprotease
  misc_feature (206)..(789): NCBI GI NO: 6539504 NR Description: FtsH2 [Cyanidioschyzon merolae]
  misc_feature (152)..(192): NCBI GI NO: 6539504 NR Description: FtsH2 [Cyanidioschyzon merolae]
  misc_feature (210)..(785): NCBI GI NO: 5802970 NR Description: AFG3 ATPase family gene 3-like 2
  misc_feature (210)..(785): NCBI GI NO: 18999411 NR Description: Similar to AFG3 ATPase family gene 3-like 2
  misc_feature (221)..(784): NCBI GI NO: 28574878 NR Description: CG6512-PA [Drosophila melanogaster]
  misc_feature (115)..(187): NCBI GI NO: 28574878 NR Description: CG6512-PA [Drosophila melanogaster]
  misc_feature (209)..(785): NCBI GI NO: 16905099 NR Description: AFG3(ATPase family gene 3)-like 1 (yeast)
  misc_feature (100)..(809): NCBI GI NO: 12082993 NR Description: matrix AAA protease MAP-1 [Neurospora crassa]
MTMIFFSKLNRSISRSKGFLYGGGVRSAARLLTSPGLEAASVNEVEGGLGFIRRHFASLASRKGLVNNDLIGVFANPRLRRFFSDEAPKKKNYENYFPKDKQEPKSDQKSEHKEGSEKNENENVGDMFMNRFQNLLIPLLALAVFFSTFSFGSGEQQQISFQEFKNKLLEPGLVDHIDVSNKSVAKVYVRSTPKDQQTTDVVHGNGNGIPAKRTGGQYKYYFNIGSVDSFEEKLEEAQEALGVDRHEYVPVTYVSEMVWYQEFMRFAPTLLLLGTLIYGARRMQGGLGVGGTGGKNGRGIFNIGKATITRADKHSKNKIYFKDVAGCDEAKQEIMEFVHFLKNPKKYEDLGAKIPKGALLVGPPGTGKTLLAKATAGESGVPFLSISGSDFMEMFVGVGPSRVRHLFQEARQAAPSIIFIDEIDAIGRARGRGGLGGNDERESTLNQLLVEMDGFGTTAGVVVLAGTNRPDILDKALLRPGRFDRQITIDKPDIKGRDQIFKIYLKKIKLDHEPSYYSQRLAALTPGFAGADIANVCNEAALIAARHEGATVTMAHFESAIDRVIGGLEKKNRVISKLERRTVAYHESGHAVVGWFLEHAEPLLKVTIVPRGTAALGFAQYVPNENLLMTKEQLFDMTCMTLGGRAAEQVLIGKISTGAQNDLEKVTKMTYAQVAVYGFSDKVGLLSFPPRDDGYDFSKPYSNKTGAIIDEEVRDWVAKAYERTVELVEEHKVKVAEIAELLLEKEVLHQDDLLKILGERPFKSAEVTNYDRFKSGFEETEKDSAATPTVEPVVDDGAPPPFEPQVVPT

SEQ ID NO: 3540 - protein, 807 aa, Arabidopsis thaliana
  peptide (1)..(807): Ceres Seq. ID no. 12560453
  misc_feature (550)..(754): Pfam Name: Pfam Description:  Peptidase family M41
  misc_feature (5)..(781): NCBI GI NO: 25406980 NR Description: protein F22G5.10 [imported] - Arabidopsis thaliana
  misc_feature (5)..(784): NCBI GI NO: 34908198 NR Description: putative AAA-metalloprotease
  misc_feature (204)..(787): NCBI GI NO: 6539504 NR Description: FtsH2 [Cyanidioschyzon merolae]
  misc_feature (150)..(190): NCBI GI NO: 6539504 NR Description: FtsH2 [Cyanidioschyzon merolae]
  misc_feature (208)..(783): NCBI GI NO: 5802970 NR Description: AFG3 ATPase family gene 3-like 2
  misc_feature (208)..(783): NCBI GI NO: 18999411 NR Description: Similar to AFG3 ATPase family gene 3-like 2
  misc_feature (219)..(782): NCBI GI NO: 28574878 NR Description: CG6512-PA [Drosophila melanogaster]
  misc_feature (113)..(185): NCBI GI NO: 28574878 NR Description: CG6512-PA [Drosophila melanogaster]
  misc_feature (207)..(783): NCBI GI NO: 16905099 NR Description: AFG3(ATPase family gene 3)-like 1 (yeast)
  misc_feature (98)..(807): NCBI GI NO: 12082993 NR Description: matrix AAA protease MAP-1 [Neurospora crassa]
MIFFSKLNRSISRSKGFLYGGGVRSAARLLTSPGLEAASVNEVEGGLGFIRRHFASLASRKGLVNNDLIGVFANPRLRRFFSDEAPKKKNYENYFPKDKQEPKSDQKSEHKEGSEKNENENVGDMFMNRFQNLLIPLLALAVFFSTFSFGSGEQQQISFQEFKNKLLEPGLVDHIDVSNKSVAKVYVRSTPKDQQTTDVVHGNGNGIPAKRTGGQYKYYFNIGSVDSFEEKLEEAQEALGVDRHEYVPVTYVSEMVWYQEFMRFAPTLLLLGTLIYGARRMQGGLGVGGTGGKNGRGIFNIGKATITRADKHSKNKIYFKDVAGCDEAKQEIMEFVHFLKNPKKYEDLGAKIPKGALLVGPPGTGKTLLAKATAGESGVPFLSISGSDFMEMFVGVGPSRVRHLFQEARQAAPSIIFIDEIDAIGRARGRGGLGGNDERESTLNQLLVEMDGFGTTAGVVVLAGTNRPDILDKALLRPGRFDRQITIDKPDIKGRDQIFKIYLKKIKLDHEPSYYSQRLAALTPGFAGADIANVCNEAALIAARHEGATVTMAHFESAIDRVIGGLEKKNRVISKLERRTVAYHESGHAVVGWFLEHAEPLLKVTIVPRGTAALGFAQYVPNENLLMTKEQLFDMTCMTLGGRAAEQVLIGKISTGAQNDLEKVTKMTYAQVAVYGFSDKVGLLSFPPRDDGYDFSKPYSNKTGAIIDEEVRDWVAKAYERTVELVEEHKVKVAEIAELLLEKEVLHQDDLLKILGERPFKSAEVTNYDRFKSGFEETEKDSAATPTVEPVVDDGAPPPFEPQVVPT

SEQ ID NO: 3541 - protein, 683 aa, Arabidopsis thaliana
  peptide (1)..(683): Ceres Seq. ID no. 12560454
  misc_feature (426)..(630): Pfam Name: Pfam Description:  Peptidase family M41
  misc_feature (1)..(657): NCBI GI NO: 25406980 NR Description: protein F22G5.10 [imported] - Arabidopsis thaliana
  misc_feature (1)..(660): NCBI GI NO: 34908198 NR Description: putative AAA-metalloprotease
  misc_feature (80)..(663): NCBI GI NO: 6539504 NR Description: FtsH2 [Cyanidioschyzon merolae]
  misc_feature (26)..(66): NCBI GI NO: 6539504 NR Description: FtsH2 [Cyanidioschyzon merolae]
  misc_feature (84)..(659): NCBI GI NO: 5802970 NR Description: AFG3 ATPase family gene 3-like 2
  misc_feature (84)..(659): NCBI GI NO: 18999411 NR Description: Similar to AFG3 ATPase family gene 3-like 2
  misc_feature (95)..(658): NCBI GI NO: 28574878 NR Description: CG6512-PA [Drosophila melanogaster]
  misc_feature (1)..(61): NCBI GI NO: 28574878 NR Description: CG6512-PA [Drosophila melanogaster]
  misc_feature (83)..(659): NCBI GI NO: 16905099 NR Description: AFG3(ATPase family gene 3)-like 1 (yeast)
  misc_feature (1)..(683): NCBI GI NO: 12082993 NR Description: matrix AAA protease MAP-1 [Neurospora crassa]
MFMNRFQNLLIPLLALAVFFSTFSFGSGEQQQISFQEFKNKLLEPGLVDHIDVSNKSVAKVYVRSTPKDQQTTDVVHGNGNGIPAKRTGGQYKYYFNIGSVDSFEEKLEEAQEALGVDRHEYVPVTYVSEMVWYQEFMRFAPTLLLLGTLIYGARRMQGGLGVGGTGGKNGRGIFNIGKATITRADKHSKNKIYFKDVAGCDEAKQEIMEFVHFLKNPKKYEDLGAKIPKGALLVGPPGTGKTLLAKATAGESGVPFLSISGSDFMEMFVGVGPSRVRHLFQEARQAAPSIIFIDEIDAIGRARGRGGLGGNDERESTLNQLLVEMDGFGTTAGVVVLAGTNRPDILDKALLRPGRFDRQITIDKPDIKGRDQIFKIYLKKIKLDHEPSYYSQRLAALTPGFAGADIANVCNEAALIAARHEGATVTMAHFESAIDRVIGGLEKKNRVISKLERRTVAYHESGHAVVGWFLEHAEPLLKVTIVPRGTAALGFAQYVPNENLLMTKEQLFDMTCMTLGGRAAEQVLIGKISTGAQNDLEKVTKMTYAQVAVYGFSDKVGLLSFPPRDDGYDFSKPYSNKTGAIIDEEVRDWVAKAYERTVELVEEHKVKVAEIAELLLEKEVLHQDDLLKILGERPFKSAEVTNYDRFKSGFEETEKDSAATPTVEPVVDDGAPPPFEPQVVPT

SEQ ID NO: 3542 - DNA, 956 bp, Arabidopsis thaliana
  misc_feature (1)..(956): Ceres Seq. ID no. 12326661
atgattggtggtttcttcgccgatgttaaattcaacagatcgagagagaaaaaactctctctccctcctccgttcaccgtcgcgactcggctctacagtacattttgttgagcaatctcgtatttagaggattccaatgtctggcgcagaggataataaatcttcccatgctcagctttcgtcccaaatttttcttgatcttgtggattcggtgatagctgatgtagcatctgagtgtcatcgggtagcacgactaggacttgatcgtgatttggatatagtagaagaagagttgagattgtcagtggaagcgcgtgcgaagatcgctgatcctagcaacaacctcgaaaccaacaccaaatatgttgttgatatatttgggcagactcaccctcctgtagctagtgaagtgttcaattgcatgaactgtgggcgacaaattgttgcaggaaggtttgctcctcatctcgaaaaatgcatgggaaagggaagaaaggctcgtgccaagacaaccagaagcacaacggctgcacagaaccggaatgcacgacgcagccccaatccacgatattctccttatccaaattctgctagtgagaaccagttagcaagtggatcacctggtgttgcaggtgaagactgctcaaatttcacagttcgagagaacgtgaaaggagactgaagtacaactgatgagaggcttatactgattactgaacgacaatgtggctagtaactgactcgaccagactggtataaatcgaattgctaggtttatattcagttcacaaaaaaagagagaaaagcggcgcaaaaggaaaagtagcggaggttcataatgtagctatttctacagcttactaatggggtatcaatatattagtacatgcaccatcatgttataattacaaaaaactctgtagagtcctcaatcaaacagttcccactgttgtgtt

SEQ ID NO: 3543 - protein, 181 aa, Arabidopsis thaliana
  peptide (1)..(181): Ceres Seq. ID no. 12326662
  misc_feature (14)..(181): NCBI GI NO: 8843778 NR Description: emb|CAB85555
  misc_feature (1)..(181): NCBI GI NO: 22327952 NR Description: putative protein; protein id: At5g58575
  misc_feature (1)..(140): NCBI GI NO: 26984622 NR Description: SI:dZ180G5.4 (novel protein) [Danio rerio]
MSGAEDNKSSHAQLSSQIFLDLVDSVIADVASECHRVARLGLDRDLDIVEEELRLSVEARAKIADPSNNLETNTKYVVDIFGQTHPPVASEVFNCMNCGRQIVAGRFAPHLEKCMGKGRKARAKTTRSTTAAQNRNARRSPNPRYSPYPNSASENQLASGSPGVAGEDCSNFTVRENVKGD

SEQ ID NO: 3544 - DNA, 1116 bp, Arabidopsis thaliana
  misc_feature (1)..(1116): Ceres Seq. ID no. 12422005
cccaaagtcggcggaagaagatggtgtcgccgaaaatagcaccgtcgatgctgtcatcggacttcgcaaatctagcggcggaggccaatcggatgatcgatttgggcgctaactggcttcacatggatattatggacgggtaaaatttgctgccttacctgtggattcttattagcatccaaacccagcttgtaacatttttgtttcaagatagtttggtataataactctgtgtagctcccgcaggcattttgtccctaatcttacgattggtgctcctgtcatcgagagtttgcgaaagcacactaatgcatatcttgattgccaccttatggtgacgaaccccatggattacgttgcacagatggctaaagctggggcttctggtttcacattccacgtcgaggtggcccaagataattggcaacaacttgtcgagaagattaagtctactgggatgagaccaggcgtggctctaaagcctggaacacctgttgaacaagtctatcctctggttgaagggacaactccggttgaaatggttcttgtgatgactgtagaacctggatttggaggccagaagtttatgcctgacatgatggacaaggtccgggcattgaggcaaaaatacccaacacttgatattcaggtggatggcggcttaggcccttcaacgatcgacacagcggctgcagcaggcgccaactgtattgttgctggaagttcagtgtttggagctccggagccaggagatgtcatctcccttctgaggaccagtgttgagaaagcccaacccaccacttgaaagctgcacgtggtggcggtggtgctgagacggcgttgtattctcatcggaagatggtacctcttcgtttctctcaaggttaaaaagctggtcctttatgttttaaaatcatctcgtgaatcgtgatacttagtcttggttccaagaactgtataacgtcattttgagttattaattccctcaccacacagattatttcataggagttgggtaccaagagtagtgtgcaatgtataattagtaatttaataaacgtattaggttcagtcattttggaatggttataattatgaatacaagtatacaacatg

SEQ ID NO: 3545 - protein, 157 aa, Arabidopsis thaliana
  peptide (1)..(157): Ceres Seq. ID no. 12422006
  misc_feature (1)..(137): Pfam Name: Pfam Description:  Ribulose-phosphate 3 epimerase family
  misc_feature (1)..(157): NCBI GI NO: 18395962 NR Description: putative D-ribulose-5-phosphate 3-epimerase
  misc_feature (1)..(157): NCBI GI NO: 6091725 NR Description: putative D-ribulose-5-phosphate 3-epimerase
  misc_feature (1)..(157): NCBI GI NO: 15221735 NR Description: putative D-ribulose-5-phosphate-3-epimerase
  misc_feature (1)..(154): NCBI GI NO: 28373310 NR Description: Chain A
  misc_feature (1)..(156): NCBI GI NO: 19114917 NR Description: putative ribulose phosphate 3-epimerase
  misc_feature (1)..(152): NCBI GI NO: 6322341 NR Description: D-ribulose-5-Phosphate 3-epimerase; Rpe1p
  misc_feature (1)..(153): NCBI GI NO: 27532955 NR Description: RIKEN cDNA 5730518J08 [Mus musculus]
  misc_feature (1)..(153): NCBI GI NO: 40385883 NR Description: ribulose-5-phosphate-3-epimerase isoform 1
  misc_feature (1)..(153): NCBI GI NO: 39581355 NR Description: Hypothetical protein CBG15299
  misc_feature (1)..(153): NCBI GI NO: 17552948 NR Description: D-ribulose-5-Phosphate 3-epimerase (24.4 kD)
MVTNPMDYVAQMAKAGASGFTFHVEVAQDNWQQLVEKIKSTGMRPGVALKPGTPVEQVYPLVEGTTPVEMVLVMTVEPGFGGQKFMPDMMDKVRALRQKYPTLDIQVDGGLGPSTIDTAAAAGANCIVAGSSVFGAPEPGDVISLLRTSVEKAQPTT

SEQ ID NO: 3546 - protein, 152 aa, Arabidopsis thaliana
  peptide (1)..(152): Ceres Seq. ID no. 12422007
  misc_feature (1)..(132): Pfam Name: Pfam Description:  Ribulose-phosphate 3 epimerase family
  misc_feature (1)..(152): NCBI GI NO: 18395962 NR Description: putative D-ribulose-5-phosphate 3-epimerase
  misc_feature (1)..(152): NCBI GI NO: 6091725 NR Description: putative D-ribulose-5-phosphate 3-epimerase
  misc_feature (1)..(152): NCBI GI NO: 15221735 NR Description: putative D-ribulose-5-phosphate-3-epimerase
  misc_feature (1)..(149): NCBI GI NO: 28373310 NR Description: Chain A
  misc_feature (1)..(151): NCBI GI NO: 19114917 NR Description: putative ribulose phosphate 3-epimerase
  misc_feature (1)..(147): NCBI GI NO: 6322341 NR Description: D-ribulose-5-Phosphate 3-epimerase; Rpe1p
  misc_feature (1)..(148): NCBI GI NO: 27532955 NR Description: RIKEN cDNA 5730518J08 [Mus musculus]
  misc_feature (1)..(148): NCBI GI NO: 40385883 NR Description: ribulose-5-phosphate-3-epimerase isoform 1
  misc_feature (1)..(148): NCBI GI NO: 39581355 NR Description: Hypothetical protein CBG15299
  misc_feature (1)..(148): NCBI GI NO: 17552948 NR Description: D-ribulose-5-Phosphate 3-epimerase (24.4 kD)
MDYVAQMAKAGASGFTFHVEVAQDNWQQLVEKIKSTGMRPGVALKPGTPVEQVYPLVEGTTPVEMVLVMTVEPGFGGQKFMPDMMDKVRALRQKYPTLDIQVDGGLGPSTIDTAAAAGANCIVAGSSVFGAPEPGDVISLLRTSVEKAQPTT

SEQ ID NO: 3547 - protein, 146 aa, Arabidopsis thaliana
  peptide (1)..(146): Ceres Seq. ID no. 12422008
  misc_feature (1)..(126): Pfam Name: Pfam Description:  Ribulose-phosphate 3 epimerase family
  misc_feature (1)..(146): NCBI GI NO: 18395962 NR Description: putative D-ribulose-5-phosphate 3-epimerase
  misc_feature (1)..(146): NCBI GI NO: 6091725 NR Description: putative D-ribulose-5-phosphate 3-epimerase
  misc_feature (1)..(146): NCBI GI NO: 15221735 NR Description: putative D-ribulose-5-phosphate-3-epimerase
  misc_feature (1)..(143): NCBI GI NO: 28373310 NR Description: Chain A
  misc_feature (1)..(145): NCBI GI NO: 19114917 NR Description: putative ribulose phosphate 3-epimerase
  misc_feature (1)..(141): NCBI GI NO: 6322341 NR Description: D-ribulose-5-Phosphate 3-epimerase; Rpe1p
  misc_feature (1)..(142): NCBI GI NO: 27532955 NR Description: RIKEN cDNA 5730518J08 [Mus musculus]
  misc_feature (1)..(142): NCBI GI NO: 40385883 NR Description: ribulose-5-phosphate-3-epimerase isoform 1
  misc_feature (1)..(142): NCBI GI NO: 39581355 NR Description: Hypothetical protein CBG15299
  misc_feature (1)..(142): NCBI GI NO: 17552948 NR Description: D-ribulose-5-Phosphate 3-epimerase (24.4 kD)
MAKAGASGFTFHVEVAQDNWQQLVEKIKSTGMRPGVALKPGTPVEQVYPLVEGTTPVEMVLVMTVEPGFGGQKFMPDMMDKVRALRQKYPTLDIQVDGGLGPSTIDTAAAAGANCIVAGSSVFGAPEPGDVISLLRTSVEKAQPTT

SEQ ID NO: 3548 - DNA, 1359 bp, Arabidopsis thaliana
  misc_feature (1)..(1359): Ceres Seq. ID no. 12328518
atactaaatcatcaccccaacactacaaagaagaaacacactctatctctctgtctcaatacatatttcctcacttctgatcagtgtgatcacgtagagtgccttgaaggagaagaaggaaacaaaaagaaataaaaatgggataccttatagaagaaactttaagctctaactctaaaaccccaattgttatcgatgatgataacgagttgggtttgatggccgtgagactagccaatgctgctgcctttccgatggttctcaaagccgccctcgagctcggtgtctttgacactctctatgctgaagcctctcgcagcgactcgttcctttcaccatcagaaatagcgagtaagctaccaactacacctcgtaaccctgaggctccggttttattggaccgtatgcttcgtctactcgctagctattctgtggtcaagtgtggtaaggtctcataaggaaagggtgagagggtctacagagccgagccaatttgcaggtttttcttgaaggataacattcaagatattggatcccttgcttctcaagtcattgtcaatttcgatagcgtcttcctcaatacttgggcacaattgaaagacgtggttctagaaggaggagatgcatttggccgcgcacatggtggtatgaagctctttgactatatgggtacagatgagagattcagcaaactatttaaccagaccggttttaccattgcggtggtgaagaaggctcttgaagtttaccaaggcttcaaagatgtggatgtgttggttgatgtgggaggtggagttggtaacactcttggtgttgtaacatctaagtatcccaatattaagggtatcaattttgatctaacttgcgccttggcacaagcaccctcttatcccggtgtggaacatgttgctggagatatgtttgtggatattccaaccggagatgctatgatcttgaaacgtatacttcatgattggaccgacgaagactgtgtgaagattcttaagaattgttggaaatcacttccagaaaacggtaaagtggttgtcatagaattagtcactcctgatgaggcagagaatggagacatcaacgcaaacattgcctttgacatggacatgttaatgttcacacaatgttccggaggaaaagagagatcaagagctgagtttgaagctttggctgcagcttctggctttacccattgcaagttcgtttgccaagcttatcactgctggattattgagttctgtaaataaaatgtgtgaaatgtaaaacaaaatcgtcgttaattatttattttcatctttgttgtcattctttcttgatatctttctcgtcgagtaataaaagtgtttt

SEQ ID NO: 3549 - protein, 203 aa, Arabidopsis thaliana
  peptide (1)..(203): Ceres Seq. ID no. 12328519
  misc_feature (1)..(180): Pfam Name: Pfam Description:  O-methyltransferase
  misc_feature (1)..(203): NCBI GI NO: 21618219 NR Description: O-methyltransferase, putative
  misc_feature (1)..(203): NCBI GI NO: 15218138 NR Description: O-methyltransferase 1, putative
  misc_feature (1)..(203): NCBI GI NO: 15218133 NR Description: O-methyltransferase 1, putative
  misc_feature (1)..(203): NCBI GI NO: 15218137 NR Description: O-methyltransferase 1, putative
  misc_feature (1)..(203): NCBI GI NO: 15218135 NR Description: O-methyltransferase 1, putative
  misc_feature (1)..(203): NCBI GI NO: 15223731 NR Description: O-methyltransferase, family 2 family
  misc_feature (1)..(104): NCBI GI NO: 30687192 NR Description: O-methyltransferase 1, putative
  misc_feature (1)..(203): NCBI GI NO: 21617938 NR Description: putative catechol O-methyltransferase
  misc_feature (1)..(203): NCBI GI NO: 15223976 NR Description: O-methyltransferase, family 2 family
  misc_feature (1)..(203): NCBI GI NO: 27808586 NR Description: At1g77520 [Arabidopsis thaliana]
MKLFDYMGTDERFSKLFNQTGFTIAVVKKALEVYQGFKDVDVLVDVGGGVGNTLGVVTSKYPNIKGINFDLTCALAQAPSYPGVEHVAGDMFVDIPTGDAMILKRILHDWTDEDCVKILKNCWKSLPENGKVVVIELVTPDEAENGDINANIAFDMDMLMFTQCSGGKERSRAEFEALAAASGFTHCKFVCQAYHCWIIEFCK

SEQ ID NO: 3550 - protein, 197 aa, Arabidopsis thaliana
  peptide (1)..(197): Ceres Seq. ID no. 12328520
  misc_feature (1)..(174): Pfam Name: Pfam Description:  O-methyltransferase
  misc_feature (1)..(197): NCBI GI NO: 21618219 NR Description: O-methyltransferase, putative
  misc_feature (1)..(197): NCBI GI NO: 15218138 NR Description: O-methyltransferase 1, putative
  misc_feature (1)..(197): NCBI GI NO: 15218133 NR Description: O-methyltransferase 1, putative
  misc_feature (1)..(197): NCBI GI NO: 15218137 NR Description: O-methyltransferase 1, putative
  misc_feature (1)..(197): NCBI GI NO: 15218135 NR Description: O-methyltransferase 1, putative
  misc_feature (1)..(197): NCBI GI NO: 15223731 NR Description: O-methyltransferase, family 2 family
  misc_feature (1)..(98): NCBI GI NO: 30687192 NR Description: O-methyltransferase 1, putative
  misc_feature (1)..(197): NCBI GI NO: 21617938 NR Description: putative catechol O-methyltransferase
  misc_feature (1)..(197): NCBI GI NO: 15223976 NR Description: O-methyltransferase, family 2 family
  misc_feature (1)..(197): NCBI GI NO: 27808586 NR Description: At1g77520 [Arabidopsis thaliana]
MGTDERFSKLFNQTGFTIAVVKKALEVYQGFKDVDVLVDVGGGVGNTLGVVTSKYPNIKGINFDLTCALAQAPSYPGVEHVAGDMFVDIPTGDAMILKRILHDWTDEDCVKILKNCWKSLPENGKVVVIELVTPDEAENGDINANIAFDMDMLMFTQCSGGKERSRAEFEALAAASGFTHCKFVCQAYHCWIIEFCK

SEQ ID NO: 3551 - protein, 113 aa, Arabidopsis thaliana
  peptide (1)..(113): Ceres Seq. ID no. 12328521
  misc_feature (1)..(90): Pfam Name: Pfam Description:  O-methyltransferase
  misc_feature (1)..(113): NCBI GI NO: 21618219 NR Description: O-methyltransferase, putative
  misc_feature (1)..(113): NCBI GI NO: 15218138 NR Description: O-methyltransferase 1, putative
  misc_feature (1)..(113): NCBI GI NO: 15218133 NR Description: O-methyltransferase 1, putative
  misc_feature (1)..(113): NCBI GI NO: 15218137 NR Description: O-methyltransferase 1, putative
  misc_feature (1)..(113): NCBI GI NO: 15218135 NR Description: O-methyltransferase 1, putative
  misc_feature (1)..(113): NCBI GI NO: 15223731 NR Description: O-methyltransferase, family 2 family
  misc_feature (1)..(14): NCBI GI NO: 30687192 NR Description: O-methyltransferase 1, putative
  misc_feature (1)..(113): NCBI GI NO: 21617938 NR Description: putative catechol O-methyltransferase
  misc_feature (1)..(113): NCBI GI NO: 15223976 NR Description: O-methyltransferase, family 2 family
  misc_feature (1)..(113): NCBI GI NO: 27808586 NR Description: At1g77520 [Arabidopsis thaliana]
MFVDIPTGDAMILKRILHDWTDEDCVKILKNCWKSLPENGKVVVIELVTPDEAENGDINANIAFDMDMLMFTQCSGGKERSRAEFEALAAASGFTHCKFVCQAYHCWIIEFCK

SEQ ID NO: 3552 - DNA, 1110 bp, Arabidopsis thaliana
  misc_feature (1)..(1110): Ceres Seq. ID no. 12711308
acattctgagaagaagaagaagaaaataagaaaaaacaaaagatgaaaaccattatcctttttgtaacatttcttgctctttcttcttcatctctagccgatgagacagagactgaatttcattacaaacccggtgagatagccgatccctcgaaatggagcagtatcaaggctgaatggaaaatttgcgggacagggaagaggcaatcgccaatcaatcttactccaaaaatagctcgcattgttcacaattctacagagattcttcagacatattacaaacctgtagaggctattcttaagaaccgtggattcgacatgaaggttaagtgggaagacgatgcagggaagatcgtgatcaatgataccgactataaattggttcaaagccactggcacgcaccttcagagcattttctcgatggacagaggttggcaatggaacttcacatggtacacaaaagtgtagaagggcacttggcagtgattggagttctcttcagagaaggagaaccaaatgctttcatttcgcggatcatggacaagatccataagatcgcagacgtacaagatggagaggtcagcatcggaaagatagatccaagagaatttggatgggatcttacaaagttttatgaatacagaggttctctcacgactcctccttgcacggaagatgtcatgtggaccatcatcaacaaggtggggactgtttcacgtgagcaaattgatgtattgacagatgctcgtcgcggtggttatgagaagaacgcgagaccagctcaacctctgaacggacgtctggtttatttaaacgagcagtccagtccaagtccaactccacggctaagaataccacgagttggtccggtctaagacagtcttataggacaaggcaactccgagccctaatttccatacaaagaaaattcggaaaagaattttgaagatgtatgaaaattgggagccataactatttttttttaactattcttttgattaaaagataaaactacgcaatattatatgcataaagtttttcttttatacatgtattccaataaacaagatgtaataatatccaaccataatgagttgtttgattatttt

SEQ ID NO: 3553 - protein, 277 aa, Arabidopsis thaliana
  peptide (1)..(277): Ceres Seq. ID no. 12711309
  misc_feature (31)..(259): Pfam Name: Pfam Description:  Eukaryotic-type carbonic anhydrase
  misc_feature (1)..(277): NCBI GI NO: 15237646 NR Description: carbonate dehydratase - like protein
  misc_feature (1)..(256): NCBI GI NO: 15233471 NR Description: carbonic anhydrase -like protein
  misc_feature (21)..(262): NCBI GI NO: 25291473 NR Description: probable carbonic anhydrase
  misc_feature (4)..(257): NCBI GI NO: 15223122 NR Description: storage protein, putative; protein id: At1g08080.1
  misc_feature (3)..(258): NCBI GI NO: 29468280 NR Description: nectarin III
  misc_feature (21)..(223): NCBI GI NO: 30683808 NR Description: carbonic anhydrase -related [Arabidopsis thaliana]
  misc_feature (2)..(221): NCBI GI NO: 15233474 NR Description: carbonic anhydrase - like protein
  misc_feature (8)..(257): NCBI GI NO: 37806288 NR Description: putative dioscorin
  misc_feature (23)..(264): NCBI GI NO: 2147328 NR Description: dioscorin class B - Dioscorea cayenensis
  misc_feature (4)..(257): NCBI GI NO: 25407021 NR Description: protein T6D22.16 [imported] - Arabidopsis thaliana
MKTIILFVTFLALSSSSLADETETEFHYKPGEIADPSKWSSIKAEWKICGTGKRQSPINLTPKIARIVHNSTEILQTYYKPVEAILKNRGFDMKVKWEDDAGKIVINDTDYKLVQSHWHAPSEHFLDGQRLAMELHMVHKSVEGHLAVIGVLFREGEPNAFISRIMDKIHKIADVQDGEVSIGKIDPREFGWDLTKFYEYRGSLTTPPCTEDVMWTIINKVGTVSREQIDVLTDARRGGYEKNARPAQPLNGRLVYLNEQSSPSPTPRLRIPRVGPV

SEQ ID NO: 3554 - protein, 185 aa, Arabidopsis thaliana
  peptide (1)..(185): Ceres Seq. ID no. 12711310
  misc_feature (1)..(167): Pfam Name: Pfam Description:  Eukaryotic-type carbonic anhydrase
  misc_feature (1)..(185): NCBI GI NO: 15237646 NR Description: carbonate dehydratase - like protein
  misc_feature (1)..(164): NCBI GI NO: 15233471 NR Description: carbonic anhydrase -like protein
  misc_feature (1)..(170): NCBI GI NO: 25291473 NR Description: probable carbonic anhydrase
  misc_feature (1)..(165): NCBI GI NO: 15223122 NR Description: storage protein, putative; protein id: At1g08080.1
  misc_feature (1)..(166): NCBI GI NO: 29468280 NR Description: nectarin III
  misc_feature (1)..(131): NCBI GI NO: 30683808 NR Description: carbonic anhydrase -related [Arabidopsis thaliana]
  misc_feature (1)..(129): NCBI GI NO: 15233474 NR Description: carbonic anhydrase - like protein
  misc_feature (1)..(165): NCBI GI NO: 37806288 NR Description: putative dioscorin
  misc_feature (1)..(172): NCBI GI NO: 2147328 NR Description: dioscorin class B - Dioscorea cayenensis
  misc_feature (1)..(165): NCBI GI NO: 25407021 NR Description: protein T6D22.16 [imported] - Arabidopsis thaliana
MKVKWEDDAGKIVINDTDYKLVQSHWHAPSEHFLDGQRLAMELHMVHKSVEGHLAVIGVLFREGEPNAFISRIMDKIHKIADVQDGEVSIGKIDPREFGWDLTKFYEYRGSLTTPPCTEDVMWTIINKVGTVSREQIDVLTDARRGGYEKNARPAQPLNGRLVYLNEQSSPSPTPRLRIPRVGPV

SEQ ID NO: 3555 - protein, 145 aa, Arabidopsis thaliana
  peptide (1)..(145): Ceres Seq. ID no. 12711311
  misc_feature (1)..(127): Pfam Name: Pfam Description:  Eukaryotic-type carbonic anhydrase
  misc_feature (1)..(145): NCBI GI NO: 15237646 NR Description: carbonate dehydratase - like protein
  misc_feature (1)..(124): NCBI GI NO: 15233471 NR Description: carbonic anhydrase -like protein
  misc_feature (1)..(130): NCBI GI NO: 25291473 NR Description: probable carbonic anhydrase
  misc_feature (1)..(125): NCBI GI NO: 15223122 NR Description: storage protein, putative; protein id: At1g08080.1
  misc_feature (1)..(126): NCBI GI NO: 29468280 NR Description: nectarin III
  misc_feature (1)..(91): NCBI GI NO: 30683808 NR Description: carbonic anhydrase -related [Arabidopsis thaliana]
  misc_feature (1)..(89): NCBI GI NO: 15233474 NR Description: carbonic anhydrase - like protein
  misc_feature (1)..(125): NCBI GI NO: 37806288 NR Description: putative dioscorin
  misc_feature (1)..(132): NCBI GI NO: 2147328 NR Description: dioscorin class B - Dioscorea cayenensis
  misc_feature (1)..(125): NCBI GI NO: 25407021 NR Description: protein T6D22.16 [imported] - Arabidopsis thaliana
MELHMVHKSVEGHLAVIGVLFREGEPNAFISRIMDKIHKIADVQDGEVSIGKIDPREFGWDLTKFYEYRGSLTTPPCTEDVMWTIINKVGTVSREQIDVLTDARRGGYEKNARPAQPLNGRLVYLNEQSSPSPTPRLRIPRVGPV

SEQ ID NO: 3556 - DNA, 1503 bp, Arabidopsis thaliana
  misc_feature (1)..(1503): Ceres Seq. ID no. 12328773
cttctctttcctctctctcacacacatcttcgagaagtttccgccggcgggagagatcaaagacaactgctgatcagaaatcagagatcagagatatgaacattctcttctccagattctcctttttgcttctgtttctctgttcttggaccattttcactttcaccacaacagaagcttatgatgcacttgatccatatggaaacattactataaaatgggatattatgagctggactggtgatggttatgtggctgttgtaacaatctttaatttccaacaataccgtcacatagaggcgccggggtggcaattaggatggagttggatgaagaaggaagtaatatggagtatggttggtggtcaagcaacagaacaaggagattgttctaagtttaagggtaacattcctcattgctgcaagaaaactccggctatcgttgatttgttaccgggaactccttataaccagcagatatccaactgttgtagagggggtgtgattagcgcgtgggcacaagaccccgcaaccgcgatttcttcgtttcagatcagtgttggccagtctggaacaactaatactacggttagagcacctaggaatataactttgaaggctccaggacctggttacacttgcgggcctgcaaaactcgttaagccgagtagattcatttccgcggataaacgaagaaagactcagtctttgcttacatggaacattacttgcacatattcgcagtttctagcacggaaaactccgacttgttgtgtctcactctcagccttctacaatgaaactatagtaccatgtccaacttgttcttgtggatgtcaaaatagttctcaagctggtacatgtgttgaccctaaaatagcttcagtagtaccagccttagggaagaacaacctcgaacctctcttgcaatgtacgcaacatatgtgtcccattcgagttcattggcatgtaaaaactagctacaaagagtactggagagtgaaggttgccatcacaaactttaactacaatatgaactactctcagtggaacttagtctttcagcatcccaacttcgacaatctcactcagcttttcagtttcaactacaaaccgcttaatccttacttgaacataaatgacacggccatgctatggggaatcaagttctacaatgattttttaagccaagctggtccagtaggcaatgtacagtcagagcttctcttccaaaagaacccattggagttcacattcgagaaaggatgggcgtttccgaggcgcatatacttcaacggtgataactgcgttatgccacctccagactcttatccatggcttccaaacgctagtccaaacattgcaacctcgccatttgtcatacttctcatcactttcttatctgttttgattcttatgtaaatggatatctatataccgtcatggacatgtttggtgatgtttacattataagtgagtgtgttattaggaaatcattctttgc

SEQ ID NO: 3557 - protein, 472 aa, Arabidopsis thaliana
  peptide (1)..(472): Ceres Seq. ID no. 12328774
  misc_feature (83)..(247): Pfam Name: Pfam Description:  Phytochelatin synthetase-like conserved region
  misc_feature (32)..(472): NCBI GI NO: 21618129 NR Description: phytochelatin synthetase-like protein
  misc_feature (32)..(472): NCBI GI NO: 18406342 NR Description: phytochelatin synthetase-like protein
  misc_feature (32)..(472): NCBI GI NO: 13477083 NR Description: phytochelatin synthetase-like protein
  misc_feature (32)..(291): NCBI GI NO: 10092257 NR Description: unknown protein; 31818-33764
  misc_feature (305)..(472): NCBI GI NO: 10092257 NR Description: unknown protein; 31818-33764
  misc_feature (35)..(466): NCBI GI NO: 15232863 NR Description: unknown protein; protein id: At3g02210.1
  misc_feature (32)..(470): NCBI GI NO: 21553837 NR Description: phytochelatin synthetase-like protein
  misc_feature (32)..(470): NCBI GI NO: 18424412 NR Description: phytochelatin synthetase - like protein
  misc_feature (55)..(465): NCBI GI NO: 30090026 NR Description: phytochelatin synthetase-like protein 2
  misc_feature (56)..(469): NCBI GI NO: 30090032 NR Description: phytochelatin synthetase [Triticum monococcum]
SLSSLSHTSSRSFRRRERSKTTADQKSEIRDMNILFSRFSFLLLFLCSWTIFTFTTTEAYDALDPYGNITIKWDIMSWTGDGYVAVVTIFNFQQYRHIEAPGWQLGWSWMKKEVIWSMVGGQATEQGDCSKFKGNIPHCCKKTPAIVDLLPGTPYNQQISNCCRGGVISAWAQDPATAISSFQISVGQSGTTNTTVRAPRNITLKAPGPGYTCGPAKLVKPSRFISADKRRKTQSLLTWNITCTYSQFLARKTPTCCVSLSAFYNETIVPCPTCSCGCQNSSQAGTCVDPKIASVVPALGKNNLEPLLQCTQHMCPIRVHWHVKTSYKEYWRVKVAITNFNYNMNYSQWNLVFQHPNFDNLTQLFSFNYKPLNPYLNINDTAMLWGIKFYNDFLSQAGPVGNVQSELLFQKNPLEFTFEKGWAFPRRIYFNGDNCVMPPPDSYPWLPNASPNIATSPFVILLITFLSVLILM

SEQ ID NO: 3558 - protein, 441 aa, Arabidopsis thaliana
  peptide (1)..(441): Ceres Seq. ID no. 12328775
  misc_feature (52)..(216): Pfam Name: Pfam Description:  Phytochelatin synthetase-like conserved region
  misc_feature (1)..(441): NCBI GI NO: 21618129 NR Description: phytochelatin synthetase-like protein
  misc_feature (1)..(441): NCBI GI NO: 18406342 NR Description: phytochelatin synthetase-like protein
  misc_feature (1)..(441): NCBI GI NO: 13477083 NR Description: phytochelatin synthetase-like protein
  misc_feature (1)..(260): NCBI GI NO: 10092257 NR Description: unknown protein; 31818-33764
  misc_feature (274)..(441): NCBI GI NO: 10092257 NR Description: unknown protein; 31818-33764
  misc_feature (4)..(435): NCBI GI NO: 15232863 NR Description: unknown protein; protein id: At3g02210.1
  misc_feature (1)..(439): NCBI GI NO: 21553837 NR Description: phytochelatin synthetase-like protein
  misc_feature (1)..(439): NCBI GI NO: 18424412 NR Description: phytochelatin synthetase - like protein
  misc_feature (24)..(434): NCBI GI NO: 30090026 NR Description: phytochelatin synthetase-like protein 2
  misc_feature (25)..(438): NCBI GI NO: 30090032 NR Description: phytochelatin synthetase [Triticum monococcum]
MNILFSRFSFLLLFLCSWTIFTFTTTEAYDALDPYGNITIKWDIMSWTGDGYVAVVTIFNFQQYRHIEAPGWQLGWSWMKKEVIWSMVGGQATEQGDCSKFKGNIPHCCKKTPAIVDLLPGTPYNQQISNCCRGGVISAWAQDPATAISSFQISVGQSGTTNTTVRAPRNITLKAPGPGYTCGPAKLVKPSRFISADKRRKTQSLLTWNITCTYSQFLARKTPTCCVSLSAFYNETIVPCPTCSCGCQNSSQAGTCVDPKIASVVPALGKNNLEPLLQCTQHMCPIRVHWHVKTSYKEYWRVKVAITNFNYNMNYSQWNLVFQHPNFDNLTQLFSFNYKPLNPYLNINDTAMLWGIKFYNDFLSQAGPVGNVQSELLFQKNPLEFTFEKGWAFPRRIYFNGDNCVMPPPDSYPWLPNASPNIATSPFVILLITFLSVLILM

SEQ ID NO: 3559 - protein, 397 aa, Arabidopsis thaliana
  peptide (1)..(397): Ceres Seq. ID no. 12328776
  misc_feature (8)..(172): Pfam Name: Pfam Description:  Phytochelatin synthetase-like conserved region
  misc_feature (1)..(397): NCBI GI NO: 21618129 NR Description: phytochelatin synthetase-like protein
  misc_feature (1)..(397): NCBI GI NO: 18406342 NR Description: phytochelatin synthetase-like protein
  misc_feature (1)..(397): NCBI GI NO: 13477083 NR Description: phytochelatin synthetase-like protein
  misc_feature (1)..(216): NCBI GI NO: 10092257 NR Description: unknown protein; 31818-33764
  misc_feature (230)..(397): NCBI GI NO: 10092257 NR Description: unknown protein; 31818-33764
  misc_feature (1)..(391): NCBI GI NO: 15232863 NR Description: unknown protein; protein id: At3g02210.1
  misc_feature (1)..(395): NCBI GI NO: 21553837 NR Description: phytochelatin synthetase-like protein
  misc_feature (1)..(395): NCBI GI NO: 18424412 NR Description: phytochelatin synthetase - like protein
  misc_feature (1)..(390): NCBI GI NO: 30090026 NR Description: phytochelatin synthetase-like protein 2
  misc_feature (1)..(394): NCBI GI NO: 30090032 NR Description: phytochelatin synthetase [Triticum monococcum]
MSWTGDGYVAVVTIFNFQQYRHIEAPGWQLGWSWMKKEVIWSMVGGQATEQGDCSKFKGNIPHCCKKTPAIVDLLPGTPYNQQISNCCRGGVISAWAQDPATAISSFQISVGQSGTTNTTVRAPRNITLKAPGPGYTCGPAKLVKPSRFISADKRRKTQSLLTWNITCTYSQFLARKTPTCCVSLSAFYNETIVPCPTCSCGCQNSSQAGTCVDPKIASVVPALGKNNLEPLLQCTQHMCPIRVHWHVKTSYKEYWRVKVAITNFNYNMNYSQWNLVFQHPNFDNLTQLFSFNYKPLNPYLNINDTAMLWGIKFYNDFLSQAGPVGNVQSELLFQKNPLEFTFEKGWAFPRRIYFNGDNCVMPPPDSYPWLPNASPNIATSPFVILLITFLSVLILM

SEQ ID NO: 3560 - DNA, 1383 bp, Arabidopsis thaliana
  misc_feature (1)..(1383): Ceres Seq. ID no. 13489199
ggtctcactgaaactgtgaaaattttatctcttttatagataaagaatcttgcttttttcagttttcagtatgaagaagaattgaagagagtgtccgaggaaggagacctttggtttcagtttgtgagtcttgttgtaatggctttatcaatggagtttgggttttcaattgggtcatgcttcaaggcaccaaacccacctgttctaatctctgcaagccctaataagatcaatttcacgttgagaaggagaaagaaaagattcttacttagagtctctgctgtgtcgtataaggaattcgcagagtctgctttagaagaaaccaggaaaaggatcgttcttgaaccttcacatctccaggaaaagtatagtagcatgacaggactagatggtaagaccgaacttcaaatgcttgcttttaaatcttcaaagattagactcttgaggagtatggcaatagagaatgagacaatgcaggtctttgactttgcgggtttcatggagcctgagtatgatactcccatattctgtgctaactttttcacatctaccaacgttaacatagttgtattggaccttaatcctttgcatcagttgactgaccagacggattaccaagacaagtattataacaagataatgtccatatatcacaaatatgctgagactttcccatggggagggaaattgactggtgaatccataaagtttttctcgcctttggtgatgtggactaggttttcgtctagcaaagaaaaacataaggctttgttctctgcgtttctagagtactatcaggcatggcttgagatgacaatccaagtgagggaggagatggaaccatctcatgtgagagccaattgtgaagcacaacacaagtacctgacatggcgagcacaaaaggatcctggacatggtcttcttaaaagattagtaggtgaagcaaaggcaaaggagctgctaagggatttcctgttcaatggggtggatgagttaggcacaaaaacattcattgattactttccagagtaccaaacagaagatggaactgtaagcgataaacgaagtatcattgggaagtcatatgaaactcgtccatgggatttaacaggacaatttatcggctaacaatgatatatgtgaacaagtcagatttcagagtcatcaacacaagaggacgtgaacttagggaagtaggaataagaaagagcagcatgaggagtctctcaggtctatctgcatttcaagatgattgtttgagttaccatgcattgtagttttacaagtgtagctctcagcccttcatcaaaatgagaatcctcgagtatgatatgattttaatgaaaatgtattcgtctctacctaatcaacagagattaactt

SEQ ID NO: 3561 - protein, 329 aa, Arabidopsis thaliana
  peptide (1)..(329): Ceres Seq. ID no. 13489200
  misc_feature (54)..(281): Pfam Name: Pfam Description:  Ferredoxin-dependent bilin reductase
  misc_feature (1)..(329): NCBI GI NO: 22330928 NR Description: auxin-regulated protein [Arabidopsis thaliana]
  misc_feature (1)..(329): NCBI GI NO: 30680787 NR Description: auxin-regulated protein [Arabidopsis thaliana]
  misc_feature (5)..(329): NCBI GI NO: 21618130 NR Description: unknown [Arabidopsis thaliana]
  misc_feature (94)..(288): NCBI GI NO: 5923680 NR Description: hypothetical protein [Arabidopsis thaliana]
  misc_feature (1)..(74): NCBI GI NO: 5923680 NR Description: hypothetical protein [Arabidopsis thaliana]
  misc_feature (219)..(329): NCBI GI NO: 5923680 NR Description: hypothetical protein [Arabidopsis thaliana]
  misc_feature (51)..(211): NCBI GI NO: 19386814 NR Description: B1147A04.9
  misc_feature (263)..(329): NCBI GI NO: 19386814 NR Description: B1147A04.9
  misc_feature (45)..(281): NCBI GI NO: 23127198 NR Description: hypothetical protein [Nostoc punctiforme]
  misc_feature (51)..(281): NCBI GI NO: 34223769 NR Description: PebB [Fremyella diplosiphon]
MALSMEFGFSIGSCFKAPNPPVLISASPNKINFTLRRRKKRFLLRVSAVSYKEFAESALEETRKRIVLEPSHLQEKYSSMTGLDGKTELQMLAFKSSKIRLLRSMAIENETMQVFDFAGFMEPEYDTPIFCANFFTSTNVNIVVLDLNPLHQLTDQTDYQDKYYNKIMSIYHKYAETFPWGGKLTGESIKFFSPLVMWTRFSSSKEKHKALFSAFLEYYQAWLEMTIQVREEMEPSHVRANCEAQHKYLTWRAQKDPGHGLLKRLVGEAKAKELLRDFLFNGVDELGTKTFIDYFPEYQTEDGTVSDKRSIIGKSYETRPWDLTGQFIG

SEQ ID NO: 3562 - protein, 325 aa, Arabidopsis thaliana
  peptide (1)..(325): Ceres Seq. ID no. 13489201
  misc_feature (50)..(277): Pfam Name: Pfam Description:  Ferredoxin-dependent bilin reductase
  misc_feature (1)..(325): NCBI GI NO: 22330928 NR Description: auxin-regulated protein [Arabidopsis thaliana]
  misc_feature (1)..(325): NCBI GI NO: 30680787 NR Description: auxin-regulated protein [Arabidopsis thaliana]
  misc_feature (1)..(325): NCBI GI NO: 21618130 NR Description: unknown [Arabidopsis thaliana]
  misc_feature (90)..(284): NCBI GI NO: 5923680 NR Description: hypothetical protein [Arabidopsis thaliana]
  misc_feature (1)..(70): NCBI GI NO: 5923680 NR Description: hypothetical protein [Arabidopsis thaliana]
  misc_feature (215)..(325): NCBI GI NO: 5923680 NR Description: hypothetical protein [Arabidopsis thaliana]
  misc_feature (47)..(207): NCBI GI NO: 19386814 NR Description: B1147A04.9
  misc_feature (259)..(325): NCBI GI NO: 19386814 NR Description: B1147A04.9
  misc_feature (41)..(277): NCBI GI NO: 23127198 NR Description: hypothetical protein [Nostoc punctiforme]
  misc_feature (47)..(277): NCBI GI NO: 34223769 NR Description: PebB [Fremyella diplosiphon]
MEFGFSIGSCFKAPNPPVLISASPNKINFTLRRRKKRFLLRVSAVSYKEFAESALEETRKRIVLEPSHLQEKYSSMTGLDGKTELQMLAFKSSKIRLLRSMAIENETMQVFDFAGFMEPEYDTPIFCANFFTSTNVNIVVLDLNPLHQLTDQTDYQDKYYNKIMSIYHKYAETFPWGGKLTGESIKFFSPLVMWTRFSSSKEKHKALFSAFLEYYQAWLEMTIQVREEMEPSHVRANCEAQHKYLTWRAQKDPGHGLLKRLVGEAKAKELLRDFLFNGVDELGTKTFIDYFPEYQTEDGTVSDKRSIIGKSYETRPWDLTGQFIG

SEQ ID NO: 3563 - protein, 250 aa, Arabidopsis thaliana
  peptide (1)..(250): Ceres Seq. ID no. 13489202
  misc_feature (1)..(202): Pfam Name: Pfam Description:  Ferredoxin-dependent bilin reductase
  misc_feature (1)..(250): NCBI GI NO: 22330928 NR Description: auxin-regulated protein [Arabidopsis thaliana]
  misc_feature (1)..(250): NCBI GI NO: 30680787 NR Description: auxin-regulated protein [Arabidopsis thaliana]
  misc_feature (1)..(250): NCBI GI NO: 21618130 NR Description: unknown [Arabidopsis thaliana]
  misc_feature (15)..(209): NCBI GI NO: 5923680 NR Description: hypothetical protein [Arabidopsis thaliana]
  misc_feature (140)..(250): NCBI GI NO: 5923680 NR Description: hypothetical protein [Arabidopsis thaliana]
  misc_feature (1)..(132): NCBI GI NO: 19386814 NR Description: B1147A04.9
  misc_feature (184)..(250): NCBI GI NO: 19386814 NR Description: B1147A04.9
  misc_feature (1)..(202): NCBI GI NO: 23127198 NR Description: hypothetical protein [Nostoc punctiforme]
  misc_feature (1)..(202): NCBI GI NO: 34223769 NR Description: PebB [Fremyella diplosiphon]
  misc_feature (42)..(177): NCBI GI NO: 19386814 NR Description: B1147A04.9
MTGLDGKTELQMLAFKSSKIRLLRSMAIENETMQVFDFAGFMEPEYDTPIFCANFFTSTNVNIVVLDLNPLHQLTDQTDYQDKYYNKIMSIYHKYAETFPWGGKLTGESIKFFSPLVMWTRFSSSKEKHKALFSAFLEYYQAWLEMTIQVREEMEPSHVRANCEAQHKYLTWRAQKDPGHGLLKRLVGEAKAKELLRDFLFNGVDELGTKTFIDYFPEYQTEDGTVSDKRSIIGKSYETRPWDLTGQFIG

SEQ ID NO: 3564 - DNA, 1567 bp, Arabidopsis thaliana
  misc_feature (1)..(1567): Ceres Seq. ID no. 13489203
tggcatcgcctgtttttataatttctcgtcttgtacaaaataaaagactctctctctcttaaaatttctctttcgattctctcgcatttcaaaatttcatttccttatatagactcttaaggccggcgatttctgtgagtccatagattttcgctactccgccgtcagtttttctcaactccggaggctgtgtttttgccaccgctttgattcgccggtaagttcacgtatggccagtaatactttgaaagagatgaatagtcttcatgtaactgagaagataagtgactgtaaagctagcttgaccaagccatgtgttggtaaaatgaatggaaaatctgaagatagaccattaccaaactctgcctccttggattccagtgattctaaagttgtagaagcagagaaacccgagccagagatagctattgtggaagttgaatatattgaatctgaaaacttggataatgtagacgatgctgatgcagttctgaagtctgttttagctggactagagtccaaggactggatttcactctgtgatgctcttaataacgttcgccgactttcgatattccacaaggaagaaatgatgcatatgcttgaaaaagtgataccacttgtcgtgaaatcactgaaaaatccaagaagtgcggtgtgtaaaacggcatgcatgacatctgcagatatcttcagtgcatataataatcatataacagatctgttggagcctctgcttactcaactactcctcaagtcttcccaagacaaacggtttgtttgcgaggcagcagagaaagctttaacagcaatgaccaaatatgtttccccaaccttgctgttaccaaagctgcaaccttgtctcaaaaacaggaatcctcggatccgtgccaaagcatcattatgcttttctcgaagtgttcctcgactgggcgttgaagggattaaagaatatggaatcgacaaattagttcaagcagccgcatctcagcttagcgatcagctccctgaatcccgtgaggctgcacggactgtcctactagaacttcagagcgtatatgaaaaagctcatcctctcatcaaccctgagacatcatcaccagaagaacagcaaatcccggaggtagagccaattacttgggaaactttctgcaagtcaaaactgtcggctcttagcgcacaagccgtgcttcgtgtcaccaatgttgtcactgttactgctcgggagggtttggttactacaggttcatcatcttcatcccagttataaacattttctactacaaattttttaaaaaccgtttgctacgagtcatacggtttacatggtattctccggcatggcggcatgatctaccaaattggcaaattatggaccgataaaaagagtgaacgttcgtgtatgaaaaatcttggcttctttctgggttattttctttttgtggattctcatctgtcttcactaccagtacttgtttctttttcttatgtgtatatattctataccaagatttggtaagatagtcatgagtcttttggttatatgcaaaattggtcggattctttg

SEQ ID NO: 3565 - protein, 346 aa, Arabidopsis thaliana
  peptide (1)..(346): Ceres Seq. ID no. 13489204
  misc_feature (1)..(346): NCBI GI NO: 15241493 NR Description: expressed protein [Arabidopsis thaliana]
  misc_feature (1)..(340): NCBI GI NO: 18395821 NR Description: expressed protein [Arabidopsis thaliana]
  misc_feature (1)..(340): NCBI GI NO: 21537265 NR Description: unknown [Arabidopsis thaliana]
  misc_feature (1)..(245): NCBI GI NO: 9294314 NR Description: gb|AAF24615
  misc_feature (1)..(234): NCBI GI NO: 15229670 NR Description: expressed protein [Arabidopsis thaliana]
  misc_feature (248)..(340): NCBI GI NO: 15229670 NR Description: expressed protein [Arabidopsis thaliana]
  misc_feature (37)..(323): NCBI GI NO: 18414533 NR Description: expressed protein [Arabidopsis thaliana]
  misc_feature (37)..(323): NCBI GI NO: 21593517 NR Description: unknown [Arabidopsis thaliana]
  misc_feature (127)..(323): NCBI GI NO: 7485173 NR Description: hypothetical protein - Arabidopsis thaliana
  misc_feature (1)..(91): NCBI GI NO: 26449430 NR Description: unknown protein [Arabidopsis thaliana]
MASNTLKEMNSLHVTEKISDCKASLTKPCVGKMNGKSEDRPLPNSASLDSSDSKVVEAEKPEPEIAIVEVEYIESENLDNVDDADAVLKSVLAGLESKDWISLCDALNNVRRLSIFHKEEMMHMLEKVIPLVVKSLKNPRSAVCKTACMTSADIFSAYNNHITDLLEPLLTQLLLKSSQDKRFVCEAAEKALTAMTKYVSPTLLLPKLQPCLKNRNPRIRAKASLCFSRSVPRLGVEGIKEYGIDKLVQAAASQLSDQLPESREAARTVLLELQSVYEKAHPLINPETSSPEEQQIPEVEPITWETFCKSKLSALSAQAVLRVTNVVTVTAREGLVTTGSSSSSQL

SEQ ID NO: 3566 - protein, 338 aa, Arabidopsis thaliana
  peptide (1)..(338): Ceres Seq. ID no. 13489205
  misc_feature (1)..(338): NCBI GI NO: 15241493 NR Description: expressed protein [Arabidopsis thaliana]
  misc_feature (1)..(332): NCBI GI NO: 18395821 NR Description: expressed protein [Arabidopsis thaliana]
  misc_feature (1)..(332): NCBI GI NO: 21537265 NR Description: unknown [Arabidopsis thaliana]
  misc_feature (1)..(237): NCBI GI NO: 9294314 NR Description: gb|AAF24615
  misc_feature (1)..(226): NCBI GI NO: 15229670 NR Description: expressed protein [Arabidopsis thaliana]
  misc_feature (240)..(332): NCBI GI NO: 15229670 NR Description: expressed protein [Arabidopsis thaliana]
  misc_feature (29)..(315): NCBI GI NO: 18414533 NR Description: expressed protein [Arabidopsis thaliana]
  misc_feature (29)..(315): NCBI GI NO: 21593517 NR Description: unknown [Arabidopsis thaliana]
  misc_feature (119)..(315): NCBI GI NO: 7485173 NR Description: hypothetical protein - Arabidopsis thaliana
  misc_feature (1)..(83): NCBI GI NO: 26449430 NR Description: unknown protein [Arabidopsis thaliana]
MNSLHVTEKISDCKASLTKPCVGKMNGKSEDRPLPNSASLDSSDSKVVEAEKPEPEIAIVEVEYIESENLDNVDDADAVLKSVLAGLESKDWISLCDALNNVRRLSIFHKEEMMHMLEKVIPLVVKSLKNPRSAVCKTACMTSADIFSAYNNHITDLLEPLLTQLLLKSSQDKRFVCEAAEKALTAMTKYVSPTLLLPKLQPCLKNRNPRIRAKASLCFSRSVPRLGVEGIKEYGIDKLVQAAASQLSDQLPESREAARTVLLELQSVYEKAHPLINPETSSPEEQQIPEVEPITWETFCKSKLSALSAQAVLRVTNVVTVTAREGLVTTGSSSSSQL

SEQ ID NO: 3567 - protein, 314 aa, Arabidopsis thaliana
  peptide (1)..(314): Ceres Seq. ID no. 13489206
  misc_feature (1)..(314): NCBI GI NO: 15241493 NR Description: expressed protein [Arabidopsis thaliana]
  misc_feature (1)..(308): NCBI GI NO: 18395821 NR Description: expressed protein [Arabidopsis thaliana]
  misc_feature (1)..(308): NCBI GI NO: 21537265 NR Description: unknown [Arabidopsis thaliana]
  misc_feature (1)..(213): NCBI GI NO: 9294314 NR Description: gb|AAF24615
  misc_feature (1)..(202): NCBI GI NO: 15229670 NR Description: expressed protein [Arabidopsis thaliana]
  misc_feature (216)..(308): NCBI GI NO: 15229670 NR Description: expressed protein [Arabidopsis thaliana]
  misc_feature (5)..(291): NCBI GI NO: 18414533 NR Description: expressed protein [Arabidopsis thaliana]
  misc_feature (5)..(291): NCBI GI NO: 21593517 NR Description: unknown [Arabidopsis thaliana]
  misc_feature (95)..(291): NCBI GI NO: 7485173 NR Description: hypothetical protein - Arabidopsis thaliana
  misc_feature (1)..(59): NCBI GI NO: 26449430 NR Description: unknown protein [Arabidopsis thaliana]
MNGKSEDRPLPNSASLDSSDSKVVEAEKPEPEIAIVEVEYIESENLDNVDDADAVLKSVLAGLESKDWISLCDALNNVRRLSIFHKEEMMHMLEKVIPLVVKSLKNPRSAVCKTACMTSADIFSAYNNHITDLLEPLLTQLLLKSSQDKRFVCEAAEKALTAMTKYVSPTLLLPKLQPCLKNRNPRIRAKASLCFSRSVPRLGVEGIKEYGIDKLVQAAASQLSDQLPESREAARTVLLELQSVYEKAHPLINPETSSPEEQQIPEVEPITWETFCKSKLSALSAQAVLRVTNVVTVTAREGLVTTGSSSSSQL

SEQ ID NO: 3568 - DNA, 892 bp, Arabidopsis thaliana
  misc_feature (1)..(892): Ceres Seq. ID no. 13645732
aggcctcatctcttactctctctctctgatcgtctttttcttttgattctgcttttttctgctaggtttctgagatcttccattcgtctcgaattaagttgctacgatgaagacagcgaaggggaaagataaagttaagaccacaaaggaagccttgaagccagttgatgacagaaaggtgggaaagaggaaggcaccggccgagaagcctactaaacgagagactcgtaaagaaaagaaggctaaaaaggacccaaacaaaccaaaaagagctcctagtgccttctttgtctttctagaagattttagggtcacgttcaagaaagaaaatccaaatgtgaaggccgtctctgctgttgggaaagctggagggcagaaatggaaggcaatgtctcaagctgaaaaagctccatatgaagagaaagctgcaaaaaggaaagctgaatatgagaagcaaatggatgcatacaacaaaaacttggaggaagggagtgatgaatctgaaaagtctagatctgagataaatgatgaagatgaagccagtggggaggaagaactactagagaaggaagcggcaggtgatgatgaagaagaagaagaggaagaagatgacgataatgatgacgacgaggaagaagactaaatcagggatagaaatcagattttgtatctcaagcttaactgcagatccttaagcagaagtaagtattttgtaatttgtgtgtcgacgagaactatagatctaaaatcgtgtgtatttttgtttttcttttcctaagaaagcgaaacagttgttagcatctctcaggatgtctgtttcagctttttgccgcaacaaacaatgtatcaatgtctgcgttagtgatcatccaaaccaaaaacgggagggggg

SEQ ID NO: 3569 - protein, 178 aa, Arabidopsis thaliana
  peptide (1)..(178): Ceres Seq. ID no. 15219022
  misc_feature (53)..(122): Pfam Name: high mobility group Pfam Description: HMG
  misc_feature (1)..(178): NCBI GI NO: 15231065 NR Description: high mobility group protein 2-related
  misc_feature (22)..(170): NCBI GI NO: 7446213 NR Description: high mobility group protein HMG-1 - common tobacco
  misc_feature (24)..(175): NCBI GI NO: 1052956 NR Description: high mobility group protein 2 HMG2 [Ipomoea nil]
  misc_feature (36)..(150): NCBI GI NO: 18394900 NR Description: expressed protein [Arabidopsis thaliana]
  misc_feature (11)..(170): NCBI GI NO: 541968 NR Description: high mobility group protein HMG-1 - garden pea
  misc_feature (24)..(166): NCBI GI NO: 729736 NR Description: HMG1/2-LIKE PROTEIN
  misc_feature (22)..(169): NCBI GI NO: 7446212 NR Description: high mobility group protein - potato
  misc_feature (36)..(150): NCBI GI NO: 25402921 NR Description: protein F2D10.18 [imported] - Arabidopsis thaliana
  misc_feature (33)..(164): NCBI GI NO: 25402921 NR Description: protein F2D10.18 [imported] - Arabidopsis thaliana
  misc_feature (33)..(150): NCBI GI NO: 18394898 NR Description: expressed protein [Arabidopsis thaliana]
MKTAKGKDKVKTTKEALKPVDDRKVGKRKAPAEKPTKRETRKEKKAKKDPNKPKRAPSAFFVFLEDFRVTFKKENPNVKAVSAVGKAGGQKWKAMSQAEKAPYEEKAAKRKAEYEKQMDAYNKNLEEGSDESEKSRSEINDEDEASGEEELLEKEAAGDDEEEEEEEDDDNDDDEEED

SEQ ID NO: 3570 - DNA, 1125 bp, Arabidopsis thaliana
  misc_feature (1)..(1125): Ceres Seq. ID no. 13645733
ggaacacggaaatattggcgcccagataatcttcttctgtgaagcattttaagtcgccgactccaatcaacagagcccagttattccatattatcgaattaattagggttcagagagatgggtaggaaaaagaaatctagggcttcgacaaccgaagaagatgagattgagatggataatgctggcccatcctctgagacaagtctttacgaggttcttggagttgaaagaagagccacttcacaggaaataagaaaagcataccataagttggcattgaagcttcaccctgataaaaatcaggatgataaggaagctaaagacaagttccagcagctgcaaaaagtgatatcaattcttggtgatgaagagaaaagggcagtctatgatcaaactggctcaattgatgatgctgatattcctggagatgcgtttgagaatttgcgggatttcttccgggacatgtataagaaggtcaacgaagctgatattgaagagtttgaggcaaactacaggggatctgagtcagagaagaaagacttgcttgagcttttcaacaagtttaagggtaaaatgaacaggctattctgctcaatgctttgctcggaccccaagcttgattcacaccgtttcaaagacatgcttgatgaggccattgcagcaggagaagtgaagtcaagcaaggcatatgagaaatgggcaaataaaatttcagaaacgaaaccgcccaccagtccattgaggaagaggaagaagaagaagtcagcagcaaaggattcagagacagatctttgcttgatgattgcgaaacgacaagaggagaggaaagggaaggtggactcgatgttttcatcacttatctctaggtatggtggtgatgcggaagcagagcccactgaagaagaatttgaagctgcccagagaaggattgaaagcaaaagaaaaccatccaagaagtctagaggaaagtagaggtcttaaagcagagttgtcttctagtagtatttgtgatggaacaagaatgtttattttctttcaaaattgcatcaatttcaaaattgcatcaatttcaaaaatcagtaaatatttcgattattgctttataaattgaggaattatcttctc

SEQ ID NO: 3571 - protein, 284 aa, Arabidopsis thaliana
  peptide (1)..(284): Ceres Seq. ID no. 13645734
  misc_feature (29)..(94): Pfam Name: Pfam Description:  DnaJ domain
  misc_feature (1)..(284): NCBI GI NO: 15240212 NR Description: DnaJ protein family [Arabidopsis thaliana]
  misc_feature (1)..(284): NCBI GI NO: 2689720 NR Description: DnaJ homologue [Arabidopsis thaliana]
  misc_feature (19)..(284): NCBI GI NO: 15230424 NR Description: DnaJ protein family [Arabidopsis thaliana]
  misc_feature (19)..(167): NCBI GI NO: 12322012 NR Description: DnaJ protein, putative, 3' partial; 1110-1
  misc_feature (30)..(276): NCBI GI NO: 32398706 NR Description: DNAJ protein-like, possible
  misc_feature (28)..(251): NCBI GI NO: 39794528 NR Description: Unknown (protein for MGC:76175)
  misc_feature (30)..(251): NCBI GI NO: 27597059 NR Description: DnaJ homolog, subfamily C, member 9
  misc_feature (30)..(251): NCBI GI NO: 34868976 NR Description: similar to J domain of DnaJ-like-protein 1 - rat
  misc_feature (30)..(251): NCBI GI NO: 25513803 NR Description: J domain of DnaJ-like-protein 1 - rat
  misc_feature (30)..(251): NCBI GI NO: 23956266 NR Description: similar to DnaJ protein SB73
MGRKKKSRASTTEEDEIEMDNAGPSSETSLYEVLGVERRATSQEIRKAYHKLALKLHPDKNQDDKEAKDKFQQLQKVISILGDEEKRAVYDQTGSIDDADIPGDAFENLRDFFRDMYKKVNEADIEEFEANYRGSESEKKDLLELFNKFKGKMNRLFCSMLCSDPKLDSHRFKDMLDEAIAAGEVKSSKAYEKWANKISETKPPTSPLRKRKKKKSAAKDSETDLCLMIAKRQEERKGKVDSMFSSLISRYGGDAEAEPTEEEFEAAQRRIESKRKPSKKSRGK

SEQ ID NO: 3572 - protein, 266 aa, Arabidopsis thaliana
  peptide (1)..(266): Ceres Seq. ID no. 13645735
  misc_feature (11)..(76): Pfam Name: Pfam Description:  DnaJ domain
  misc_feature (1)..(266): NCBI GI NO: 15240212 NR Description: DnaJ protein family [Arabidopsis thaliana]
  misc_feature (1)..(266): NCBI GI NO: 2689720 NR Description: DnaJ homologue [Arabidopsis thaliana]
  misc_feature (1)..(266): NCBI GI NO: 15230424 NR Description: DnaJ protein family [Arabidopsis thaliana]
  misc_feature (1)..(149): NCBI GI NO: 12322012 NR Description: DnaJ protein, putative, 3' partial; 1110-1
  misc_feature (12)..(258): NCBI GI NO: 32398706 NR Description: DNAJ protein-like, possible
  misc_feature (10)..(233): NCBI GI NO: 39794528 NR Description: Unknown (protein for MGC:76175)
  misc_feature (12)..(233): NCBI GI NO: 27597059 NR Description: DnaJ homolog, subfamily C, member 9
  misc_feature (12)..(233): NCBI GI NO: 34868976 NR Description: similar to J domain of DnaJ-like-protein 1 - rat
  misc_feature (12)..(233): NCBI GI NO: 25513803 NR Description: J domain of DnaJ-like-protein 1 - rat
  misc_feature (12)..(233): NCBI GI NO: 23956266 NR Description: similar to DnaJ protein SB73
MDNAGPSSETSLYEVLGVERRATSQEIRKAYHKLALKLHPDKNQDDKEAKDKFQQLQKVISILGDEEKRAVYDQTGSIDDADIPGDAFENLRDFFRDMYKKVNEADIEEFEANYRGSESEKKDLLELFNKFKGKMNRLFCSMLCSDPKLDSHRFKDMLDEAIAAGEVKSSKAYEKWANKISETKPPTSPLRKRKKKKSAAKDSETDLCLMIAKRQEERKGKVDSMFSSLISRYGGDAEAEPTEEEFEAAQRRIESKRKPSKKSRGK

SEQ ID NO: 3573 - protein, 169 aa, Arabidopsis thaliana
  peptide (1)..(169): Ceres Seq. ID no. 13645736
  misc_feature (1)..(169): NCBI GI NO: 15240212 NR Description: DnaJ protein family [Arabidopsis thaliana]
  misc_feature (1)..(169): NCBI GI NO: 2689720 NR Description: DnaJ homologue [Arabidopsis thaliana]
  misc_feature (1)..(169): NCBI GI NO: 15230424 NR Description: DnaJ protein family [Arabidopsis thaliana]
  misc_feature (1)..(52): NCBI GI NO: 12322012 NR Description: DnaJ protein, putative, 3' partial; 1110-1
  misc_feature (1)..(161): NCBI GI NO: 32398706 NR Description: DNAJ protein-like, possible
  misc_feature (1)..(136): NCBI GI NO: 39794528 NR Description: Unknown (protein for MGC:76175)
  misc_feature (1)..(136): NCBI GI NO: 27597059 NR Description: DnaJ homolog, subfamily C, member 9
  misc_feature (1)..(136): NCBI GI NO: 34868976 NR Description: similar to J domain of DnaJ-like-protein 1 - rat
  misc_feature (1)..(136): NCBI GI NO: 25513803 NR Description: J domain of DnaJ-like-protein 1 - rat
  misc_feature (1)..(136): NCBI GI NO: 23956266 NR Description: similar to DnaJ protein SB73
MYKKVNEADIEEFEANYRGSESEKKDLLELFNKFKGKMNRLFCSMLCSDPKLDSHRFKDMLDEAIAAGEVKSSKAYEKWANKISETKPPTSPLRKRKKKKSAAKDSETDLCLMIAKRQEERKGKVDSMFSSLISRYGGDAEAEPTEEEFEAAQRRIESKRKPSKKSRGK

SEQ ID NO: 3574 - DNA, 930 bp, Arabidopsis thaliana
  misc_feature (1)..(930): Ceres Seq. ID no. 12423074
accaaaaatgccttttgcccctctctctctatatccaacccatgtctcctctttatctctctaactttccccttagagagattcctctttctctcaaactagggtttcctctctgaaaacaacaaaaatatcccaataattgcaaaatctacttgaagatttttcattctcctttcttataattaatgcccaagagagaaacaaagaagatcaaaccttctcaagaagttatcaaggaaggaccttttcttgttgcgatccatttaaaggggatatatatgtcgaactacacaaactcaccgtgtgcagcatgcaaattcctccggcgtaaatgcacgtcagactgcgtattcgcaccctattttccgccggaggaacctacaaagtttgcgaacgtccaccggatattcggggcaagcaatgtgagcaagatcctccacgaagtggctccccatcagcgggaagatgcggtcaactcgctggcttacgaggcggaagcacgacttaaagatccagtgtatggctgcgttggagcgatctcggtgctccaaagacaggtcttgaggttgcaaagggaactcgaggagacaaatgctgatctcatgaggtacgctggttgtctcggtggtgaaacgacgtcggcttatggtggtcggaggggttgactggtcaacgagagttgattagtcatcatcactctttgagaaaattagcggcggagaagtataaagagagagaggatggttgatgtgatggtaagtgttattagtcgtatgtatatatgtgtaaatatggggacatgcatgcatgtatatttatgtttattttcatgtatatacttatgcgtatgtgtaatttaacttgtaatttttttttcatgggagaggtcaaggaatatttttgatgatgttgaataactagatcttgctc

SEQ ID NO: 3575 - protein, 159 aa, Arabidopsis thaliana
  peptide (1)..(159): Ceres Seq. ID no. 12423075
  misc_feature (1)..(159): NCBI GI NO: 18405472 NR Description: expressed protein; protein id: At3g27650
  misc_feature (1)..(159): NCBI GI NO: 29427827 NR Description: LOB domain protein 25
  misc_feature (1)..(159): NCBI GI NO: 21618134 NR Description: unknown [Arabidopsis thaliana]
  misc_feature (32)..(159): NCBI GI NO: 9294470 NR Description: gb|AAB60912
  misc_feature (33)..(155): NCBI GI NO: 15242624 NR Description: putative protein; protein id: At5g63090
  misc_feature (38)..(143): NCBI GI NO: 34896184 NR Description: contains ESTs C98868
  misc_feature (33)..(142): NCBI GI NO: 15218746 NR Description: unknown protein; protein id: At1g65620
  misc_feature (36)..(159): NCBI GI NO: 34907508 NR Description: B1099D03.24
  misc_feature (36)..(144): NCBI GI NO: 15240110 NR Description: putative protein; protein id: At5g66870.1
  misc_feature (37)..(140): NCBI GI NO: 18402268 NR Description: expressed protein; protein id: At2g30130
MPKRETKKIKPSQEVIKEGPFLVAIHLKGIYMSNYTNSPCAACKFLRRKCTSDCVFAPYFPPEEPTKFANVHRIFGASNVSKILHEVAPHQREDAVNSLAYEAEARLKDPVYGCVGAISVLQRQVLRLQRELEETNADLMRYAGCLGGETTSAYGGRRG

SEQ ID NO: 3576 - protein, 128 aa, Arabidopsis thaliana
  peptide (1)..(128): Ceres Seq. ID no. 12423076
  misc_feature (1)..(128): NCBI GI NO: 18405472 NR Description: expressed protein; protein id: At3g27650
  misc_feature (1)..(128): NCBI GI NO: 29427827 NR Description: LOB domain protein 25
  misc_feature (1)..(128): NCBI GI NO: 21618134 NR Description: unknown [Arabidopsis thaliana]
  misc_feature (1)..(128): NCBI GI NO: 9294470 NR Description: gb|AAB60912
  misc_feature (2)..(124): NCBI GI NO: 15242624 NR Description: putative protein; protein id: At5g63090
  misc_feature (7)..(112): NCBI GI NO: 34896184 NR Description: contains ESTs C98868
  misc_feature (2)..(111): NCBI GI NO: 15218746 NR Description: unknown protein; protein id: At1g65620
  misc_feature (5)..(128): NCBI GI NO: 34907508 NR Description: B1099D03.24
  misc_feature (5)..(113): NCBI GI NO: 15240110 NR Description: putative protein; protein id: At5g66870.1
  misc_feature (6)..(109): NCBI GI NO: 18402268 NR Description: expressed protein; protein id: At2g30130
MSNYTNSPCAACKFLRRKCTSDCVFAPYFPPEEPTKFANVHRIFGASNVSKILHEVAPHQREDAVNSLAYEAEARLKDPVYGCVGAISVLQRQVLRLQRELEETNADLMRYAGCLGGETTSAYGGRRG

SEQ ID NO: 3577 - DNA, 976 bp, Arabidopsis thaliana
  misc_feature (1)..(976): Ceres Seq. ID no. 13488133
aacaactccacgacgagaggaaaaaaaaaaaactcagagagacaaatctaaatggcgatgattacgcgcaacaccgccacgcgcctccctctcctcctccaatctcaacgcgccgtcgccgctgcctcggtctctcacctccacacatcccttcccgctctctctccctccacatcaccgacttcctacaccagacctggtcctccttcgacctcccctcctcctcctggtctctctaaagcggccgaatttgtgatctccaaggtcgatgatctcatgaactgggctcgtaccggatcgatctggcctatgacctttggtctcgcttgctgcgccgtcgaaatgatgcataccggtgctgctcgctacgatctcgatcgattcggtatcatcttcaggcctagtcctcgccagtctgattgtatgattgtcgccggtactcttaccaataagatggctccggctcttcgcaaggtttatgaccagatgcctgagccaaggtgggtgatttcaatgggaagttgtgccaatggaggtggatactatcactactcctactcggtggttcgaggatgtgacagaattgtcccagtcgacatatacgtcccggggtgcccaccaaccgctgaggctttgctctatggactactccagcttcagaagaaaatcaacaggcgcaaggatttcttgcattggtggaacaagtgagcttcgaacccgtcctccaatcgtgaaagggacttttttcagacagttttaccaaagtttggggataataaatcgtggacgtttcattgcatatttctttgtggtggagatgccatgtaaaggagtgtgtttctaagtttgttgtggaaacttaataaacttaagatgtttgttgtctgagttcttttatgggctcttttattatatatctctctctaccagttttcagctacatgctgactattgctaaatacctacatatatttat

SEQ ID NO: 3578 - protein, 218 aa, Arabidopsis thaliana
  peptide (1)..(218): Ceres Seq. ID no. 13488134
  misc_feature (96)..(203): Pfam Name: Pfam Description:  NADH ubiquinone oxidoreductase, 20 Kd subunit
  misc_feature (1)..(218): NCBI GI NO: 15239782 NR Description: NADH dehydrogenase (ubiquinone)
  misc_feature (1)..(218): NCBI GI NO: 1171866 NR Description: NADH-ubiquinone oxidoreductase 20 kDa subunit
  misc_feature (1)..(218): NCBI GI NO: 11277624 NR Description: NADH2 dehydrogenase (ubiquinone) (EC 1
  misc_feature (1)..(218): NCBI GI NO: 9652180 NR Description: NADH-ubiquinone oxidoreductase subunit PSST
  misc_feature (30)..(218): NCBI GI NO: 9652190 NR Description: NADH-ubiquinone oxidoreductase subunit PSST
  misc_feature (1)..(218): NCBI GI NO: 2499328 NR Description: NADH-ubiquinone oxidoreductase 20 kDa subunit
  misc_feature (33)..(218): NCBI GI NO: 34910678 NR Description: putative NADH dehydrogenase
  misc_feature (9)..(218): NCBI GI NO: 1171865 NR Description: NADH-ubiquinone oxidoreductase 20 kDa subunit
  misc_feature (58)..(218): NCBI GI NO: 34328788 NR Description: NADH:ubiquinone oxidoreductase subunit 10
  misc_feature (20)..(218): NCBI GI NO: 34862315 NR Description: similar to NADH dehydrogenase
MAMITRNTATRLPLLLQSQRAVAAASVSHLHTSLPALSPSTSPTSYTRPGPPSTSPPPPGLSKAAEFVISKVDDLMNWARTGSIWPMTFGLACCAVEMMHTGAARYDLDRFGIIFRPSPRQSDCMIVAGTLTNKMAPALRKVYDQMPEPRWVISMGSCANGGGYYHYSYSVVRGCDRIVPVDIYVPGCPPTAEALLYGLLQLQKKINRRKDFLHWWNK

SEQ ID NO: 3579 - protein, 216 aa, Arabidopsis thaliana
  peptide (1)..(216): Ceres Seq. ID no. 13488135
  misc_feature (94)..(201): Pfam Name: Pfam Description:  NADH ubiquinone oxidoreductase, 20 Kd subunit
  misc_feature (1)..(216): NCBI GI NO: 15239782 NR Description: NADH dehydrogenase (ubiquinone)
  misc_feature (1)..(216): NCBI GI NO: 1171866 NR Description: NADH-ubiquinone oxidoreductase 20 kDa subunit
  misc_feature (1)..(216): NCBI GI NO: 11277624 NR Description: NADH2 dehydrogenase (ubiquinone) (EC 1
  misc_feature (1)..(216): NCBI GI NO: 9652180 NR Description: NADH-ubiquinone oxidoreductase subunit PSST
  misc_feature (28)..(216): NCBI GI NO: 9652190 NR Description: NADH-ubiquinone oxidoreductase subunit PSST
  misc_feature (1)..(216): NCBI GI NO: 2499328 NR Description: NADH-ubiquinone oxidoreductase 20 kDa subunit
  misc_feature (31)..(216): NCBI GI NO: 34910678 NR Description: putative NADH dehydrogenase
  misc_feature (7)..(216): NCBI GI NO: 1171865 NR Description: NADH-ubiquinone oxidoreductase 20 kDa subunit
  misc_feature (56)..(216): NCBI GI NO: 34328788 NR Description: NADH:ubiquinone oxidoreductase subunit 10
  misc_feature (18)..(216): NCBI GI NO: 34862315 NR Description: similar to NADH dehydrogenase
MITRNTATRLPLLLQSQRAVAAASVSHLHTSLPALSPSTSPTSYTRPGPPSTSPPPPGLSKAAEFVISKVDDLMNWARTGSIWPMTFGLACCAVEMMHTGAARYDLDRFGIIFRPSPRQSDCMIVAGTLTNKMAPALRKVYDQMPEPRWVISMGSCANGGGYYHYSYSVVRGCDRIVPVDIYVPGCPPTAEALLYGLLQLQKKINRRKDFLHWWNK

SEQ ID NO: 3580 - protein, 143 aa, Arabidopsis thaliana
  peptide (1)..(143): Ceres Seq. ID no. 13488136
  misc_feature (21)..(128): Pfam Name: Pfam Description:  NADH ubiquinone oxidoreductase, 20 Kd subunit
  misc_feature (1)..(143): NCBI GI NO: 15239782 NR Description: NADH dehydrogenase (ubiquinone)
  misc_feature (1)..(143): NCBI GI NO: 1171866 NR Description: NADH-ubiquinone oxidoreductase 20 kDa subunit
  misc_feature (1)..(143): NCBI GI NO: 11277624 NR Description: NADH2 dehydrogenase (ubiquinone) (EC 1
  misc_feature (1)..(143): NCBI GI NO: 9652180 NR Description: NADH-ubiquinone oxidoreductase subunit PSST
  misc_feature (1)..(143): NCBI GI NO: 9652190 NR Description: NADH-ubiquinone oxidoreductase subunit PSST
  misc_feature (1)..(143): NCBI GI NO: 2499328 NR Description: NADH-ubiquinone oxidoreductase 20 kDa subunit
  misc_feature (1)..(143): NCBI GI NO: 34910678 NR Description: putative NADH dehydrogenase
  misc_feature (1)..(143): NCBI GI NO: 1171865 NR Description: NADH-ubiquinone oxidoreductase 20 kDa subunit
  misc_feature (1)..(143): NCBI GI NO: 34328788 NR Description: NADH:ubiquinone oxidoreductase subunit 10
  misc_feature (1)..(143): NCBI GI NO: 34862315 NR Description: similar to NADH dehydrogenase
MNWARTGSIWPMTFGLACCAVEMMHTGAARYDLDRFGIIFRPSPRQSDCMIVAGTLTNKMAPALRKVYDQMPEPRWVISMGSCANGGGYYHYSYSVVRGCDRIVPVDIYVPGCPPTAEALLYGLLQLQKKINRRKDFLHWWNK

SEQ ID NO: 3581 - DNA, 677 bp, Arabidopsis thaliana
  misc_feature (1)..(677): Ceres Seq. ID no. 12561632
aaaccatgtcctatatctctccttcacattcatcccaaaacattacaaaacgttacaatggcttctaaggctcttgcagttacagctcttcttattacacttaatcttcttttcttcacctttgtaacctccacaaaatgtccaccaactactcctaaacccccaaaaaccccgaaatcgcctaagaaggctcctgccgtgaaacccacttgtcctaccgacacacttaagcttggtgtttgcgcagacttattgggcctagttaacgttgttgttggttctccaccaaagactccttgttgtacacttcttcaaggtcttgctaatcttgaagctgcggtttgtctctgcaccgctcttaaagccaatgtcttggggattaatctcaatgttcctattgatctaaccttgctgttgaactattgtggcaagaaagttcctcatggtttccaatgttcttgaagatttgagactttaaaagagaaaaatctctttggtttgctatgtttttatatgtttgtttctactgttatctattgtttttgtgagaaaaagctttgttctgtcactgttgagtttgatgtaatgcttgagcttgttcatgatagaacctttgttctctcaatattgagtttgatgtaatgcttgagcttgttaatggattttatgttcttagt

SEQ ID NO: 3582 - protein, 153 aa, Arabidopsis thaliana
  peptide (1)..(153): Ceres Seq. ID no. 12561633
  misc_feature (71)..(152): Pfam Name: Pfam Description:  Protease inhibitor/seed storage/LTP family
  misc_feature (20)..(153): NCBI GI NO: 18406723 NR Description: expressed protein; protein id: At2g45180
  misc_feature (20)..(153): NCBI GI NO: 481236 NR Description: hypothetical protein - Madagascar periwinkle
  misc_feature (20)..(153): NCBI GI NO: 4454097 NR Description: hybrid proline-rich protein [Catharanthus roseus]
  misc_feature (20)..(153): NCBI GI NO: 7484770 NR Description: extensin like protein - black poplar
  misc_feature (20)..(153): NCBI GI NO: 112697 NR Description: 14 KD PROLINE-RICH PROTEIN DC2.15 PRECURSOR
  misc_feature (20)..(152): NCBI GI NO: 10798758 NR Description: P-rich protein Nt-SubC29 [Nicotiana tabacum]
  misc_feature (35)..(152): NCBI GI NO: 2129871 NR Description: proline-rich protein, 14K - kidney bean
  misc_feature (20)..(153): NCBI GI NO: 10798752 NR Description: P-rich protein EIG-I30 [Nicotiana tabacum]
  misc_feature (48)..(153): NCBI GI NO: 7488729 NR Description: CIC protein, cold-inducible - alfalfa
  misc_feature (20)..(152): NCBI GI NO: 15221484 NR Description: similar to 14KD proline-rich protein DC2
KPCPISLLHIHPKTLQNVTMASKALAVTALLITLNLLFFTFVTSTKCPPTTPKPPKTPKSPKKAPAVKPTCPTDTLKLGVCADLLGLVNVVVGSPPKTPCCTLLQGLANLEAAVCLCTALKANVLGINLNVPIDLTLLLNYCGKKVPHGFQCS

SEQ ID NO: 3583 - protein, 134 aa, Arabidopsis thaliana
  peptide (1)..(134): Ceres Seq. ID no. 12561634
  misc_feature (52)..(133): Pfam Name: Pfam Description:  Protease inhibitor/seed storage/LTP family
  misc_feature (1)..(134): NCBI GI NO: 18406723 NR Description: expressed protein; protein id: At2g45180
  misc_feature (1)..(134): NCBI GI NO: 481236 NR Description: hypothetical protein - Madagascar periwinkle
  misc_feature (1)..(134): NCBI GI NO: 4454097 NR Description: hybrid proline-rich protein [Catharanthus roseus]
  misc_feature (1)..(134): NCBI GI NO: 7484770 NR Description: extensin like protein - black poplar
  misc_feature (1)..(134): NCBI GI NO: 112697 NR Description: 14 KD PROLINE-RICH PROTEIN DC2.15 PRECURSOR
  misc_feature (1)..(133): NCBI GI NO: 10798758 NR Description: P-rich protein Nt-SubC29 [Nicotiana tabacum]
  misc_feature (16)..(133): NCBI GI NO: 2129871 NR Description: proline-rich protein, 14K - kidney bean
  misc_feature (1)..(134): NCBI GI NO: 10798752 NR Description: P-rich protein EIG-I30 [Nicotiana tabacum]
  misc_feature (29)..(134): NCBI GI NO: 7488729 NR Description: CIC protein, cold-inducible - alfalfa
  misc_feature (1)..(133): NCBI GI NO: 15221484 NR Description: similar to 14KD proline-rich protein DC2
MASKALAVTALLITLNLLFFTFVTSTKCPPTTPKPPKTPKSPKKAPAVKPTCPTDTLKLGVCADLLGLVNVVVGSPPKTPCCTLLQGLANLEAAVCLCTALKANVLGINLNVPIDLTLLLNYCGKKVPHGFQCS

SEQ ID NO: 3584 - DNA, 1402 bp, Arabidopsis thaliana
  misc_feature (1)..(1402): Ceres Seq. ID no. 12337871
atcttcgaaaccccattactctcaaatccaaccaacctttcaaaacagaacacgaagacatggaccgaacacaatctccaaagacagctctgttcgccgtgttggcaacactccttgtcttaaccgtgaacggccagtcactttgtaagacacacaggttcaccaataacctcgccttcgcagattgctctgacctctcggccttaggctctttccttcactggacctacaatgaacaaaacggtaccgtctcaatcgcctatcgccaccctggaacctctgcttcttcttgggttgcttggggacttaacccaagtagtactcagatggttgggacgcaagctctagtagccttcacaaacacaacaactaaccaattccaggcctatacctcttccgtgagttcctatggtacgcggctcgaacgtagtagcctaagtttcggtgtgagtggcctctccgcgactctggtcagtggcgaggttacgatctttgcaactcttgagttgtctccgaatctgatcacggccaaccagctttggcaggtgggacctgttgtcaacggtgttcctgcgagtcatcaaacctcaggagataatatgagatcgagtggtaggattgatttccggactggtcaggcatcagctggtggtggtggttccggtgacaggctgaggaagagaaacacgcatggagtactaaatgcggtcagctggggagtactaatgccaatgggagcaatgatggctcggtacatgaaagtcttcgccgatccaacatggttctatctccacattgcctttcaagtgtcgggttacgtcatcggggtagccggttgggccaccggaatcaagcttggtaacgactcaccaggcacatcttactcaacccatcgtaaccttggaatagcactcttcacatttgccacacttcaagtatttgctctgcttgtaaggccaaagccagaccacaaatatcgaacgtactggaacgtgtaccatcacaccgttggatacacgaccatcatcctctctattgtcaacattttcaaaggattcgacattttggacccggaggataaatggcgatgggcttacattgggatcctcatctttcttggtgcttgtgtccttattctcgagccactcacttggttcattgttcttcgccgtaagagccgtggaggtaacacagtcgctgcaccaacttcgagcaagtactctaacggcgtcaatggtaccaccaccactggaccacatcaccaggacgcctagtttcactttttgtttctacacttgttcttgtttgttctacttctactcgattttggattcttttttgatttgatattttgtaggctcatgtatgtattatgtatacaattttattcattgtgttatag

SEQ ID NO: 3585 - protein, 423 aa, Arabidopsis thaliana
  peptide (1)..(423): Ceres Seq. ID no. 12337872
  misc_feature (109)..(237): Pfam Name: DUF568 Pfam Description: Protein of unknown function
  misc_feature (20)..(423): NCBI GI NO: 18421491 NR Description: Expressed protein; protein id: At5g35735
  misc_feature (20)..(423): NCBI GI NO: 21592781 NR Description: putative membrane protein [Arabidopsis thaliana]
  misc_feature (30)..(423): NCBI GI NO: 13785209 NR Description: putative membrane protein [Solanum tuberosum]
  misc_feature (28)..(421): NCBI GI NO: 13785211 NR Description: putative membrane protein [Solanum tuberosum]
  misc_feature (28)..(421): NCBI GI NO: 13785207 NR Description: putative membrane protein [Solanum tuberosum]
  misc_feature (28)..(421): NCBI GI NO: 13785213 NR Description: putative membrane protein [Solanum tuberosum]
  misc_feature (32)..(397): NCBI GI NO: 18086563 NR Description: AT4g17280/dl4675c [Arabidopsis thaliana]
  misc_feature (48)..(408): NCBI GI NO: 15238124 NR Description: putative protein; protein id: At5g47530.1
  misc_feature (30)..(409): NCBI GI NO: 24414270 NR Description: Putative membrane protein
  misc_feature (20)..(392): NCBI GI NO: 15235545 NR Description: putative protein; protein id: At4g12980
LRNPITLKSNQPFKTEHEDMDRTQSPKTALFAVLATLLVLTVNGQSLCKTHRFTNNLAFADCSDLSALGSFLHWTYNEQNGTVSIAYRHPGTSASSWVAWGLNPSSTQMVGTQALVAFTNTTTNQFQAYTSSVSSYGTRLERSSLSFGVSGLSATLVSGEVTIFATLELSPNLITANQLWQVGPVVNGVPASHQTSGDNMRSSGRIDFRTGQASAGGGGSGDRLRKRNTHGVLNAVSWGVLMPMGAMMARYMKVFADPTWFYLHIAFQVSGYVIGVAGWATGIKLGNDSPGTSYSTHRNLGIALFTFATLQVFALLVRPKPDHKYRTYWNVYHHTVGYTTIILSIVNIFKGFDILDPEDKWRWAYIGILIFLGACVLILEPLTWFIVLRRKSRGGNTVAAPTSSKYSNGVNGTTTTGPHHQDA

SEQ ID NO: 3586 - protein, 404 aa, Arabidopsis thaliana
  peptide (1)..(404): Ceres Seq. ID no. 12337873
  misc_feature (90)..(218): Pfam Name: DUF568 Pfam Description: Protein of unknown function
  misc_feature (1)..(404): NCBI GI NO: 18421491 NR Description: Expressed protein; protein id: At5g35735
  misc_feature (1)..(404): NCBI GI NO: 21592781 NR Description: putative membrane protein [Arabidopsis thaliana]
  misc_feature (11)..(404): NCBI GI NO: 13785209 NR Description: putative membrane protein [Solanum tuberosum]
  misc_feature (9)..(402): NCBI GI NO: 13785211 NR Description: putative membrane protein [Solanum tuberosum]
  misc_feature (9)..(402): NCBI GI NO: 13785207 NR Description: putative membrane protein [Solanum tuberosum]
  misc_feature (9)..(402): NCBI GI NO: 13785213 NR Description: putative membrane protein [Solanum tuberosum]
  misc_feature (13)..(378): NCBI GI NO: 18086563 NR Description: AT4g17280/dl4675c [Arabidopsis thaliana]
  misc_feature (29)..(389): NCBI GI NO: 15238124 NR Description: putative protein; protein id: At5g47530.1
  misc_feature (11)..(390): NCBI GI NO: 24414270 NR Description: Putative membrane protein
  misc_feature (1)..(373): NCBI GI NO: 15235545 NR Description: putative protein; protein id: At4g12980
MDRTQSPKTALFAVLATLLVLTVNGQSLCKTHRFTNNLAFADCSDLSALGSFLHWTYNEQNGTVSIAYRHPGTSASSWVAWGLNPSSTQMVGTQALVAFTNTTTNQFQAYTSSVSSYGTRLERSSLSFGVSGLSATLVSGEVTIFATLELSPNLITANQLWQVGPVVNGVPASHQTSGDNMRSSGRIDFRTGQASAGGGGSGDRLRKRNTHGVLNAVSWGVLMPMGAMMARYMKVFADPTWFYLHIAFQVSGYVIGVAGWATGIKLGNDSPGTSYSTHRNLGIALFTFATLQVFALLVRPKPDHKYRTYWNVYHHTVGYTTIILSIVNIFKGFDILDPEDKWRWAYIGILIFLGACVLILEPLTWFIVLRRKSRGGNTVAAPTSSKYSNGVNGTTTTGPHHQDA

SEQ ID NO: 3587 - protein, 315 aa, Arabidopsis thaliana
  peptide (1)..(315): Ceres Seq. ID no. 12337874
  misc_feature (1)..(129): Pfam Name: DUF568 Pfam Description: Protein of unknown function
  misc_feature (1)..(315): NCBI GI NO: 18421491 NR Description: Expressed protein; protein id: At5g35735
  misc_feature (1)..(315): NCBI GI NO: 21592781 NR Description: putative membrane protein [Arabidopsis thaliana]
  misc_feature (1)..(315): NCBI GI NO: 13785209 NR Description: putative membrane protein [Solanum tuberosum]
  misc_feature (1)..(313): NCBI GI NO: 13785211 NR Description: putative membrane protein [Solanum tuberosum]
  misc_feature (1)..(313): NCBI GI NO: 13785207 NR Description: putative membrane protein [Solanum tuberosum]
  misc_feature (1)..(313): NCBI GI NO: 13785213 NR Description: putative membrane protein [Solanum tuberosum]
  misc_feature (1)..(289): NCBI GI NO: 18086563 NR Description: AT4g17280/dl4675c [Arabidopsis thaliana]
  misc_feature (1)..(300): NCBI GI NO: 15238124 NR Description: putative protein; protein id: At5g47530.1
  misc_feature (1)..(301): NCBI GI NO: 24414270 NR Description: Putative membrane protein
  misc_feature (1)..(284): NCBI GI NO: 15235545 NR Description: putative protein; protein id: At4g12980
MVGTQALVAFTNTTTNQFQAYTSSVSSYGTRLERSSLSFGVSGLSATLVSGEVTIFATLELSPNLITANQLWQVGPVVNGVPASHQTSGDNMRSSGRIDFRTGQASAGGGGSGDRLRKRNTHGVLNAVSWGVLMPMGAMMARYMKVFADPTWFYLHIAFQVSGYVIGVAGWATGIKLGNDSPGTSYSTHRNLGIALFTFATLQVFALLVRPKPDHKYRTYWNVYHHTVGYTTIILSIVNIFKGFDILDPEDKWRWAYIGILIFLGACVLILEPLTWFIVLRRKSRGGNTVAAPTSSKYSNGVNGTTTTGPHHQDA

SEQ ID NO: 3588 - DNA, 1028 bp, Arabidopsis thaliana
  misc_feature (1)..(1028): Ceres Seq. ID no. 12325605
agaacgattcgcttatctttcccttatttcttttctcaggggatacagagagaagccaaagctaatagaagcacgaacggcgtcgggttagtccgacggaggaaccatgtcctcgtctcttcttctctccggttctactgtatcttcttcgtttatcgctccatctaagccttctctcgtacgaaattccagtaagacatcactgttaccatttcgtaatgtttcgagaagcttcaaaaccgtcaagtgcaccgttgattcttcatatggaggcaatgttcccacgttccctcggacgagagtttgggacccgtacaaacgtctaggagttagtccatatgcttccgaggaagaaatctgggcctctcgtaactttcttttacagcagtacgctggacatgaaagaagcgaagagtctatagaaggagcctttgagaagcttctcatgtctagttttatcagaaggaagaagactaaaatcaatcttaaatcaaagttgaagaagaaagttgaggaatctcctccgtggctcaaagctcttctcgatttcgttgaaatgcctcccatggacactattttcagaagacttttcctctttgccttcatgggtggttggagtatcatgaactctgcagaaggcggtcctgcgtttcaggtggcggtatcattggctgcgtgcgtatattttctgaatgagaagacaaagagcttggggagagcttgcttaatcggaattggagctttagttgccgggtggttctgcggttcgttaatcattcccatgattccgacgtttctcattcagcctacatggacactcgagctcctaacatcactggtcgcttatgtgtttttgtttctttcttgtactttcctcaagtaagttacgttgtggttttatccaaactctttttgttcttttcgcccagacatttacagaacctttcggaaaaattagtgaaagttgttaagtgtttgattggtttcacagttttcttttatgcgttaatgtaaatgacttcaacgtg

SEQ ID NO: 3589 - protein, 258 aa, Arabidopsis thaliana
  peptide (1)..(258): Ceres Seq. ID no. 12325606
  misc_feature (1)..(258): NCBI GI NO: 15237199 NR Description: putative protein; protein id: At5g23040.1
  misc_feature (145)..(258): NCBI GI NO: 37573058 NR Description: unknown protein
  misc_feature (12)..(258): NCBI GI NO: 11357625 NR Description: hypothetical protein F24M12
  misc_feature (25)..(258): NCBI GI NO: 18409276 NR Description: putative protein; protein id: At3g51140
  misc_feature (69)..(258): NCBI GI NO: 17230751 NR Description: hypothetical protein [Nostoc sp. PCC 7120]
  misc_feature (68)..(258): NCBI GI NO: 23129945 NR Description: hypothetical protein [Nostoc punctiforme]
  misc_feature (70)..(258): NCBI GI NO: 23039527 NR Description: hypothetical protein
  misc_feature (69)..(258): NCBI GI NO: 16329734 NR Description: unknown protein [Synechocystis sp. PCC 6803]
MSSSLLLSGSTVSSSFIAPSKPSLVRNSSKTSLLPFRNVSRSFKTVKCTVDSSYGGNVPTFPRTRVWDPYKRLGVSPYASEEEIWASRNFLLQQYAGHERSEESIEGAFEKLLMSSFIRRKKTKINLKSKLKKKVEESPPWLKALLDFVEMPPMDTIFRRLFLFAFMGGWSIMNSAEGGPAFQVAVSLAACVYFLNEKTKSLGRACLIGIGALVAGWFCGSLIIPMIPTFLIQPTWTLELLTSLVAYVFLFLSCTFLK

SEQ ID NO: 3590 - protein, 145 aa, Arabidopsis thaliana
  peptide (1)..(145): Ceres Seq. ID no. 12325607
  misc_feature (1)..(145): NCBI GI NO: 15237199 NR Description: putative protein; protein id: At5g23040.1
  misc_feature (32)..(145): NCBI GI NO: 37573058 NR Description: unknown protein
  misc_feature (1)..(145): NCBI GI NO: 11357625 NR Description: hypothetical protein F24M12
  misc_feature (1)..(145): NCBI GI NO: 18409276 NR Description: putative protein; protein id: At3g51140
  misc_feature (1)..(145): NCBI GI NO: 17230751 NR Description: hypothetical protein [Nostoc sp. PCC 7120]
  misc_feature (1)..(145): NCBI GI NO: 23129945 NR Description: hypothetical protein [Nostoc punctiforme]
  misc_feature (1)..(145): NCBI GI NO: 23039527 NR Description: hypothetical protein
  misc_feature (1)..(145): NCBI GI NO: 16329734 NR Description: unknown protein [Synechocystis sp. PCC 6803]
MSSFIRRKKTKINLKSKLKKKVEESPPWLKALLDFVEMPPMDTIFRRLFLFAFMGGWSIMNSAEGGPAFQVAVSLAACVYFLNEKTKSLGRACLIGIGALVAGWFCGSLIIPMIPTFLIQPTWTLELLTSLVAYVFLFLSCTFLK

SEQ ID NO: 3591 - DNA, 443 bp, Arabidopsis thaliana
  misc_feature (1)..(443): Ceres Seq. ID no. 12385620
gctcattagggtttctcatctacgacggcgtggtgttcctccttcctgctctgaaaaatggcgaagagaaccaagaaggttggaatcgtcggcaaatacggaacacgttatcaggaagcagattaagaagatggaggtcagccagcacagcaagtacttctgtgagttctgtggcaagtacggagtgaagcgaaaggctgttggtatctggggttgcaaggattgtggcaaggtcaaggcaggtggtgcttacacaatgaacaccgccagtgcggtcactgttagaagcacgatcagaaggttgagggagcagatcgagggttaaaagtctgctggctttttatatttggtttccttgttttgacaatttaagttttgcaaactctatgcttgtgattttgaatcaagacttatacattgagcagtttaagcaggtttttatt

SEQ ID NO: 3592 - protein, 107 aa, Arabidopsis thaliana
  peptide (1)..(107): Ceres Seq. ID no. 12385621
  misc_feature (37)..(107): NCBI GI NO: 18411538 NR Description: Expressed protein; protein id: At3g60245
  misc_feature (37)..(107): NCBI GI NO: 1173045 NR Description: 60S RIBOSOMAL PROTEIN L37A
  misc_feature (37)..(106): NCBI GI NO: 34911166 NR Description: putative 60S ribosomal protein L37a
  misc_feature (37)..(107): NCBI GI NO: 6831607 NR Description: 60S ribosomal protein L37a
  misc_feature (37)..(106): NCBI GI NO: 6831602 NR Description: 60S RIBOSOMAL PROTEIN L37A
  misc_feature (37)..(106): NCBI GI NO: 15228411 NR Description: putative 60S ribosomal protein L37a
  misc_feature (37)..(107): NCBI GI NO: 11358898 NR Description: translation initiation factor eIF-4 gamma homolog F27H5
  misc_feature (37)..(106): NCBI GI NO: 6093889 NR Description: 60S RIBOSOMAL PROTEIN L37A
  misc_feature (37)..(103): NCBI GI NO: 7441206 NR Description: ribosomal protein L37a
  misc_feature (37)..(104): NCBI GI NO: 33637090 NR Description: N1 [Toxoplasma gondii]
LIRVSHLRRRGVPPSCSEKWRREPRRLESSANTEHVIRKQIKKMEVSQHSKYFCEFCGKYGVKRKAVGIWGCKDCGKVKAGGAYTMNTASAVTVRSTIRRLREQIEG

SEQ ID NO: 3593 - protein, 64 aa, Arabidopsis thaliana; identical to SEQ ID NO: 2459
  peptide (1)..(64): Ceres Seq. ID no. 12385622
  misc_feature (1)..(64): NCBI GI NO: 18411538 NR Description: Expressed protein; protein id: At3g60245
  misc_feature (1)..(64): NCBI GI NO: 1173045 NR Description: 60S RIBOSOMAL PROTEIN L37A
  misc_feature (1)..(63): NCBI GI NO: 34911166 NR Description: putative 60S ribosomal protein L37a
  misc_feature (1)..(64): NCBI GI NO: 6831607 NR Description: 60S ribosomal protein L37a
  misc_feature (1)..(63): NCBI GI NO: 6831602 NR Description: 60S RIBOSOMAL PROTEIN L37A
  misc_feature (1)..(63): NCBI GI NO: 15228411 NR Description: putative 60S ribosomal protein L37a
  misc_feature (1)..(64): NCBI GI NO: 11358898 NR Description: translation initiation factor eIF-4 gamma homolog F27H5
  misc_feature (1)..(63): NCBI GI NO: 6093889 NR Description: 60S RIBOSOMAL PROTEIN L37A
  misc_feature (1)..(60): NCBI GI NO: 7441206 NR Description: ribosomal protein L37a
  misc_feature (1)..(61): NCBI GI NO: 33637090 NR Description: N1 [Toxoplasma gondii]

SEQ ID NO: 3594 - protein, 61 aa, Arabidopsis thaliana
  peptide (1)..(61): Ceres Seq. ID no. 12385623
SLGFLIYDGVVFLLPALKNGEENQEGWNRRQIRNTLSGSRLRRWRSASTASTSVSSVASTE

SEQ ID NO: 3595 - DNA, 578 bp, Arabidopsis thaliana
  misc_feature (1)..(578): Ceres Seq. ID no. 12423144
caagttgatgcagagtttcaaatctaaggaatatgtgagagagacctttgcttggatgcattactactggttcctcacaaatgaaggtattgactttcttaggacttaccttaatctcccatctgagattgttcctgctactctgaagaagcaacagaagcctcttggtcgaccttttggaggtggtggtgaccgtccccgtggccctcctcgtggtgatggagagaggaggtttggtgacagagatggataccgtggaggtcctaaatcaggtggagagtatggtgacaaggctggagcacctgctgattaccagcctggcttcaggggtggagctagtggagcaaggcaagggtttggtcgtggagctggtcgttttggtggtggtgctggtccagctgctggatctgatctaccttgaaaaggactttcttgtttctttttggtcttatttaaggttacatagcaccttattgagaacgaatgtgtcttttggaactttgtttctttctcttaaaccatttcacaatatgattgtttttttacgttagaattttatgaagaaatgttggatcgtt

SEQ ID NO: 3596 - protein, 139 aa, Arabidopsis thaliana
  peptide (1)..(139): Ceres Seq. ID no. 12423145
  misc_feature (1)..(55): Pfam Name: Pfam Description:  Plectin/S10 domain
  misc_feature (1)..(139): NCBI GI NO: 15238099 NR Description: putative protein; protein id: At5g41520
  misc_feature (1)..(139): NCBI GI NO: 15235985 NR Description: putative ribosomal protein S10
  misc_feature (1)..(139): NCBI GI NO: 20139798 NR Description: 40S ribosomal protein S10-3
  misc_feature (1)..(139): NCBI GI NO: 15237217 NR Description: putative protein; protein id: At5g52650
  misc_feature (1)..(136): NCBI GI NO: 34897532 NR Description: OSJNBa0042L16.3
  misc_feature (1)..(136): NCBI GI NO: 20140213 NR Description: 40S ribosomal protein S10
  misc_feature (1)..(130): NCBI GI NO: 34905824 NR Description: putative ribosomal protein S10
  misc_feature (1)..(125): NCBI GI NO: 585934 NR Description: 40S RIBOSOMAL PROTEIN S10
  misc_feature (1)..(124): NCBI GI NO: 24266976 NR Description: ribosomal protein S10 [Branchiostoma belcheri]
  misc_feature (1)..(125): NCBI GI NO: 32967647 NR Description: Ribosomal protein S10 [Danio rerio]
KLMQSFKSKEYVRETFAWMHYYWFLTNEGIDFLRTYLNLPSEIVPATLKKQQKPLGRPFGGGGDRPRGPPRGDGERRFGDRDGYRGGPKSGGEYGDKAGAPADYQPGFRGGASGARQGFGRGAGRFGGGAGPAAGSDLP

SEQ ID NO: 3597 - protein, 137 aa, Arabidopsis thaliana
  peptide (1)..(137): Ceres Seq. ID no. 12423146
  misc_feature (1)..(53): Pfam Name: Pfam Description:  Plectin/S10 domain
  misc_feature (1)..(137): NCBI GI NO: 15238099 NR Description: putative protein; protein id: At5g41520
  misc_feature (1)..(137): NCBI GI NO: 15235985 NR Description: putative ribosomal protein S10
  misc_feature (1)..(137): NCBI GI NO: 20139798 NR Description: 40S ribosomal protein S10-3
  misc_feature (1)..(137): NCBI GI NO: 15237217 NR Description: putative protein; protein id: At5g52650
  misc_feature (1)..(134): NCBI GI NO: 34897532 NR Description: OSJNBa0042L16.3
  misc_feature (1)..(134): NCBI GI NO: 20140213 NR Description: 40S ribosomal protein S10
  misc_feature (1)..(128): NCBI GI NO: 34905824 NR Description: putative ribosomal protein S10
  misc_feature (1)..(123): NCBI GI NO: 585934 NR Description: 40S RIBOSOMAL PROTEIN S10
  misc_feature (1)..(122): NCBI GI NO: 24266976 NR Description: ribosomal protein S10 [Branchiostoma belcheri]
  misc_feature (1)..(123): NCBI GI NO: 32967647 NR Description: Ribosomal protein S10 [Danio rerio]
MQSFKSKEYVRETFAWMHYYWFLTNEGIDFLRTYLNLPSEIVPATLKKQQKPLGRPFGGGGDRPRGPPRGDGERRFGDRDGYRGGPKSGGEYGDKAGAPADYQPGFRGGASGARQGFGRGAGRFGGGAGPAAGSDLP

SEQ ID NO: 3598 - protein, 121 aa, Arabidopsis thaliana
  peptide (1)..(121): Ceres Seq. ID no. 12423147
  misc_feature (1)..(121): NCBI GI NO: 15238099 NR Description: putative protein; protein id: At5g41520
  misc_feature (1)..(121): NCBI GI NO: 15235985 NR Description: putative ribosomal protein S10
  misc_feature (1)..(121): NCBI GI NO: 20139798 NR Description: 40S ribosomal protein S10-3
  misc_feature (1)..(121): NCBI GI NO: 15237217 NR Description: putative protein; protein id: At5g52650
  misc_feature (1)..(118): NCBI GI NO: 34897532 NR Description: OSJNBa0042L16.3
  misc_feature (1)..(118): NCBI GI NO: 20140213 NR Description: 40S ribosomal protein S10
  misc_feature (1)..(112): NCBI GI NO: 34905824 NR Description: putative ribosomal protein S10
  misc_feature (1)..(107): NCBI GI NO: 585934 NR Description: 40S RIBOSOMAL PROTEIN S10
  misc_feature (1)..(106): NCBI GI NO: 24266976 NR Description: ribosomal protein S10 [Branchiostoma belcheri]
  misc_feature (1)..(107): NCBI GI NO: 32967647 NR Description: Ribosomal protein S10 [Danio rerio]
MHYYWFLTNEGIDFLRTYLNLPSEIVPATLKKQQKPLGRPFGGGGDRPRGPPRGDGERRFGDRDGYRGGPKSGGEYGDKAGAPADYQPGFRGGASGARQGFGRGAGRFGGGAGPAAGSDLP

SEQ ID NO: 3599 - DNA, 1705 bp, Arabidopsis thaliana
  misc_feature (1)..(1705): Ceres Seq. ID no. 12396597
  misc_feature (635)..(635): n is a, c, t, g, unknown, or other
atacacacaattcaatatttgacttcacatagagagagatagagagatggcgacggaaacggaagttgtagctccggtaacggtaagcaacggcggaagcaaaggatgttgcaagtacggtggtcctggttacgcgactcctctcgccgctatgtctggtccatcggagaaacttatctacgtaaccgccgtctacaccggaactggaatagataaaccggattatttggcgacggtggatgtagatccaagctcgccttcgtattcaagtgttattcatagattaccaatgccttttgttggtgatgagcttcatcattctggttggaactcttgtagttcttgccatggtgatgcttctgttgatagacgttatctcgtgttaccgtctcttatatctggtcgcatttatgcgattgatactaaggaaaacccgagggctccgtctttgtataagtatgttgatcctaaagagattgctgataagactggattggcgtttcctcacacggctcattgcctcgccacgggcgagatcttggtgtcctgtcttggagatgaagaggggaatgctaaggggaatgggtttcttcttcttgactctgattttaacatcaagaataggtgggagaaancaggacatagtcctttgtatgggtatgatgttctagatgtttttggtaccaacctcggcacaagaccatgatcagcacatcttggggagcacctaaagccttctctaaaggtttcaatcttcagcacgttgctgatggcttgtatggaagtcatctacatgtttatagttggccaggaggtgaaatgaaacaattaattgaccttggaccgactggtctcttacctttggagattagattcttgcatgatccatctaaagatacagggtttgttgggagtgccttgtcgagtaatatgataagatttttcaagaacagtgatgaaacatggagccatgaggttgttatatcggttaaaccgttgaaagtcgaaaactggatacttccagaaatgccggggctaatcaccgacttcttgatctccctcgatgaccgatttatttactttgtgaactggctccatggagacattcgtcagtacaacatagaggaccctaaaaaccctgtattaacagggcaaatttgggttggaggattactacaaaagggcagtcctgttaaggcggttggagaagacggaaacactttccagttcgaggttcctcagatcaaggggaaatctttacgaggtggacctcaaatgattcagctgagcctcgatgggaaacgattgtatgcaacaaactcgctgtttagcgcatgggatcgtcagttttatcctgaaatcatggagaaaggctcacacataattcagattgatgttgatacagaaaaaggtggtctcaccataaaccctgatttctttgtggactttggtgatgaaccagacggtccttcactagcccacgagatgagatatccaggtggagactgcacttccgatatctggatttgaatttggctttgtttagagtgtgttttgtgttaagtttaaattgagttttattatttgttgtgtgtttagtagagttgaataaaaaagggagtaagatgactcagacaattaacacttgtttgtacattttgactcctatgtgtcttaagtaataaaactttctacaattcgactg

SEQ ID NO: 3600 - protein, 275 aa, Arabidopsis thaliana
  peptide (1)..(275): Ceres Seq. ID no. 12396598
  misc_feature (1)..(275): Pfam Name: SBP56 Pfam Description: 56kDa selenium binding protein
  misc_feature (1)..(275): NCBI GI NO: 15236385 NR Description: selenium-binding protein like
  misc_feature (1)..(275): NCBI GI NO: 15485232 NR Description: selenium binding protein [Arabidopsis thaliana]
  misc_feature (1)..(275): NCBI GI NO: 15236386 NR Description: selenium-binding protein like
  misc_feature (1)..(275): NCBI GI NO: 13605825 NR Description: AT4g14040/dl3061c [Arabidopsis thaliana]
  misc_feature (1)..(275): NCBI GI NO: 22530900 NR Description: selenium-binding protein-like protein
  misc_feature (1)..(275): NCBI GI NO: 25348077 NR Description: selenium-binding protein like
  misc_feature (1)..(275): NCBI GI NO: 15485720 NR Description: selenium binding protein [Medicago sativa]
  misc_feature (1)..(275): NCBI GI NO: 20340239 NR Description: putative selenium-binding protein
  misc_feature (1)..(275): NCBI GI NO: 15485716 NR Description: selenium binding protein [Lotus japonicus]
  misc_feature (1)..(275): NCBI GI NO: 15229520 NR Description: selenium binding protein, putative
MISTSWGAPKAFSKGFNLQHVADGLYGSHLHVYSWPGGEMKQLIDLGPTGLLPLEIRFLHDPSKDTGFVGSALSSNMIRFFKNSDETWSHEVVISVKPLKVENWILPEMPGLITDFLISLDDRFIYFVNWLHGDIRQYNIEDPKNPVLTGQIWVGGLLQKGSPVKAVGEDGNTFQFEVPQIKGKSLRGGPQMIQLSLDGKRLYATNSLFSAWDRQFYPEIMEKGSHIIQIDVDTEKGGLTINPDFFVDFGDEPDGPSLAHEMRYPGGDCTSDIWI

SEQ ID NO: 3601 - protein, 236 aa, Arabidopsis thaliana
  peptide (1)..(236): Ceres Seq. ID no. 12396599
  misc_feature (1)..(236): Pfam Name: SBP56 Pfam Description: 56kDa selenium binding protein
  misc_feature (1)..(236): NCBI GI NO: 15236385 NR Description: selenium-binding protein like
  misc_feature (1)..(236): NCBI GI NO: 15485232 NR Description: selenium binding protein [Arabidopsis thaliana]
  misc_feature (1)..(236): NCBI GI NO: 15236386 NR Description: selenium-binding protein like
  misc_feature (1)..(236): NCBI GI NO: 13605825 NR Description: AT4g14040/dl3061c [Arabidopsis thaliana]
  misc_feature (1)..(236): NCBI GI NO: 22530900 NR Description: selenium-binding protein-like protein
  misc_feature (1)..(236): NCBI GI NO: 25348077 NR Description: selenium-binding protein like
  misc_feature (1)..(236): NCBI GI NO: 15485720 NR Description: selenium binding protein [Medicago sativa]
  misc_feature (1)..(236): NCBI GI NO: 20340239 NR Description: putative selenium-binding protein
  misc_feature (1)..(236): NCBI GI NO: 15485716 NR Description: selenium binding protein [Lotus japonicus]
  misc_feature (1)..(236): NCBI GI NO: 15229520 NR Description: selenium binding protein, putative
MKQLIDLGPTGLLPLEIRFLHDPSKDTGFVGSALSSNMIRFFKNSDETWSHEVVISVKPLKVENWILPEMPGLITDFLISLDDRFIYFVNWLHGDIRQYNIEDPKNPVLTGQIWVGGLLQKGSPVKAVGEDGNTFQFEVPQIKGKSLRGGPQMIQLSLDGKRLYATNSLFSAWDRQFYPEIMEKGSHIIQIDVDTEKGGLTINPDFFVDFGDEPDGPSLAHEMRYPGGDCTSDIWI

SEQ ID NO: 3602 - protein, 219 aa, Arabidopsis thaliana
  peptide (1)..(219): Ceres Seq. ID no. 12396600
  misc_feature (22)..(206): Pfam Name: SBP56 Pfam Description: 56kDa selenium binding protein
  misc_feature (1)..(206): NCBI GI NO: 15236385 NR Description: selenium-binding protein like
  misc_feature (25)..(205): NCBI GI NO: 15485232 NR Description: selenium binding protein [Arabidopsis thaliana]
  misc_feature (1)..(206): NCBI GI NO: 15236386 NR Description: selenium-binding protein like
  misc_feature (5)..(206): NCBI GI NO: 13605825 NR Description: AT4g14040/dl3061c [Arabidopsis thaliana]
  misc_feature (1)..(206): NCBI GI NO: 22530900 NR Description: selenium-binding protein-like protein
  misc_feature (1)..(206): NCBI GI NO: 25348077 NR Description: selenium-binding protein like
  misc_feature (9)..(206): NCBI GI NO: 15485720 NR Description: selenium binding protein [Medicago sativa]
  misc_feature (82)..(206): NCBI GI NO: 20340239 NR Description: putative selenium-binding protein
  misc_feature (20)..(206): NCBI GI NO: 15485716 NR Description: selenium binding protein [Lotus japonicus]
  misc_feature (15)..(206): NCBI GI NO: 15229520 NR Description: selenium binding protein, putative
  misc_feature (197)..(197): Xaa is any aa, unknown or other
MATETEVVAPVTVSNGGSKGCCKYGGPGYATPLAAMSGPSEKLIYVTAVYTGTGIDKPDYLATVDVDPSSPSYSSVIHRLPMPFVGDELHHSGWNSCSSCHGDASVDRRYLVLPSLISGRIYAIDTKENPRAPSLYKYVDPKEIADKTGLAFPHTAHCLATGEILVSCLGDEEGNAKGNGFLLLDSDFNIKNRWEKXGHSPLYGYDVLDVFGTNLGTRP

SEQ ID NO: 3603 - DNA, 847 bp, Arabidopsis thaliana
  misc_feature (1)..(847): Ceres Seq. ID no. 13487178
ctcattttccaccattaaaaaacctctctactctctcctcaaaaactcaaaagagcaaaaaaaagagaagaagaatcaaaatcccacacaatggcaacacactcttccttcaccgcaacaacacctctctttctcatcgttcttctatccctatcctccgtctcagttctcggcgcatctcaccaccacgcaacggcgccggctccgtctgtagactgttcgactctcatactcaacatggctgactgtttatccttcgtttcgagcggaggcacggtggcgaaaccggaaggtacatgttgctctggtcttaagacggtgcttaaagctgactctcagtgtctatgtgaagcgtttaagagcagtgcttctcttggagttactttgaatatcactaaggcttctactcttcccgccgcatgcaagcttcacgctccttctatcgctacttgtggattgtctgttgctccaagtactgctccaggtcttgctccaggagtagctgctgctggacctgagacagccggatttctagctccaaatccttcttcagggaacgatggatcttctttgattccgacctcgttcacaactgtactcagtgccgtactgttcgttttgttcttctctagtgcgtaaaaaaaaacctgaatcttttttcaccagctagatttggctgtatgaaattgattaatggtttttattagggttaatctatgtatgttttggagtgttctgtttttagaccatatcggtttctctattactagcgtttactcttttagtttatgttattactttgtctcacaacattggtccttttattcgatctatcgcttattcctcc

SEQ ID NO: 3604 - protein, 182 aa, Arabidopsis thaliana
  peptide (1)..(182): Ceres Seq. ID no. 13487179
  misc_feature (43)..(121): Pfam Name: Pfam Description:  Protease inhibitor/seed storage/LTP family
  misc_feature (1)..(182): NCBI GI NO: 18424785 NR Description: protease inhibitor/seed storage/lipid transfer
  misc_feature (1)..(182): NCBI GI NO: 21618136 NR Description: nonspecific lipid-transfer protein-like protein
  misc_feature (1)..(182): NCBI GI NO: 10176956 NR Description: contains similarity to nonspecific lipid-transferprotein~gene_id:MHJ24
  misc_feature (14)..(179): NCBI GI NO: 15225509 NR Description: protease inhibitor/seed storage/lipid transfer
  misc_feature (14)..(179): NCBI GI NO: 27765012 NR Description: At2g13820 [Arabidopsis thaliana]
  misc_feature (7)..(174): NCBI GI NO: 30682659 NR Description: lipid transfer protein family
  misc_feature (14)..(181): NCBI GI NO: 7487610 NR Description: hypothetical protein T3F12
  misc_feature (14)..(168): NCBI GI NO: 30680828 NR Description: protease inhibitor/seed storage/lipid transfer
  misc_feature (7)..(131): NCBI GI NO: 18415958 NR Description: lipid transfer protein family
  misc_feature (13)..(154): NCBI GI NO: 15220327 NR Description: protease inhibitor/seed storage/lipid transfer
MATHSSFTATTPLFLIVLLSLSSVSVLGASHHHATAPAPSVDCSTLILNMADCLSFVSSGGTVAKPEGTCCSGLKTVLKADSQCLCEAFKSSASLGVTLNITKASTLPAACKLHAPSIATCGLSVAPSTAPGLAPGVAAAGPETAGFLAPNPSSGNDGSSLIPTSFTTVLSAVLFVLFFSSA

SEQ ID NO: 3605 - protein, 133 aa, Arabidopsis thaliana
  peptide (1)..(133): Ceres Seq. ID no. 13487180
  misc_feature (1)..(72): Pfam Name: Pfam Description:  Protease inhibitor/seed storage/LTP family
  misc_feature (1)..(133): NCBI GI NO: 18424785 NR Description: protease inhibitor/seed storage/lipid transfer
  misc_feature (1)..(133): NCBI GI NO: 21618136 NR Description: nonspecific lipid-transfer protein-like protein
  misc_feature (1)..(133): NCBI GI NO: 10176956 NR Description: contains similarity to nonspecific lipid-transferprotein~gene_id:MHJ24
  misc_feature (1)..(130): NCBI GI NO: 15225509 NR Description: protease inhibitor/seed storage/lipid transfer
  misc_feature (1)..(130): NCBI GI NO: 27765012 NR Description: At2g13820 [Arabidopsis thaliana]
  misc_feature (1)..(125): NCBI GI NO: 30682659 NR Description: lipid transfer protein family
  misc_feature (1)..(132): NCBI GI NO: 7487610 NR Description: hypothetical protein T3F12
  misc_feature (1)..(119): NCBI GI NO: 30680828 NR Description: protease inhibitor/seed storage/lipid transfer
  misc_feature (1)..(82): NCBI GI NO: 18415958 NR Description: lipid transfer protein family
  misc_feature (1)..(105): NCBI GI NO: 15220327 NR Description: protease inhibitor/seed storage/lipid transfer
MADCLSFVSSGGTVAKPEGTCCSGLKTVLKADSQCLCEAFKSSASLGVTLNITKASTLPAACKLHAPSIATCGLSVAPSTAPGLAPGVAAAGPETAGFLAPNPSSGNDGSSLIPTSFTTVLSAVLFVLFFSSA

SEQ ID NO: 3606 - DNA, 486 bp, Arabidopsis thaliana
  misc_feature (1)..(486): Ceres Seq. ID no. 12323140
atggcttttcctagttgtgtttcggttgcaatcacggctatgatgctacttgtaacatgttgtcattgtgcaacataccaagaacaattcatgggtccacaaaacgcagcaagagctcatttaaggctcaaaccgctaaagtgggacgccaaattggcccgttacgcgcaatggtgggctaaccagagacgcggtgactgcgccttgacccattccaatggaccctatggtgagaatctcttttggggctcaggcaatagatggggtccatctcaagccgcctatggatggttgtctgaagcaaggagctataactatagatctaactcgtgcaactccgagatgtgtggccattacacacaaatcgtgtggaagaacacacaaaagattggttgcgctcacgtgatctgcaatggcggaggaggcgtattcttgacttgcaattatgatccaccggggaattttcttggtaggaagccttattga

SEQ ID NO: 3607 - protein, 161 aa, Arabidopsis thaliana
  peptide (1)..(161): Ceres Seq. ID no. 12323141
  misc_feature (31)..(148): Pfam Name: Pfam Description:  SCP-like extracellular protein
  misc_feature (1)..(161): NCBI GI NO: 15234704 NR Description: PR-1-like protein; protein id: At4g30320.1
  misc_feature (30)..(161): NCBI GI NO: 22327916 NR Description: similar to putative pathogenesis-related protein
  misc_feature (25)..(161): NCBI GI NO: 2500715 NR Description: Pathogenesis-related protein PR-1 precursor
  misc_feature (25)..(161): NCBI GI NO: 15235994 NR Description: putative pathogenesis-related protein
  misc_feature (20)..(161): NCBI GI NO: 15235992 NR Description: putative pathogenesis-related protein
  misc_feature (5)..(161): NCBI GI NO: 7442179 NR Description: pathogenesis related protein-1 - maize
  misc_feature (7)..(161): NCBI GI NO: 480679 NR Description: pathogenesis-related protein 1a - barley
  misc_feature (5)..(161): NCBI GI NO: 3702665 NR Description: pathogenisis-related protein 1.2
  misc_feature (15)..(161): NCBI GI NO: 34914936 NR Description: putative pathogenesis-related protein precursor
  misc_feature (1)..(161): NCBI GI NO: 548589 NR Description: Pathogenesis-related protein PRB1-3 precursor
MAFPSCVSVAITAMMLLVTCCHCATYQEQFMGPQNAARAHLRLKPLKWDAKLARYAQWWANQRRGDCALTHSNGPYGENLFWGSGNRWGPSQAAYGWLSEARSYNYRSNSCNSEMCGHYTQIVWKNTQKIGCAHVICNGGGGVFLTCNYDPPGNFLGRKPY

SEQ ID NO: 3608 - protein, 148 aa, Arabidopsis thaliana
  peptide (1)..(148): Ceres Seq. ID no. 12323142
  misc_feature (18)..(135): Pfam Name: Pfam Description:  SCP-like extracellular protein
  misc_feature (1)..(148): NCBI GI NO: 15234704 NR Description: PR-1-like protein; protein id: At4g30320.1
  misc_feature (17)..(148): NCBI GI NO: 22327916 NR Description: similar to putative pathogenesis-related protein
  misc_feature (12)..(148): NCBI GI NO: 2500715 NR Description: Pathogenesis-related protein PR-1 precursor
  misc_feature (12)..(148): NCBI GI NO: 15235994 NR Description: putative pathogenesis-related protein
  misc_feature (7)..(148): NCBI GI NO: 15235992 NR Description: putative pathogenesis-related protein
  misc_feature (1)..(148): NCBI GI NO: 7442179 NR Description: pathogenesis related protein-1 - maize
  misc_feature (1)..(148): NCBI GI NO: 480679 NR Description: pathogenesis-related protein 1a - barley
  misc_feature (1)..(148): NCBI GI NO: 3702665 NR Description: pathogenisis-related protein 1.2
  misc_feature (2)..(148): NCBI GI NO: 34914936 NR Description: putative pathogenesis-related protein precursor
  misc_feature (1)..(148): NCBI GI NO: 548589 NR Description: Pathogenesis-related protein PRB1-3 precursor
MMLLVTCCHCATYQEQFMGPQNAARAHLRLKPLKWDAKLARYAQWWANQRRGDCALTHSNGPYGENLFWGSGNRWGPSQAAYGWLSEARSYNYRSNSCNSEMCGHYTQIVWKNTQKIGCAHVICNGGGGVFLTCNYDPPGNFLGRKPY

SEQ ID NO: 3609 - protein, 147 aa, Arabidopsis thaliana
  peptide (1)..(147): Ceres Seq. ID no. 12323143
  misc_feature (17)..(134): Pfam Name: Pfam Description:  SCP-like extracellular protein
  misc_feature (1)..(147): NCBI GI NO: 15234704 NR Description: PR-1-like protein; protein id: At4g30320.1
  misc_feature (16)..(147): NCBI GI NO: 22327916 NR Description: similar to putative pathogenesis-related protein
  misc_feature (11)..(147): NCBI GI NO: 2500715 NR Description: Pathogenesis-related protein PR-1 precursor
  misc_feature (11)..(147): NCBI GI NO: 15235994 NR Description: putative pathogenesis-related protein
  misc_feature (6)..(147): NCBI GI NO: 15235992 NR Description: putative pathogenesis-related protein
  misc_feature (1)..(147): NCBI GI NO: 7442179 NR Description: pathogenesis related protein-1 - maize
  misc_feature (1)..(147): NCBI GI NO: 480679 NR Description: pathogenesis-related protein 1a - barley
  misc_feature (1)..(147): NCBI GI NO: 3702665 NR Description: pathogenisis-related protein 1.2
  misc_feature (1)..(147): NCBI GI NO: 34914936 NR Description: putative pathogenesis-related protein precursor
  misc_feature (1)..(147): NCBI GI NO: 548589 NR Description: Pathogenesis-related protein PRB1-3 precursor
MLLVTCCHCATYQEQFMGPQNAARAHLRLKPLKWDAKLARYAQWWANQRRGDCALTHSNGPYGENLFWGSGNRWGPSQAAYGWLSEARSYNYRSNSCNSEMCGHYTQIVWKNTQKIGCAHVICNGGGGVFLTCNYDPPGNFLGRKPY

SEQ ID NO: 3610 - DNA, 855 bp, Arabidopsis thaliana
  misc_feature (1)..(855): Ceres Seq. ID no. 13592318
acatttcctcactcaactctctcattctcactaacagagagaaaaagcaaaagcaaaaatggctcgatctttcgctattgctgtgatctgtatcgtcctcatcgccggcgttactggtcaagctccgacttcaccaccaaccgctacaccagctccaccaactccaacaactcctccaccagcagcaactcctcctcctgtctcagcaccaccaccagtcacaacatctcctcctccagtcaccactgctcctcctccagcaaatccaccaccaccagtctcttctcctcctcctgcttctcctccaccagctactcctcctccagtcgcttctcctcctcctcccgttgcttctcctccaccagcaactcctcctcccgtcgctactcctcccccagctcctctagcttcccctcctgctcaagttccagctccagcaccgaccacgaagccagattctccatctccatctccgtcatctagcccacctcttccatcaagcgacgctcctggacctagcaccgattctatctctcctgctcctagccccactgatgtgaacgaccagaatggagctagcaagatggtttcgagcttagtatttggatctgttctcgtctgatttatgatctaagtggaatcttttgtgactgtgttacttgcatttatttttatgtcgtctttgtttgttccactgtattgcttgggactgaattcttttgggatttattatctttcggagaggatactattgagagcttgagatggagatagcaggatattttgattgcagatacttttgtggcttcatttctcattccatttgattattagtgtactacattccttttctcc

SEQ ID NO: 3611 - protein, 187 aa, Arabidopsis thaliana
  peptide (1)..(187): Ceres Seq. ID no. 13592319
  misc_feature (14)..(171): Pfam Name: Pfam Description:  Formin Homology 2 Domain
  misc_feature (1)..(187): NCBI GI NO: 15226024 NR Description: arabinogalactan-protein (AGP9)
  misc_feature (1)..(187): NCBI GI NO: 13265426 NR Description: At2g14890 [Arabidopsis thaliana]
  misc_feature (5)..(187): NCBI GI NO: 7441828 NR Description: extensin-like cell wall protein
  misc_feature (5)..(171): NCBI GI NO: 7441829 NR Description: proline-rich cell wall protein - upland cotton
  misc_feature (19)..(187): NCBI GI NO: 7441829 NR Description: proline-rich cell wall protein - upland cotton
  misc_feature (26)..(183): NCBI GI NO: 1084362 NR Description: extensin-like protein S3 - alfalfa
  misc_feature (7)..(180): NCBI GI NO: 1084362 NR Description: extensin-like protein S3 - alfalfa
  misc_feature (22)..(164): NCBI GI NO: 5917664 NR Description: extensin-like protein [Lycopersicon esculentum]
  misc_feature (23)..(164): NCBI GI NO: 6523547 NR Description: hydroxyproline-rich glycoprotein DZ-HRGP
  misc_feature (19)..(164): NCBI GI NO: 6523547 NR Description: hydroxyproline-rich glycoprotein DZ-HRGP
MARSFAIAVICIVLIAGVTGQAPTSPPTATPAPPTPTTPPPAATPPPVSAPPPVTTSPPPVTTAPPPANPPPPVSSPPPASPPPATPPPVASPPPPVASPPPATPPPVATPPPAPLASPPAQVPAPAPTTKPDSPSPSPSSSPPLPSSDAPGPSTDSISPAPSPTDVNDQNGASKMVSSLVFGSVLV

SEQ ID NO: 3612 - protein, 160 aa, Arabidopsis thaliana
  peptide (1)..(160): Ceres Seq. ID no. 13592320
  misc_feature (40)..(158): Pfam Name: Pfam Description:  Lipoprotein amino terminal region
TFPHSTLSFSLTERKSKSKNGSIFRYCCDLYRPHRRRYWSSSDFTTNRYTSSTNSNNSSTSSNSSSCLSTTTSHNISSSSHHCSSSSKSTTTSLFSSSCFSSTSYSSSSRFSSSSRCFSSTSNSSSRRYSSPSSSSFPSCSSSSSSTDHEARFSISISVI

SEQ ID NO: 3613 - DNA, 1481 bp, Arabidopsis thaliana
  misc_feature (1)..(1481): Ceres Seq. ID no. 12482305
atctcttcaaataattttattggttcttctgtcttatgaacaagaacagaggagctctgtcttgtttcctcttatttacgtactaccaatcctcatacacacacatgtgtctttggtttcatctccgaaaagtgataatctgttttatttgatttgacttttgagagaacagagcatatataaagaaacagagcagctctgtttttttttttttgtgttgcagtttgtagaatcatggagaggtacgaaatagtgaaggatattgggtctggtaacttcggagtagcaaagcttgttcgtgacaaattttccaaagagcttttcgctgttaagttcatcgagcgaggccaaaagattgatgaacatgtacaaagagaaatcatgaaccataggtcgctgatccatcccaatataataagattcaaggaggttttattgacggcaacacatttggcgttagtaatggaatacgccgccggaggagaactgttcggaagaatctgcagcgccggaagattcagtgaagacgaggcaaggtttttctttcagcagcttatatcaggagttaattactgtcacagtcttcaaatatgccatagagatttaaagctagagaacacgttacttgatggaagcgaagcgccacgtgtaaagatttgcgactttggatattcaaaatcaggagttcttcattcgcaaccaaagacaacagtaggaacacctgcttacattgcacctgaagtgctctccacgaaagagtatgacggcaaaatcgctgatgtttggtcttgtggagtcactttgtatgttatgcttgttggtgcttatccttttgaagatccttctgatcctaaagattttcggaagacgatcggtcggattctcaaagctcagtatgctattcctgattatgttcgagtttcggatgaatgcagacatcttctctctcggatattcgttgccaaccctgaaaagagaataacaatagaggagataaagaatcattcttggtttctcaagaacttgccggtagagatgtatgaaggatcattgatgatgaatggtccatcgactcagacagtagaagagatagtgtggatcattgaagaagctcggaaacctatcaccgtagctactggactcgcaggtgctggtggctctggtggaagcagtaatggtgccattggaagtagcagtatggatctcgatgacttggacacagatttcgacgacatcgataccgctgatctcctttcccctttgtgaacaattgtatcaaaaaccaaagatttcatgtttctgaagcctgctgatactactacacattgatgatacacagacgtgaatataattgttcactaaaatgtataattagagtgtgaaaacatttgtctttgattacaaaaatgttctgttagacatttttatacatatgcatggaagatgtatatataaacagaaacataatatctagtcacgtt

SEQ ID NO: 3614 - protein, 343 aa, Arabidopsis thaliana
  peptide (1)..(343): Ceres Seq. ID no. 12482306
  misc_feature (4)..(260): Pfam Name: Pfam Description:  Protein kinase domain
  misc_feature (1)..(343): NCBI GI NO: 15218270 NR Description: serine-threonine protein kinase, putative
  misc_feature (1)..(343): NCBI GI NO: 21618139 NR Description: serine-threonine protein kinase, putative
  misc_feature (1)..(338): NCBI GI NO: 29164823 NR Description: abcisic acid-inducible protein kinanase
  misc_feature (1)..(338): NCBI GI NO: 34906840 NR Description: putative protein kinase HvPKABA1
  misc_feature (11)..(343): NCBI GI NO: 11138330 NR Description: putative serine/threonine kinase GDBrPK
  misc_feature (1)..(343): NCBI GI NO: 14588571 NR Description: protein kinase HvPKABA1
  misc_feature (1)..(339): NCBI GI NO: 2055374 NR Description: serine-threonine protein kinase
  misc_feature (1)..(343): NCBI GI NO: 481002 NR Description: protein kinase MCPK9 (EC 2
  misc_feature (11)..(343): NCBI GI NO: 416564 NR Description: Abcisic acid-inducible protein kinase
  misc_feature (2)..(307): NCBI GI NO: 3811293 NR Description: putative serine/threonine protein kinase
MERYEIVKDIGSGNFGVAKLVRDKFSKELFAVKFIERGQKIDEHVQREIMNHRSLIHPNIIRFKEVLLTATHLALVMEYAAGGELFGRICSAGRFSEDEARFFFQQLISGVNYCHSLQICHRDLKLENTLLDGSEAPRVKICDFGYSKSGVLHSQPKTTVGTPAYIAPEVLSTKEYDGKIADVWSCGVTLYVMLVGAYPFEDPSDPKDFRKTIGRILKAQYAIPDYVRVSDECRHLLSRIFVANPEKRITIEEIKNHSWFLKNLPVEMYEGSLMMNGPSTQTVEEIVWIIEEARKPITVATGLAGAGGSGGSSNGAIGSSSMDLDDLDTDFDDIDTADLLSPL

SEQ ID NO: 3615 - protein, 294 aa, Arabidopsis thaliana
  peptide (1)..(294): Ceres Seq. ID no. 12482307
  misc_feature (1)..(211): Pfam Name: Pfam Description:  Protein kinase domain
  misc_feature (1)..(294): NCBI GI NO: 15218270 NR Description: serine-threonine protein kinase, putative
  misc_feature (1)..(294): NCBI GI NO: 21618139 NR Description: serine-threonine protein kinase, putative
  misc_feature (1)..(289): NCBI GI NO: 29164823 NR Description: abcisic acid-inducible protein kinanase
  misc_feature (1)..(289): NCBI GI NO: 34906840 NR Description: putative protein kinase HvPKABA1
  misc_feature (1)..(294): NCBI GI NO: 11138330 NR Description: putative serine/threonine kinase GDBrPK
  misc_feature (1)..(294): NCBI GI NO: 14588571 NR Description: protein kinase HvPKABA1
  misc_feature (1)..(290): NCBI GI NO: 2055374 NR Description: serine-threonine protein kinase
  misc_feature (1)..(294): NCBI GI NO: 481002 NR Description: protein kinase MCPK9 (EC 2
  misc_feature (1)..(294): NCBI GI NO: 416564 NR Description: Abcisic acid-inducible protein kinase
  misc_feature (1)..(258): NCBI GI NO: 3811293 NR Description: putative serine/threonine protein kinase
MNHRSLIHPNIIRFKEVLLTATHLALVMEYAAGGELFGRICSAGRFSEDEARFFFQQLISGVNYCHSLQICHRDLKLENTLLDGSEAPRVKICDFGYSKSGVLHSQPKTTVGTPAYIAPEVLSTKEYDGKIADVWSCGVTLYVMLVGAYPFEDPSDPKDFRKTIGRILKAQYAIPDYVRVSDECRHLLSRIFVANPEKRITIEEIKNHSWFLKNLPVEMYEGSLMMNGPSTQTVEEIVWIIEEARKPITVATGLAGAGGSGGSSNGAIGSSSMDLDDLDTDFDDIDTADLLSPL

SEQ ID NO: 3616 - protein, 267 aa, Arabidopsis thaliana
  peptide (1)..(267): Ceres Seq. ID no. 12482308
  misc_feature (1)..(184): Pfam Name: Pfam Description:  Protein kinase domain
  misc_feature (1)..(267): NCBI GI NO: 15218270 NR Description: serine-threonine protein kinase, putative
  misc_feature (1)..(267): NCBI GI NO: 21618139 NR Description: serine-threonine protein kinase, putative
  misc_feature (1)..(262): NCBI GI NO: 29164823 NR Description: abcisic acid-inducible protein kinanase
  misc_feature (1)..(262): NCBI GI NO: 34906840 NR Description: putative protein kinase HvPKABA1
  misc_feature (1)..(267): NCBI GI NO: 11138330 NR Description: putative serine/threonine kinase GDBrPK
  misc_feature (1)..(267): NCBI GI NO: 14588571 NR Description: protein kinase HvPKABA1
  misc_feature (1)..(263): NCBI GI NO: 2055374 NR Description: serine-threonine protein kinase
  misc_feature (1)..(267): NCBI GI NO: 481002 NR Description: protein kinase MCPK9 (EC 2
  misc_feature (1)..(267): NCBI GI NO: 416564 NR Description: Abcisic acid-inducible protein kinase
  misc_feature (1)..(231): NCBI GI NO: 3811293 NR Description: putative serine/threonine protein kinase
MEYAAGGELFGRICSAGRFSEDEARFFFQQLISGVNYCHSLQICHRDLKLENTLLDGSEAPRVKICDFGYSKSGVLHSQPKTTVGTPAYIAPEVLSTKEYDGKIADVWSCGVTLYVMLVGAYPFEDPSDPKDFRKTIGRILKAQYAIPDYVRVSDECRHLLSRIFVANPEKRITIEEIKNHSWFLKNLPVEMYEGSLMMNGPSTQTVEEIVWIIEEARKPITVATGLAGAGGSGGSSNGAIGSSSMDLDDLDTDFDDIDTADLLSPL

SEQ ID NO: 3617 - DNA, 1279 bp, Arabidopsis thaliana
  misc_feature (1)..(1279): Ceres Seq. ID no. 13488872
gttttggtgtttcttcgtcgacgtcgctatctccaatctcattactcccctttctcaatgatcataaaacctacttcgattctactccttatcaactgaatcaccgaaaaacctcaccttttttctttttccgatcatggggaatctgatcagtttgatcttctgctgcgggagaaggcagaggagcaatattcctccggcgatggaaacggctcctcttgatctcccaccgaacagatttgtattcgccgccgtgccaccatatctgaaccctaaccctaactacgttgaccagtatccaggtaactgccttcctccgccagtaactgagccgccgatgctaccgtacaatttcaaccatttgcatcactatcctcccaacagttaccaactacctcatcctttgtttcacggcggtagataccctatactgccgcctcctacgtacgtcgaccagaaagccgtcacgattcgtaacgatgttaatctgaagaagaagactttaacgctcatacccgacccggagaatccgaatcgacttcttgtctccttcacatttgatgcatccatgcccggaaggatcacagttgttttctttgctacagaagatgcagaatgtaatcttagagctacaaaggaagatactttgcctccaatcacttttgatttcggagaaggacttggtcagaagttcatacaatcatctggaacgggtatagacttgacggcgtttaaagattccgagctattcaaggaggtggatacagatgtcttcccgttggcggttaaggcggaggcaactccagcggaagaaggaaagtctggttccaccaatgtgcagattactcaagtggtgtataccaaggagaaaggagagattaaaatagaagtggtgaagcagatactatgggtgaataagaggaggtatgagctgcttgagatttatgggattgagaacacggttgatggttccgatgagggaaaggaatgtgttgtatgcttgtctgaaccacgcgatacaactgttcttccttgcagacacatgtgtatgtgtagcgggtgcgcaaaggcgttaaggtttcagacaaatctgtgcccagtttgcagacaacctgttgagatgcttttggagattaacaagaacggatgaaatggagatggagaatgaacaaatttagttaagcaatcgacttgtgtaatatatgccatgcttaattaagacgtaaaacgttatggttcaatatattataagtggaaactgagttcttaaatagcaatg

SEQ ID NO: 3618 - protein, 337 aa, Arabidopsis thaliana
  peptide (1)..(337): Ceres Seq. ID no. 13488873
  misc_feature (285)..(323): Pfam Name: RING finger Pfam Description: Zinc finger, C3HC4 type
  misc_feature (1)..(337): NCBI GI NO: 26449588 NR Description: unknown protein [Arabidopsis thaliana]
  misc_feature (1)..(337): NCBI GI NO: 15242675 NR Description: expressed protein [Arabidopsis thaliana]
  misc_feature (1)..(337): NCBI GI NO: 21618140 NR Description: putative RING zinc finger protein
  misc_feature (17)..(337): NCBI GI NO: 18398633 NR Description: putative RING zinc finger protein
  misc_feature (17)..(303): NCBI GI NO: 30681003 NR Description: putative RING zinc finger protein
  misc_feature (41)..(336): NCBI GI NO: 37532246 NR Description: putative hydroxyproline-rich glycoprotein
  misc_feature (79)..(337): NCBI GI NO: 15231808 NR Description: expressed protein [Arabidopsis thaliana]
  misc_feature (18)..(333): NCBI GI NO: 15239642 NR Description: expressed protein [Arabidopsis thaliana]
  misc_feature (31)..(336): NCBI GI NO: 6862918 NR Description: putative RING zinc finger protein
  misc_feature (31)..(336): NCBI GI NO: 18397483 NR Description: RING zinc finger protein -related
MGNLISLIFCCGRRQRSNIPPAMETAPLDLPPNRFVFAAVPPYLNPNPNYVDQYPGNCLPPPVTEPPMLPYNFNHLHHYPPNSYQLPHPLFHGGRYPILPPPTYVDQKAVTIRNDVNLKKKTLTLIPDPENPNRLLVSFTFDASMPGRITVVFFATEDAECNLRATKEDTLPPITFDFGEGLGQKFIQSSGTGIDLTAFKDSELFKEVDTDVFPLAVKAEATPAEEGKSGSTNVQITQVVYTKEKGEIKIEVVKQILWVNKRRYELLEIYGIENTVDGSDEGKECVVCLSEPRDTTVLPCRHMCMCSGCAKALRFQTNLCPVCRQPVEMLLEINKNG

SEQ ID NO: 3619 - protein, 315 aa, Arabidopsis thaliana
  peptide (1)..(315): Ceres Seq. ID no. 13488874
  misc_feature (263)..(301): Pfam Name: RING finger Pfam Description: Zinc finger, C3HC4 type
  misc_feature (1)..(315): NCBI GI NO: 26449588 NR Description: unknown protein [Arabidopsis thaliana]
  misc_feature (1)..(315): NCBI GI NO: 15242675 NR Description: expressed protein [Arabidopsis thaliana]
  misc_feature (1)..(315): NCBI GI NO: 21618140 NR Description: putative RING zinc finger protein
  misc_feature (1)..(315): NCBI GI NO: 18398633 NR Description: putative RING zinc finger protein
  misc_feature (1)..(281): NCBI GI NO: 30681003 NR Description: putative RING zinc finger protein
  misc_feature (19)..(314): NCBI GI NO: 37532246 NR Description: putative hydroxyproline-rich glycoprotein
  misc_feature (57)..(315): NCBI GI NO: 15231808 NR Description: expressed protein [Arabidopsis thaliana]
  misc_feature (1)..(311): NCBI GI NO: 15239642 NR Description: expressed protein [Arabidopsis thaliana]
  misc_feature (9)..(314): NCBI GI NO: 6862918 NR Description: putative RING zinc finger protein
  misc_feature (9)..(314): NCBI GI NO: 18397483 NR Description: RING zinc finger protein -related
METAPLDLPPNRFVFAAVPPYLNPNPNYVDQYPGNCLPPPVTEPPMLPYNFNHLHHYPPNSYQLPHPLFHGGRYPILPPPTYVDQKAVTIRNDVNLKKKTLTLIPDPENPNRLLVSFTFDASMPGRITVVFFATEDAECNLRATKEDTLPPITFDFGEGLGQKFIQSSGTGIDLTAFKDSELFKEVDTDVFPLAVKAEATPAEEGKSGSTNVQITQVVYTKEKGEIKIEVVKQILWVNKRRYELLEIYGIENTVDGSDEGKECVVCLSEPRDTTVLPCRHMCMCSGCAKALRFQTNLCPVCRQPVEMLLEINKNG

SEQ ID NO: 3620 - protein, 270 aa, Arabidopsis thaliana
  peptide (1)..(270): Ceres Seq. ID no. 13488875
  misc_feature (218)..(256): Pfam Name: RING finger Pfam Description: Zinc finger, C3HC4 type
  misc_feature (1)..(270): NCBI GI NO: 26449588 NR Description: unknown protein [Arabidopsis thaliana]
  misc_feature (1)..(270): NCBI GI NO: 15242675 NR Description: expressed protein [Arabidopsis thaliana]
  misc_feature (1)..(270): NCBI GI NO: 21618140 NR Description: putative RING zinc finger protein
  misc_feature (1)..(270): NCBI GI NO: 18398633 NR Description: putative RING zinc finger protein
  misc_feature (1)..(236): NCBI GI NO: 30681003 NR Description: putative RING zinc finger protein
  misc_feature (1)..(269): NCBI GI NO: 37532246 NR Description: putative hydroxyproline-rich glycoprotein
  misc_feature (12)..(270): NCBI GI NO: 15231808 NR Description: expressed protein [Arabidopsis thaliana]
  misc_feature (1)..(266): NCBI GI NO: 15239642 NR Description: expressed protein [Arabidopsis thaliana]
  misc_feature (1)..(269): NCBI GI NO: 6862918 NR Description: putative RING zinc finger protein
  misc_feature (1)..(269): NCBI GI NO: 18397483 NR Description: RING zinc finger protein -related
MLPYNFNHLHHYPPNSYQLPHPLFHGGRYPILPPPTYVDQKAVTIRNDVNLKKKTLTLIPDPENPNRLLVSFTFDASMPGRITVVFFATEDAECNLRATKEDTLPPITFDFGEGLGQKFIQSSGTGIDLTAFKDSELFKEVDTDVFPLAVKAEATPAEEGKSGSTNVQITQVVYTKEKGEIKIEVVKQILWVNKRRYELLEIYGIENTVDGSDEGKECVVCLSEPRDTTVLPCRHMCMCSGCAKALRFQTNLCPVCRQPVEMLLEINKNG

SEQ ID NO: 3621 - DNA, 1681 bp, Arabidopsis thaliana
  misc_feature (1)..(1681): Ceres Seq. ID no. 12328781
aatcaacacacacaaacacacacacacacagcctttttccttcgttgatcgattgttaagctcgatccaatggcggataacaccgataatcggagatccttatggggagttccggagaagcttcagcttcacatagcgatgctgacgttgcaattcggttacgccggattccacgtggtgtctcgagctgctcttaacatgggaatcagcaaactcgtcttccctgtttatcgtaacatcatcgccttgcttcttctccttcccttcgcttacttccttgaaaagaaggagagaccagcgattactctcaactttctcatccagttcttctttttggcactcataggaataacagcgaaccaaggattttacttgttgggactggacaacacttcaccaacatttgcttcctccatgcaaaactctgttcccgccattacctttctcatggctgctcttctcaggattgagaaagtaagaataaacagaagagacggtatctccaaaatcttaggaacagctctttgtgtcgccggagcttccgtcatcaccctctataaaggtccaaccatctacactccggctagccacctccacgctcatctactcaccacaaactccgccgtcttagcgccgctaggaaacgccgcgcctaaaaactggacccttggttgcatctacctaatcggtcactgtctctcgtggtcaggctggcttgttttccaagctccggttcttaagtcttatccagcgaggctctcggttacgtcttacacttgtttcttcggaatcattcagttcttgatcattgctgctttctgtgaaagagattctcaggcttgggtttttcactccggttgggagcttttcaccatcctctacgccggaatcgtagcgtctggaatcgcgtttgcggttcagatttggtgtattgacagagggggtccagtcttcgttgctgtttaccagcctgttcagactcttgtcgttgcgatcatggcttctattgcgttaggcgaagaattttatttgggcgggattattggagcggtcttgatcatagcgggactttacttcgtattgtacggtaagagcgaagagaggaaatttgcagcgcttgagaaggcagcgatccagtcctccgcggagcatggtattgaacgtgcacctgtttctcgcaactccatcaagtcgtccatcacaacaccactactccatcagtcaacggacaatgtttgactactttggacaaatcactctccagctaataattacaaatgccattacccaattaaaagggaacaatggtgtgccgttgtgttttatgacttttgtgtctgctttttttcttagtgttttctcttcttttttttttctaaaaaattattaattacctaagaaaggtttttgaagaaaggaaaaaaaatggtggatgagacatcattgttcatgaggatgatgatgatgatgatagtgatgaagaagactatgtgggagctttggattgagacttttctatatataatatctggctgatatattagtgccattttttcttacatttcttgtggggtttttctttcctttatcatcaatagaatgttataatttgcatttatgatctttagtaattatcactgtcggggatgtttaaaatggattagatcaaacgctttgttct

SEQ ID NO: 3622 - protein, 389 aa, Arabidopsis thaliana
  peptide (1)..(389): Ceres Seq. ID no. 12328782
  misc_feature (210)..(339): Pfam Name: Pfam Description:  Integral membrane protein DUF6
  misc_feature (1)..(389): NCBI GI NO: 18410867 NR Description: nodulin-like protein; protein id: At1g75500
  misc_feature (151)..(389): NCBI GI NO: 25404978 NR Description: protein F10A5.28 [imported] - Arabidopsis thaliana
  misc_feature (1)..(93): NCBI GI NO: 25404978 NR Description: protein F10A5.28 [imported] - Arabidopsis thaliana
  misc_feature (16)..(381): NCBI GI NO: 34895316 NR Description: putative nodulin
  misc_feature (14)..(382): NCBI GI NO: 18409794 NR Description: putative protein; protein id: At3g53210
  misc_feature (14)..(372): NCBI GI NO: 9294076 NR Description: nodulin-like protein [Arabidopsis thaliana]
  misc_feature (14)..(372): NCBI GI NO: 15229596 NR Description: integral membrane protein, putative
  misc_feature (24)..(382): NCBI GI NO: 21593130 NR Description: nodulin-like protein [Arabidopsis thaliana]
  misc_feature (14)..(206): NCBI GI NO: 11358354 NR Description: hypothetical protein T4D2
  misc_feature (241)..(382): NCBI GI NO: 11358354 NR Description: hypothetical protein T4D2
MADNTDNRRSLWGVPEKLQLHIAMLTLQFGYAGFHVVSRAALNMGISKLVFPVYRNIIALLLLLPFAYFLEKKERPAITLNFLIQFFFLALIGITANQGFYLLGLDNTSPTFASSMQNSVPAITFLMAALLRIEKVRINRRDGISKILGTALCVAGASVITLYKGPTIYTPASHLHAHLLTTNSAVLAPLGNAAPKNWTLGCIYLIGHCLSWSGWLVFQAPVLKSYPARLSVTSYTCFFGIIQFLIIAAFCERDSQAWVFHSGWELFTILYAGIVASGIAFAVQIWCIDRGGPVFVAVYQPVQTLVVAIMASIALGEEFYLGGIIGAVLIIAGLYFVLYGKSEERKFAALEKAAIQSSAEHGIERAPVSRNSIKSSITTPLLHQSTDNV

SEQ ID NO: 3623 - protein, 366 aa, Arabidopsis thaliana
  peptide (1)..(366): Ceres Seq. ID no. 12328783
  misc_feature (187)..(316): Pfam Name: Pfam Description:  Integral membrane protein DUF6
  misc_feature (1)..(366): NCBI GI NO: 18410867 NR Description: nodulin-like protein; protein id: At1g75500
  misc_feature (128)..(366): NCBI GI NO: 25404978 NR Description: protein F10A5.28 [imported] - Arabidopsis thaliana
  misc_feature (1)..(70): NCBI GI NO: 25404978 NR Description: protein F10A5.28 [imported] - Arabidopsis thaliana
  misc_feature (1)..(358): NCBI GI NO: 34895316 NR Description: putative nodulin
  misc_feature (1)..(359): NCBI GI NO: 18409794 NR Description: putative protein; protein id: At3g53210
  misc_feature (1)..(349): NCBI GI NO: 9294076 NR Description: nodulin-like protein [Arabidopsis thaliana]
  misc_feature (1)..(349): NCBI GI NO: 15229596 NR Description: integral membrane protein, putative
  misc_feature (1)..(359): NCBI GI NO: 21593130 NR Description: nodulin-like protein [Arabidopsis thaliana]
  misc_feature (1)..(183): NCBI GI NO: 11358354 NR Description: hypothetical protein T4D2
  misc_feature (218)..(359): NCBI GI NO: 11358354 NR Description: hypothetical protein T4D2
MLTLQFGYAGFHVVSRAALNMGISKLVFPVYRNIIALLLLLPFAYFLEKKERPAITLNFLIQFFFLALIGITANQGFYLLGLDNTSPTFASSMQNSVPAITFLMAALLRIEKVRINRRDGISKILGTALCVAGASVITLYKGPTIYTPASHLHAHLLTTNSAVLAPLGNAAPKNWTLGCIYLIGHCLSWSGWLVFQAPVLKSYPARLSVTSYTCFFGIIQFLIIAAFCERDSQAWVFHSGWELFTILYAGIVASGIAFAVQIWCIDRGGPVFVAVYQPVQTLVVAIMASIALGEEFYLGGIIGAVLIIAGLYFVLYGKSEERKFAALEKAAIQSSAEHGIERAPVSRNSIKSSITTPLLHQSTDNV

SEQ ID NO: 3624 - protein, 346 aa, Arabidopsis thaliana
  peptide (1)..(346): Ceres Seq. ID no. 12328784
  misc_feature (167)..(296): Pfam Name: Pfam Description:  Integral membrane protein DUF6
  misc_feature (1)..(346): NCBI GI NO: 18410867 NR Description: nodulin-like protein; protein id: At1g75500
  misc_feature (108)..(346): NCBI GI NO: 25404978 NR Description: protein F10A5.28 [imported] - Arabidopsis thaliana
  misc_feature (1)..(50): NCBI GI NO: 25404978 NR Description: protein F10A5.28 [imported] - Arabidopsis thaliana
  misc_feature (1)..(338): NCBI GI NO: 34895316 NR Description: putative nodulin
  misc_feature (1)..(339): NCBI GI NO: 18409794 NR Description: putative protein; protein id: At3g53210
  misc_feature (1)..(329): NCBI GI NO: 9294076 NR Description: nodulin-like protein [Arabidopsis thaliana]
  misc_feature (1)..(329): NCBI GI NO: 15229596 NR Description: integral membrane protein, putative
  misc_feature (1)..(339): NCBI GI NO: 21593130 NR Description: nodulin-like protein [Arabidopsis thaliana]
  misc_feature (1)..(163): NCBI GI NO: 11358354 NR Description: hypothetical protein T4D2
  misc_feature (198)..(339): NCBI GI NO: 11358354 NR Description: hypothetical protein T4D2
MGISKLVFPVYRNIIALLLLLPFAYFLEKKERPAITLNFLIQFFFLALIGITANQGFYLLGLDNTSPTFASSMQNSVPAITFLMAALLRIEKVRINRRDGISKILGTALCVAGASVITLYKGPTIYTPASHLHAHLLTTNSAVLAPLGNAAPKNWTLGCIYLIGHCLSWSGWLVFQAPVLKSYPARLSVTSYTCFFGIIQFLIIAAFCERDSQAWVFHSGWELFTILYAGIVASGIAFAVQIWCIDRGGPVFVAVYQPVQTLVVAIMASIALGEEFYLGGIIGAVLIIAGLYFVLYGKSEERKFAALEKAAIQSSAEHGIERAPVSRNSIKSSITTPLLHQSTDNV

SEQ ID NO: 3625 - DNA, 1355 bp, Arabidopsis thaliana
  misc_feature (1)..(1355): Ceres Seq. ID no. 12579532
acataccaacagtcaacaatatctcttgttccggcggaaaaatgcccattaatcagaaaattccgacttggtttgccgttccggctgtttttgctgtcttgtccgtaatctcgtatcaaaccttaattgtgccggaaaatttagagggcgccaaaaatgtattgacaatggctaagaccataccaattcctgtcgctggaccgggagagcattgagtttgacccaaaaggagaaggtccttatgctgcggtcgtggacggccgtattctcaagtggcgcggcgatgatctcggctgggttgattttgcctacacatctcctcacagagggaactgttcaaaaactgaagtagtgcctacttgtggaaggccattaggacttactttcgagaagaaaacgggagatttgtacatatgtgatggttacttggggctcatgaaagttggaccagagggaggcttggccgagttaattgttgatgaagccgaaggtcgtaaagttatgtttgctaaccaaggggatatagacgaagaggaagatgtcttttacttcaatgatagtagtgacaagtatcatttcagggacgtatttttcgtggctgtcagtggggagcggtcgggaagagtgatcagatacgataagaagacgaaagaagccaaagttatcatggacaatctcgtttgtaacaacggtttggctctaaacaaagaccggtcttttctaattacatgcgagtccggcacaagtcttgtccaccgatactggattaaaggtcccaaagccgggactcgtgatatctttgcgaaggtcccaggttaccctgacaacatccggctgacatcaactggagacttttggattggtttacactgcaagaaaaatctgatagggagattgattgtgaagtacaaatggcttgggaaattggtagaaaagacaatgaaactggagtacgtgattgcttttattaacggatttaaaccgcacggagtcgtcgtgaaaatctccggcgagacgggagaggtacttgagttacttgaggacaaagaaggaaagacaatgaagtatgtaagcgaggcttatgaaagagatgatggaaagttgtggtttgggtctgtttactggccagccgtttgggttcttgatcgcaaatgagtgatcatgttgtatctacttataattatgttcgttttgtatattaataaatgtttatctgagttaaatcagcatttgtttgttgcgggaaaataaatgtgaatcctactttttcaaattgttttttttttctttgtattaatgctcccaagatgtttattgaactgaacacactagaatgaattatagcttttgtaacc

SEQ ID NO: 3626 - protein, 239 aa, Arabidopsis thaliana
  peptide (1)..(239): Ceres Seq. ID no. 12579533
  misc_feature (1)..(233): Pfam Name: Pfam Description:  Strictosidine synthase
  misc_feature (1)..(239): NCBI GI NO: 15230200 NR Description: strictosidine synthase-related
  misc_feature (1)..(237): NCBI GI NO: 15230182 NR Description: strictosidine synthase-related
  misc_feature (1)..(237): NCBI GI NO: 13877837 NR Description: unknown protein [Arabidopsis thaliana]
  misc_feature (1)..(237): NCBI GI NO: 6759491 NR Description: hypothetical protein [Arabidopsis thaliana]
  misc_feature (1)..(239): NCBI GI NO: 15227324 NR Description: strictosidine synthase-related
  misc_feature (1)..(237): NCBI GI NO: 11280567 NR Description: hypothetical protein F24I3
  misc_feature (1)..(237): NCBI GI NO: 30694556 NR Description: strictosidine synthase-related
  misc_feature (1)..(237): NCBI GI NO: 18390900 NR Description: strictosidine synthase-related
  misc_feature (1)..(109): NCBI GI NO: 25335889 NR Description: protein T27G7.16 [imported] - Arabidopsis thaliana
  misc_feature (106)..(237): NCBI GI NO: 25335889 NR Description: protein T27G7.16 [imported] - Arabidopsis thaliana
MKVGPEGGLAELIVDEAEGRKVMFANQGDIDEEEDVFYFNDSSDKYHFRDVFFVAVSGERSGRVIRYDKKTKEAKVIMDNLVCNNGLALNKDRSFLITCESGTSLVHRYWIKGPKAGTRDIFAKVPGYPDNIRLTSTGDFWIGLHCKKNLIGRLIVKYKWLGKLVEKTMKLEYVIAFINGFKPHGVVVKISGETGEVLELLEDKEGKTMKYVSEAYERDDGKLWFGSVYWPAVWVLDRK

SEQ ID NO: 3627 - protein, 217 aa, Arabidopsis thaliana
  peptide (1)..(217): Ceres Seq. ID no. 12579534
  misc_feature (1)..(211): Pfam Name: Pfam Description:  Strictosidine synthase
  misc_feature (1)..(217): NCBI GI NO: 15230200 NR Description: strictosidine synthase-related
  misc_feature (1)..(215): NCBI GI NO: 15230182 NR Description: strictosidine synthase-related
  misc_feature (1)..(215): NCBI GI NO: 13877837 NR Description: unknown protein [Arabidopsis thaliana]
  misc_feature (1)..(215): NCBI GI NO: 6759491 NR Description: hypothetical protein [Arabidopsis thaliana]
  misc_feature (1)..(217): NCBI GI NO: 15227324 NR Description: strictosidine synthase-related
  misc_feature (1)..(215): NCBI GI NO: 11280567 NR Description: hypothetical protein F24I3
  misc_feature (1)..(215): NCBI GI NO: 30694556 NR Description: strictosidine synthase-related
  misc_feature (1)..(215): NCBI GI NO: 18390900 NR Description: strictosidine synthase-related
  misc_feature (1)..(87): NCBI GI NO: 25335889 NR Description: protein T27G7.16 [imported] - Arabidopsis thaliana
  misc_feature (84)..(215): NCBI GI NO: 25335889 NR Description: protein T27G7.16 [imported] - Arabidopsis thaliana
MFANQGDIDEEEDVFYFNDSSDKYHFRDVFFVAVSGERSGRVIRYDKKTKEAKVIMDNLVCNNGLALNKDRSFLITCESGTSLVHRYWIKGPKAGTRDIFAKVPGYPDNIRLTSTGDFWIGLHCKKNLIGRLIVKYKWLGKLVEKTMKLEYVIAFINGFKPHGVVVKISGETGEVLELLEDKEGKTMKYVSEAYERDDGKLWFGSVYWPAVWVLDRK

SEQ ID NO: 3628 - protein, 162 aa, Arabidopsis thaliana
  peptide (1)..(162): Ceres Seq. ID no. 12579535
  misc_feature (1)..(156): Pfam Name: Pfam Description:  Strictosidine synthase
  misc_feature (1)..(162): NCBI GI NO: 15230200 NR Description: strictosidine synthase-related
  misc_feature (1)..(160): NCBI GI NO: 15230182 NR Description: strictosidine synthase-related
  misc_feature (1)..(160): NCBI GI NO: 13877837 NR Description: unknown protein [Arabidopsis thaliana]
  misc_feature (1)..(160): NCBI GI NO: 6759491 NR Description: hypothetical protein [Arabidopsis thaliana]
  misc_feature (1)..(162): NCBI GI NO: 15227324 NR Description: strictosidine synthase-related
  misc_feature (1)..(160): NCBI GI NO: 11280567 NR Description: hypothetical protein F24I3
  misc_feature (1)..(160): NCBI GI NO: 30694556 NR Description: strictosidine synthase-related
  misc_feature (1)..(160): NCBI GI NO: 18390900 NR Description: strictosidine synthase-related
  misc_feature (1)..(32): NCBI GI NO: 25335889 NR Description: protein T27G7.16 [imported] - Arabidopsis thaliana
  misc_feature (29)..(160): NCBI GI NO: 25335889 NR Description: protein T27G7.16 [imported] - Arabidopsis thaliana
MDNLVCNNGLALNKDRSFLITCESGTSLVHRYWIKGPKAGTRDIFAKVPGYPDNIRLTSTGDFWIGLHCKKNLIGRLIVKYKWLGKLVEKTMKLEYVIAFINGFKPHGVVVKISGETGEVLELLEDKEGKTMKYVSEAYERDDGKLWFGSVYWPAVWVLDRK

SEQ ID NO: 3629 - DNA, 1879 bp, Arabidopsis thaliana
  misc_feature (1)..(1879): Ceres Seq. ID no. 13487772
tggatctacttagtacttacttagtagttacttctctgtcttatttgattttgagtctctgttttgtctcttctcttgagattgcgataatgagagaacggattattacattcgtttcgctgcttcttgtagctttgctttcgtttcccagtgttagctactgtgacgaccaaacgatcctgtatgaatcgtttgacgagccttttgatggtcgctgggtcgtttcagagaaagctgaataccaaggtgtgtggaagcacgagaagagtgaagggcatgatgattatggacttctagtgagtgagaaagctaagaagtacggaatagttaaagagcttgatgttgatgagcctctaaaccttaacgaaggaactgttgttcttcaatacgaggctcgtttccaagaagggcttgagtgtggtggtgcttacttaaagtatcttcgtcctcaagaagctggatgggttcctcaagggtttgataatgattctccttactctatcatgtttggacctgataagtgtggtgctaccaacaaggttcatttcatcttgaagcataagaatcccaagagtggcgagtttgttgagcaccatctcaagttccctccttctgttccgtttgacatgctttctcatgtctacactgcggtcttgaaatctgataatgaggtgaggattttggtcgatggtgaggagaagaagaagggtaatttactgtctgctgaagactttgagcctccgttgattccttccaagaccatccctgatccagaggacaagaagccagaagactgggatgagagagccaagattcctgatcctaatgctgtgaagcctgatgactgggatgaggatgcacccatggagattgaagatgaggaagctgagaaacccgaaggatggttggatgatgagcctgtagaggttgaagaccccgaggcaagcaagccagaagattgggatgacgaggaagatggtgagtgggaggctcctaaggtttccaacaccaagtgtgaggcagcacccggatgtggcgaatggaagagaccgatgaagaggaaccctgcttacaagggcaaatggagctcacctctcatagataacccagcttacaagggaatctggaaaccaagagacattccaaatcctgattattttgagcttgagaggccgaatttggagcccattgctgccattggtattgagatatggacaatgcaagacggtatcttatttgacaacatcttgatatctaaagacgagaaggttgctgaaacttacagacaaagcacttggaagcccaagtttgatgtggagaaagagaaacaaaaggcagaggatgaagctgctggtgaggcagatggtctcaagagttaccagaagaaggtgttcgacctcttgtacaaggttgcagacatttctttccttagtgcgtacaagtcaaagattatggaacttattgagaaagctgaaacacagccaaacttaaccatcggtgtgctcatttccatcgtgatcgtcttcctctctctcttcttcaagctcatatttggtggtgcaaaggctaaggtagaaaagaagaaaccggaaacagctgcagagacctcgacaagcgaggcaaagacagaggagaaagcagaagcggtggctgcaccacgaaagaggcagacgaggcgtgagagttagataaaaagaggattagattttgatttttggggctttttgttttgatttatcaccgtatagacaaacagtagtggacctgatattaagacgattattgtaacatgttttttttgtatgcttttagtttcacatgaatctgaatgtggatcacaacatttatgagttgaaatttgataagtaatgggttgtgt

SEQ ID NO: 3630 - protein, 561 aa, Arabidopsis thaliana
  peptide (1)..(561): Ceres Seq. ID no. 13487773
  misc_feature (30)..(561): NCBI GI NO: 15240773 NR Description: calnexin, putative [Arabidopsis thaliana]
  misc_feature (30)..(561): NCBI GI NO: 473878 NR Description: calnexin homolog
  misc_feature (30)..(561): NCBI GI NO: 15240353 NR Description: calnexin 1 (CNX1) [Arabidopsis thaliana]
  misc_feature (30)..(561): NCBI GI NO: 31321896 NR Description: putative papillar cell-specific calnexin
  misc_feature (56)..(561): NCBI GI NO: 3334138 NR Description: CALNEXIN HOMOLOG PRECURSOR
  misc_feature (39)..(561): NCBI GI NO: 21740628 NR Description: OSJNBb0012E08.10
  misc_feature (38)..(561): NCBI GI NO: 11131469 NR Description: Calnexin homolog precursor
  misc_feature (29)..(561): NCBI GI NO: 11131766 NR Description: Calnexin homolog precursor
  misc_feature (143)..(558): NCBI GI NO: 7441503 NR Description: calnexin - maize (fragment)
  misc_feature (62)..(558): NCBI GI NO: 40740610 NR Description: hypothetical protein AN3592.2
DLLSTYLVVTSLSYLILSLCFVSSLEIAIMRERIITFVSLLLVALLSFPSVSYCDDQTILYESFDEPFDGRWVVSEKAEYQGVWKHEKSEGHDDYGLLVSEKAKKYGIVKELDVDEPLNLNEGTVVLQYEARFQEGLECGGAYLKYLRPQEAGWVPQGFDNDSPYSIMFGPDKCGATNKVHFILKHKNPKSGEFVEHHLKFPPSVPFDMLSHVYTAVLKSDNEVRILVDGEEKKKGNLLSAEDFEPPLIPSKTIPDPEDKKPEDWDERAKIPDPNAVKPDDWDEDAPMEIEDEEAEKPEGWLDDEPVEVEDPEASKPEDWDDEEDGEWEAPKVSNTKCEAAPGCGEWKRPMKRNPAYKGKWSSPLIDNPAYKGIWKPRDIPNPDYFELERPNLEPIAAIGIEIWTMQDGILFDNILISKDEKVAETYRQSTWKPKFDVEKEKQKAEDEAAGEADGLKSYQKKVFDLLYKVADISFLSAYKSKIMELIEKAETQPNLTIGVLISIVIVFLSLFFKLIFGGAKAKVEKKKPETAAETSTSEAKTEEKAEAVAAPRKRQTRRES

SEQ ID NO: 3631 - protein, 532 aa, Arabidopsis thaliana
  peptide (1)..(532): Ceres Seq. ID no. 13487774
  misc_feature (1)..(532): NCBI GI NO: 15240773 NR Description: calnexin, putative [Arabidopsis thaliana]
  misc_feature (1)..(532): NCBI GI NO: 473878 NR Description: calnexin homolog
  misc_feature (1)..(532): NCBI GI NO: 15240353 NR Description: calnexin 1 (CNX1) [Arabidopsis thaliana]
  misc_feature (1)..(532): NCBI GI NO: 31321896 NR Description: putative papillar cell-specific calnexin
  misc_feature (27)..(532): NCBI GI NO: 3334138 NR Description: CALNEXIN HOMOLOG PRECURSOR
  misc_feature (10)..(532): NCBI GI NO: 21740628 NR Description: OSJNBb0012E08.10
  misc_feature (9)..(532): NCBI GI NO: 11131469 NR Description: Calnexin homolog precursor
  misc_feature (1)..(532): NCBI GI NO: 11131766 NR Description: Calnexin homolog precursor
  misc_feature (114)..(529): NCBI GI NO: 7441503 NR Description: calnexin - maize (fragment)
  misc_feature (33)..(529): NCBI GI NO: 40740610 NR Description: hypothetical protein AN3592.2
MRERIITFVSLLLVALLSFPSVSYCDDQTILYESFDEPFDGRWVVSEKAEYQGVWKHEKSEGHDDYGLLVSEKAKKYGIVKELDVDEPLNLNEGTVVLQYEARFQEGLECGGAYLKYLRPQEAGWVPQGFDNDSPYSIMFGPDKCGATNKVHFILKHKNPKSGEFVEHHLKFPPSVPFDMLSHVYTAVLKSDNEVRILVDGEEKKKGNLLSAEDFEPPLIPSKTIPDPEDKKPEDWDERAKIPDPNAVKPDDWDEDAPMEIEDEEAEKPEGWLDDEPVEVEDPEASKPEDWDDEEDGEWEAPKVSNTKCEAAPGCGEWKRPMKRNPAYKGKWSSPLIDNPAYKGIWKPRDIPNPDYFELERPNLEPIAAIGIEIWTMQDGILFDNILISKDEKVAETYRQSTWKPKFDVEKEKQKAEDEAAGEADGLKSYQKKVFDLLYKVADISFLSAYKSKIMELIEKAETQPNLTIGVLISIVIVFLSLFFKLIFGGAKAKVEKKKPETAAETSTSEAKTEEKAEAVAAPRKRQTRRES

SEQ ID NO: 3632 - protein, 394 aa, Arabidopsis thaliana
  peptide (1)..(394): Ceres Seq. ID no. 13487775
  misc_feature (1)..(394): NCBI GI NO: 15240773 NR Description: calnexin, putative [Arabidopsis thaliana]
  misc_feature (1)..(394): NCBI GI NO: 473878 NR Description: calnexin homolog
  misc_feature (1)..(394): NCBI GI NO: 15240353 NR Description: calnexin 1 (CNX1) [Arabidopsis thaliana]
  misc_feature (1)..(394): NCBI GI NO: 31321896 NR Description: putative papillar cell-specific calnexin
  misc_feature (1)..(394): NCBI GI NO: 3334138 NR Description: CALNEXIN HOMOLOG PRECURSOR
  misc_feature (1)..(394): NCBI GI NO: 21740628 NR Description: OSJNBb0012E08.10
  misc_feature (1)..(394): NCBI GI NO: 11131469 NR Description: Calnexin homolog precursor
  misc_feature (1)..(394): NCBI GI NO: 11131766 NR Description: Calnexin homolog precursor
  misc_feature (1)..(391): NCBI GI NO: 7441503 NR Description: calnexin - maize (fragment)
  misc_feature (1)..(391): NCBI GI NO: 40740610 NR Description: hypothetical protein AN3592.2
MFGPDKCGATNKVHFILKHKNPKSGEFVEHHLKFPPSVPFDMLSHVYTAVLKSDNEVRILVDGEEKKKGNLLSAEDFEPPLIPSKTIPDPEDKKPEDWDERAKIPDPNAVKPDDWDEDAPMEIEDEEAEKPEGWLDDEPVEVEDPEASKPEDWDDEEDGEWEAPKVSNTKCEAAPGCGEWKRPMKRNPAYKGKWSSPLIDNPAYKGIWKPRDIPNPDYFELERPNLEPIAAIGIEIWTMQDGILFDNILISKDEKVAETYRQSTWKPKFDVEKEKQKAEDEAAGEADGLKSYQKKVFDLLYKVADISFLSAYKSKIMELIEKAETQPNLTIGVLISIVIVFLSLFFKLIFGGAKAKVEKKKPETAAETSTSEAKTEEKAEAVAAPRKRQTRRES

SEQ ID NO: 3633 - DNA, 713 bp, Arabidopsis thaliana
  misc_feature (1)..(713): Ceres Seq. ID no. 12325124
acacatctcactgctcactactctcactgtaatcccttagatcttcttttcaaatttcaatggcgtccggtgatgttgagtatcggtgcttcgttggaggtctagcatgggccactgatgacagagctcttgagactgccttcgctcaatacggcgacgttattgattccaagatcattaacgatcgtgagactggaagatcaaggggattcggattcgtcaccttcaaggatgagaaagccatgaaggatgcgattgagggaatgaacggacaagatctcgatggccgtagcatcactgttaacgaggctcagtcacgaggaagcggtggcggcggaggccaccgtggaggtggtggcggcggttactcctcaagaggtggtggtggcggaagctacggtggtggaagacgtgagggaggaggaggatacggtggtggtgaaggaggaggttacggaggaaacggtggtggtggaggatggtaattcctttaattaggtttgggattaccaatgaatgttctctctctcgcttgttatgcttctacttggttttgtgtgttctctattttgttctggttctgctttagatttgatgtaacagttcgtgattaggtattttggtatctggaaacgtaatgttaagtcacttgtcattctctaaataacaaatttcttcggagatattatctctgttgattgattctatcatcg

SEQ ID NO: 3634 - protein, 141 aa, Arabidopsis thaliana
  peptide (1)..(141): Ceres Seq. ID no. 12325125
  misc_feature (10)..(81): Pfam Name: a.k.a. RRM, RBD, or RNP domain Pfam Description: RNA recognition motif.
  misc_feature (1)..(141): NCBI GI NO: 30681492 NR Description: glycine-rich RNA-binding protein (AtGRP7)
  misc_feature (1)..(140): NCBI GI NO: 15226605 NR Description: glycine-rich RNA binding protein AtGRP7
  misc_feature (1)..(140): NCBI GI NO: 21553354 NR Description: glycine-rich RNA binding protein 7
  misc_feature (1)..(141): NCBI GI NO: 1346180 NR Description: Glycine-rich RNA-binding protein GRP1A
  misc_feature (1)..(141): NCBI GI NO: 1346181 NR Description: Glycine-rich RNA-binding protein GRP2A
  misc_feature (1)..(139): NCBI GI NO: 2267567 NR Description: glycine-rich RNA binding protein 1
  misc_feature (5)..(141): NCBI GI NO: 544426 NR Description: Glycine-rich RNA-binding protein
  misc_feature (5)..(140): NCBI GI NO: 2119044 NR Description: glycine-rich RNA-binding protein RGP-1b
  misc_feature (5)..(140): NCBI GI NO: 2119042 NR Description: glycine-rich RNA-binding protein RGP-1a
  misc_feature (5)..(140): NCBI GI NO: 20152613 NR Description: putative glycine rich protein [Rumex obtusifolius]
MASGDVEYRCFVGGLAWATDDRALETAFAQYGDVIDSKIINDRETGRSRGFGFVTFKDEKAMKDAIEGMNGQDLDGRSITVNEAQSRGSGGGGGHRGGGGGGYSSRGGGGGSYGGGRREGGGGYGGGEGGGYGGNGGGGGW

SEQ ID NO: 3635 - protein, 80 aa, Arabidopsis thaliana
  peptide (1)..(80): Ceres Seq. ID no. 12325126
  misc_feature (15)..(79): Pfam Name: Pfam Description:  Herpesvirus large structural phospho protein UL32
  misc_feature (1)..(80): NCBI GI NO: 30681492 NR Description: glycine-rich RNA-binding protein (AtGRP7)
  misc_feature (1)..(79): NCBI GI NO: 15226605 NR Description: glycine-rich RNA binding protein AtGRP7
  misc_feature (1)..(79): NCBI GI NO: 21553354 NR Description: glycine-rich RNA binding protein 7
  misc_feature (1)..(80): NCBI GI NO: 1346180 NR Description: Glycine-rich RNA-binding protein GRP1A
  misc_feature (1)..(80): NCBI GI NO: 1346181 NR Description: Glycine-rich RNA-binding protein GRP2A
  misc_feature (1)..(78): NCBI GI NO: 2267567 NR Description: glycine-rich RNA binding protein 1
  misc_feature (1)..(80): NCBI GI NO: 544426 NR Description: Glycine-rich RNA-binding protein
  misc_feature (1)..(79): NCBI GI NO: 2119044 NR Description: glycine-rich RNA-binding protein RGP-1b
  misc_feature (1)..(79): NCBI GI NO: 2119042 NR Description: glycine-rich RNA-binding protein RGP-1a
  misc_feature (1)..(79): NCBI GI NO: 20152613 NR Description: putative glycine rich protein [Rumex obtusifolius]
MKDAIEGMNGQDLDGRSITVNEAQSRGSGGGGGHRGGGGGGYSSRGGGGGSYGGGRREGGGGYGGGEGGGYGGNGGGGGW

SEQ ID NO: 3636 - protein, 73 aa, Arabidopsis thaliana
  peptide (1)..(73): Ceres Seq. ID no. 12325127
  misc_feature (8)..(72): Pfam Name: Pfam Description:  Herpesvirus large structural phospho protein UL32
  misc_feature (1)..(73): NCBI GI NO: 30681492 NR Description: glycine-rich RNA-binding protein (AtGRP7)
  misc_feature (1)..(72): NCBI GI NO: 15226605 NR Description: glycine-rich RNA binding protein AtGRP7
  misc_feature (1)..(72): NCBI GI NO: 21553354 NR Description: glycine-rich RNA binding protein 7
  misc_feature (1)..(73): NCBI GI NO: 1346180 NR Description: Glycine-rich RNA-binding protein GRP1A
  misc_feature (1)..(73): NCBI GI NO: 1346181 NR Description: Glycine-rich RNA-binding protein GRP2A
  misc_feature (1)..(71): NCBI GI NO: 2267567 NR Description: glycine-rich RNA binding protein 1
  misc_feature (1)..(73): NCBI GI NO: 544426 NR Description: Glycine-rich RNA-binding protein
  misc_feature (1)..(72): NCBI GI NO: 2119044 NR Description: glycine-rich RNA-binding protein RGP-1b
  misc_feature (1)..(72): NCBI GI NO: 2119042 NR Description: glycine-rich RNA-binding protein RGP-1a
  misc_feature (1)..(72): NCBI GI NO: 20152613 NR Description: putative glycine rich protein [Rumex obtusifolius]
MNGQDLDGRSITVNEAQSRGSGGGGGHRGGGGGGYSSRGGGGGSYGGGRREGGGGYGGGEGGGYGGNGGGGGW

SEQ ID NO: 3637 - DNA, 1734 bp, Arabidopsis thaliana
  misc_feature (1)..(1734): Ceres Seq. ID no. 12328724
gagttccttctgtatctcgattctcgaatgtcgatcgagccatcgtagagatagagagagaatccatagaaatggctttcgttcgatatatcccttgtcggaagattccacgaaatgttgatcaattcgagctgccatgtcttggatcgcttcgagctttcttctctactcagaagctcataggggatgaaccagttctcgttcgagatttcatacacactgcattatatgatccaatacaaggctacttctctcaacggtcaaaatctgtcggggttttggagagaagcattaagttcaaccagcttgaagggaggaaagcatacatgaaactcttggaaaaagtatacaagcagagtgacatttcttggtttactccagtggagcttttcaagccttggtatgctcatgggattgcagaagctatactgcgtaccacaaatctctcagttccattaaagatatacgaaattggtggtggatcgggcacatgtgccaagggtgtattggactatataatgttgaatgctccggagagaatctacaagaacatgagctacacttctatagaaatcagtccctcacttgctaagattcagaaggaaactgttgcacaagttggaagtcatctatcaaagttccgagttgagtgtcgtgatgcatctgacctagctggatggaagaatgtggagcaacaaccgtgctgggtgataatgcttgaggtgctagataatctcccacatgatcttgtctattccaaaagtcaactttccccatggatggaagtcttggttgaaaataaaccagagagcgaagcactctctgagctatacaagcctttagaagatccactgattaagcggtgcattgaaattgttgaacatgaagatgatccggtttcaaaaccaaaagaaatttggtctaaactatttcccaaacctagacgtagttggcttccaacaggttgtttgaaactgctagaggttttacatgcaaagctgccaaagatgtccctaattgcttcggactttagcttcttgcctgatgtgaaagttcctggtgaaagagccccattggtttcaacaaagaaagatggatgtagctcagattacagtagttatctggacgcaaagggtgatgctgatatatttttcccaaccgatttctggcttctagaacgaatggaccattattgttccggttggaggaagatggaaaaagacgggacaccatcgaaaaaaggaaggaaaaggcgaactctcactcttgatacatcagcgttcatggatgagtttggtttaccttcaaagacgagaacaaaggacggatataaccccttacttgatgacttcaagaacactaagttctatcttagtgtcccaacacacaacactaagtagtaagcaacagatatcttcagctcatggatgtcggaattttgcagagaaatgaaagaaaaagtttagagctctgaattttttttagatgatttaataagttataatcaatattccatcgctacagacactgaagataggctccaaaatgtttcttttttacttactgcggtttgctgtgtcagcttttaaacactctttccaaatactacatgagtcggtagtttgtaatgtaatgggtttgggtatggaggctttctcgttgtctttcttttcccaacttatttgacatttcagtagtgaaaaacatgatactcaataaaacaactattagtgg

SEQ ID NO: 3638 - protein, 465 aa, Arabidopsis thaliana
  peptide (1)..(465): Ceres Seq. ID no. 12328725
  misc_feature (62)..(395): Pfam Name: Pfam Description:  Uncharacterized ACR, COG1565
  misc_feature (24)..(465): NCBI GI NO: 18390452 NR Description: expressed protein; protein id: At1g04900
  misc_feature (104)..(465): NCBI GI NO: 34906872 NR Description: P0470A12.14
  misc_feature (52)..(116): NCBI GI NO: 34906872 NR Description: P0470A12.14
  misc_feature (227)..(465): NCBI GI NO: 25406821 NR Description: protein F13M7.11 [imported] - Arabidopsis thaliana
  misc_feature (24)..(327): NCBI GI NO: 25406821 NR Description: protein F13M7.11 [imported] - Arabidopsis thaliana
VPSVSRFSNVDRAIVEIERESIEMAFVRYIPCRKIPRNVDQFELPCLGSLRAFFSTQKLIGDEPVLVRDFIHTALYDPIQGYFSQRSKSVGVLERSIKFNQLEGRKAYMKLLEKVYKQSDISWFTPVELFKPWYAHGIAEAILRTTNLSVPLKIYEIGGGSGTCAKGVLDYIMLNAPERIYKNMSYTSIEISPSLAKIQKETVAQVGSHLSKFRVECRDASDLAGWKNVEQQPCWVIMLEVLDNLPHDLVYSKSQLSPWMEVLVENKPESEALSELYKPLEDPLIKRCIEIVEHEDDPVSKPKEIWSKLFPKPRRSWLPTGCLKLLEVLHAKLPKMSLIASDFSFLPDVKVPGERAPLVSTKKDGCSSDYSSYLDAKGDADIFFPTDFWLLERMDHYCSGWRKMEKDGTPSKKGRKRRTLTLDTSAFMDEFGLPSKTRTKDGYNPLLDDFKNTKFYLSVPTHNTK

SEQ ID NO: 3639 - protein, 442 aa, Arabidopsis thaliana
  peptide (1)..(442): Ceres Seq. ID no. 12328726
  misc_feature (39)..(372): Pfam Name: Pfam Description:  Uncharacterized ACR, COG1565
  misc_feature (1)..(442): NCBI GI NO: 18390452 NR Description: expressed protein; protein id: At1g04900
  misc_feature (81)..(442): NCBI GI NO: 34906872 NR Description: P0470A12.14
  misc_feature (29)..(93): NCBI GI NO: 34906872 NR Description: P0470A12.14
  misc_feature (204)..(442): NCBI GI NO: 25406821 NR Description: protein F13M7.11 [imported] - Arabidopsis thaliana
  misc_feature (1)..(304): NCBI GI NO: 25406821 NR Description: protein F13M7.11 [imported] - Arabidopsis thaliana
MAFVRYIPCRKIPRNVDQFELPCLGSLRAFFSTQKLIGDEPVLVRDFIHTALYDPIQGYFSQRSKSVGVLERSIKFNQLEGRKAYMKLLEKVYKQSDISWFTPVELFKPWYAHGIAEAILRTTNLSVPLKIYEIGGGSGTCAKGVLDYIMLNAPERIYKNMSYTSIEISPSLAKIQKETVAQVGSHLSKFRVECRDASDLAGWKNVEQQPCWVIMLEVLDNLPHDLVYSKSQLSPWMEVLVENKPESEALSELYKPLEDPLIKRCIEIVEHEDDPVSKPKEIWSKLFPKPRRSWLPTGCLKLLEVLHAKLPKMSLIASDFSFLPDVKVPGERAPLVSTKKDGCSSDYSSYLDAKGDADIFFPTDFWLLERMDHYCSGWRKMEKDGTPSKKGRKRRTLTLDTSAFMDEFGLPSKTRTKDGYNPLLDDFKNTKFYLSVPTHNTK

SEQ ID NO: 3640 - protein, 357 aa, Arabidopsis thaliana
  peptide (1)..(357): Ceres Seq. ID no. 12328727
  misc_feature (1)..(287): Pfam Name: Pfam Description:  Uncharacterized ACR, COG1565
  misc_feature (1)..(357): NCBI GI NO: 18390452 NR Description: expressed protein; protein id: At1g04900
  misc_feature (1)..(357): NCBI GI NO: 34906872 NR Description: P0470A12.14
  misc_feature (119)..(357): NCBI GI NO: 25406821 NR Description: protein F13M7.11 [imported] - Arabidopsis thaliana
  misc_feature (1)..(219): NCBI GI NO: 25406821 NR Description: protein F13M7.11 [imported] - Arabidopsis thaliana
MKLLEKVYKQSDISWFTPVELFKPWYAHGIAEAILRTTNLSVPLKIYEIGGGSGTCAKGVLDYIMLNAPERIYKNMSYTSIEISPSLAKIQKETVAQVGSHLSKFRVECRDASDLAGWKNVEQQPCWVIMLEVLDNLPHDLVYSKSQLSPWMEVLVENKPESEALSELYKPLEDPLIKRCIEIVEHEDDPVSKPKEIWSKLFPKPRRSWLPTGCLKLLEVLHAKLPKMSLIASDFSFLPDVKVPGERAPLVSTKKDGCSSDYSSYLDAKGDADIFFPTDFWLLERMDHYCSGWRKMEKDGTPSKKGRKRRTLTLDTSAFMDEFGLPSKTRTKDGYNPLLDDFKNTKFYLSVPTHNTK

SEQ ID NO: 3641 - DNA, 1244 bp, Arabidopsis thaliana
  misc_feature (1)..(1244): Ceres Seq. ID no. 12328525
gtgtatgatgttttgtatattgttgcttctcttgctttacttgtttggtttgggatttcttctctgttttttcttggtgaattttgcgtttcgcttaaaaatgagtgaaattgatttggtgaaattaggtcagaggcgtttctcatggctcctcttactctctccgttgatgtgaagagctcttcagcgacctctcatgatgtttcgaagagggtaatgcagagtccacagctcaaaataaacaaaggcttttttgcatctgttaatacacaagaagataaaccctttgatttcttccgcactctctttgaggggtttatagcaggaggtacagctggagttgtagttgaaacagctttatacccaattgatactattaagactagacttcagctcgtggaggtggaaaaattgttttgaagggtctttattcaggattagctggaaatatcgctggtgtcttaccggcttcggctttatttgttggagtttacgaacccacaaagcagaaactgctgaagacctttcctgatcatttaagcgcagttgctcacctgactgcaggggccatcggtggacttgctgcatctctgattcgagtgcctacagaggttgtgaagcaaagaatgcagaccggacagtttacatcagctcccagtgctgttcgaatgattgcatcaaaagagggatttaggggtctctatgcaggataccggtccttccttttgcgagatttgccatttgatgctatacagttctgcatatatgagcagctttgcttggggtataaaaaagccgcgcgtagagagcttagtgatcctgagaacgctctaatcggtgcatttgctggtgctctgaccggagcagtcaccactccgcttgatgttattaagacaagattaatggttcagggatcagccaaacaatatcaaggaatcgttgactgtgttcaaacaattgtaagagaggaaggagctcctgctctcttaaagggtattgggccaagagtgttgtggataggtattggaggatcaatcttctttggtgtcctcgagagcactaagagaacacttgcacagagacgtcccaatacggttaaagaaaccaaagaagaataagtttctggccgcacaagaaaatgagtgtaagttgacaatgtaacccctttgtgagttctatgtggtgtgagtttgtttaagtaccaattcaactttcattaaaaaaaaataaaaaaaatagtgttc

SEQ ID NO: 3642 - protein, 163 aa, Arabidopsis thaliana
  peptide (1)..(163): Ceres Seq. ID no. 12328526
  misc_feature (1)..(122): NCBI GI NO: 7486053 NR Description: hypothetical protein F23K16
  misc_feature (1)..(163): NCBI GI NO: 18420458 NR Description: mitochondrial carrier protein family
  misc_feature (1)..(158): NCBI GI NO: 34394981 NR Description: mitochondrial aspartate-glutamate carrier protein-like
  misc_feature (1)..(152): NCBI GI NO: 18399114 NR Description: allinase, putative; protein id: At1g34065.1
  misc_feature (1)..(151): NCBI GI NO: 27754081 NR Description: RIKEN cDNA 4930433D19
  misc_feature (1)..(149): NCBI GI NO: 24650120 NR Description: CG4743-PA [Drosophila melanogaster]
  misc_feature (1)..(144): NCBI GI NO: 3171731 NR Description: AgPET8 [Eremothecium gossypii]
  misc_feature (1)..(140): NCBI GI NO: 19115553 NR Description: agpet8 protein. [Schizosaccharomyces pombe]
  misc_feature (1)..(154): NCBI GI NO: 6324325 NR Description: Member of family of mitochondrial carrier proteins
  misc_feature (1)..(116): NCBI GI NO: 34857703 NR Description: similar to RIKEN cDNA 4930433D19
MQTGQFTSAPSAVRMIASKEGFRGLYAGYRSFLLRDLPFDAIQFCIYEQLCLGYKKAARRELSDPENALIGAFAGALTGAVTTPLDVIKTRLMVQGSAKQYQGIVDCVQTIVREEGAPALLKGIGPRVLWIGIGGSIFFGVLESTKRTLAQRRPNTVKETKEE

SEQ ID NO: 3643 - protein, 149 aa, Arabidopsis thaliana
  peptide (1)..(149): Ceres Seq. ID no. 12328527
  misc_feature (1)..(108): NCBI GI NO: 7486053 NR Description: hypothetical protein F23K16
  misc_feature (1)..(149): NCBI GI NO: 18420458 NR Description: mitochondrial carrier protein family
  misc_feature (1)..(144): NCBI GI NO: 34394981 NR Description: mitochondrial aspartate-glutamate carrier protein-like
  misc_feature (1)..(138): NCBI GI NO: 18399114 NR Description: allinase, putative; protein id: At1g34065.1
  misc_feature (1)..(137): NCBI GI NO: 27754081 NR Description: RIKEN cDNA 4930433D19
  misc_feature (1)..(135): NCBI GI NO: 24650120 NR Description: CG4743-PA [Drosophila melanogaster]
  misc_feature (1)..(130): NCBI GI NO: 3171731 NR Description: AgPET8 [Eremothecium gossypii]
  misc_feature (1)..(126): NCBI GI NO: 19115553 NR Description: agpet8 protein. [Schizosaccharomyces pombe]
  misc_feature (1)..(140): NCBI GI NO: 6324325 NR Description: Member of family of mitochondrial carrier proteins
  misc_feature (1)..(102): NCBI GI NO: 34857703 NR Description: similar to RIKEN cDNA 4930433D19
MIASKEGFRGLYAGYRSFLLRDLPFDAIQFCIYEQLCLGYKKAARRELSDPENALIGAFAGALTGAVTTPLDVIKTRLMVQGSAKQYQGIVDCVQTIVREEGAPALLKGIGPRVLWIGIGGSIFFGVLESTKRTLAQRRPNTVKETKEE

SEQ ID NO: 3644 - protein, 91 aa, Arabidopsis thaliana
  peptide (1)..(91): Ceres Seq. ID no. 12328528
  misc_feature (1)..(83): NCBI GI NO: 7486053 NR Description: hypothetical protein F23K16
  misc_feature (1)..(83): NCBI GI NO: 18420458 NR Description: mitochondrial carrier protein family
  misc_feature (44)..(83): NCBI GI NO: 34394981 NR Description: mitochondrial aspartate-glutamate carrier protein-like
  misc_feature (7)..(91): NCBI GI NO: 18399114 NR Description: allinase, putative; protein id: At1g34065.1
  misc_feature (59)..(83): NCBI GI NO: 27754081 NR Description: RIKEN cDNA 4930433D19
  misc_feature (39)..(83): NCBI GI NO: 24650120 NR Description: CG4743-PA [Drosophila melanogaster]
  misc_feature (53)..(83): NCBI GI NO: 3171731 NR Description: AgPET8 [Eremothecium gossypii]
  misc_feature (53)..(83): NCBI GI NO: 19115553 NR Description: agpet8 protein. [Schizosaccharomyces pombe]
  misc_feature (53)..(83): NCBI GI NO: 6324325 NR Description: Member of family of mitochondrial carrier proteins
  misc_feature (59)..(83): NCBI GI NO: 34857703 NR Description: similar to RIKEN cDNA 4930433D19
MAPLTLSVDVKSSSATSHDVSKRVMQSPQLKINKGFFASVNTQEDKPFDFFRTLFEGFIAGGTAGVVVETALYPIDTIKTRLQLVEVEKLF

SEQ ID NO: 3645 - DNA, 856 bp, Arabidopsis thaliana
  misc_feature (1)..(856): Ceres Seq. ID no. 12325518
tttcttctgctctcggaattggtgttgcagaagttgcaaatttggaagaaaagttaacaggactggtgaagtatcaaaatttggggttttgctacgatgacgctaggtgctcggcttgttgctcccatgattatacttctcctttttataccgattgaattagttaaagcggaagtcattacactgacaccagaaaccttttctgacaaggtagatttatatatgtgttctgtgctcctttgacgatgcgatattgaaaacggcttagctcgtttcaaagattgtttgcattgctcataaaggagaaggatactgcgtggttcgtaaagttttgtgttccttggtgtaaacactgcaagaaactggggaatttgtgggaagacttgggaaaagcaatggagggagacgatgaaattgaggttggtgaagtagactgtggtactagcagagctgtttgcaccaaagttgaaattcactcgtatccaacatttatgctattttacaatggagaagaagtttcgaaatataaaggaaaaagagacgttgaatcgctcaaggcttttgttgtagaggaaactgaaaaggcagcagaaaaagcacagcttgaagacaaggaactgtgatacaactagtcggtgattattagaacctgatacattgttccctttggttttcattttgcctatgcagttgtgtgactcttaccgttagttagataggcatggttttcagcacgatggaggagcatctttgggtttaaaggtttttcacaccactgttttgctaaaatattcagtttccattttattcagagtcagataagcaaagacgtaagtgtagttagtcgagatttctt

SEQ ID NO: 3646 - protein, 75 aa, Arabidopsis thaliana
  peptide (1)..(75): Ceres Seq. ID no. 12325519
  misc_feature (1)..(75): NCBI GI NO: 8778824 NR Description: T6D22.5 [Arabidopsis thaliana]
  misc_feature (1)..(75): NCBI GI NO: 15223058 NR Description: unknown protein; protein id: At1g07960.1
  misc_feature (1)..(59): NCBI GI NO: 1532175 NR Description: similar to protein disulfide isomerase
  misc_feature (1)..(74): NCBI GI NO: 38649034 NR Description: Unknown (protein for MGC:75894)
  misc_feature (1)..(74): NCBI GI NO: 34784103 NR Description: Unknown (protein for MGC:66265) [Danio rerio]
  misc_feature (1)..(74): NCBI GI NO: 28280043 NR Description: Similar to expressed sequence AL022641
  misc_feature (1)..(68): NCBI GI NO: 21703732 NR Description: similar to thioredoxin related protein
  misc_feature (1)..(69): NCBI GI NO: 19353593 NR Description: Unknown (protein for MGC:37456) [Mus musculus]
  misc_feature (1)..(69): NCBI GI NO: 37574006 NR Description: Txndc5 protein [Mus musculus]
  misc_feature (1)..(69): NCBI GI NO: 29839593 NR Description: Thioredoxin domain containing protein 5 precursor
MEGDDEIEVGEVDCGTSRAVCTKVEIHSYPTFMLFYNGEEVSKYKGKRDVESLKAFVVEETEKAAEKAQLEDKEL

SEQ ID NO: 3647 - protein, 51 aa, Arabidopsis thaliana
  peptide (1)..(51): Ceres Seq. ID no. 12325520
SSALGIGVAEVANLEEKLTGLVKYQNLGFCYDDARCSACCSHDYTSPFYTD

SEQ ID NO: 3648 - protein, 48 aa, Arabidopsis thaliana
  peptide (1)..(48): Ceres Seq. ID no. 12325521
  misc_feature (1)..(41): NCBI GI NO: 8778824 NR Description: T6D22.5 [Arabidopsis thaliana]
  misc_feature (1)..(39): NCBI GI NO: 15223058 NR Description: unknown protein; protein id: At1g07960.1
  misc_feature (1)..(39): NCBI GI NO: 1532175 NR Description: similar to protein disulfide isomerase
MTLGARLVAPMIILLLFIPIELVKAEVITLTPETFSDKVDLYMCSVLL

SEQ ID NO: 3649 - DNA, 930 bp, Arabidopsis thaliana
  misc_feature (1)..(930): Ceres Seq. ID no. 13492957
atgtgcttctatttgctttccgaaaaaaaccaaacgcacccatctccttcctcttctccttttctctccgaacaaagaacacaaccaaaacaaaaatctatgttagatatgtcggaatctgtactcacggcgatgtatagttggttcactccgacagttctcttcgtcttcctcaaccttatgattggtaccatcgccattagctcatctttctcttccaaatccaacgacccaaatcaaactcagatccaacgctctccttccatgattcatcgtctcaaatccataaacttctcttctttcacttctccagacaagtctcatctcgagtttcctccttcaacacctgaagacaacagcaacaacaactttcaccaaccagcttcaatcgaacagaatcaaccattcttgtctagatctccttctgttcttcacagaatcaaatctttcaatctttataactacatttctcaagaacccaccaatataatcgaagcttcaccaccgtcggtgaccgtagagacaaaacaagaacaagtacaagaacaagaagtaaaagaagaacaagaagaagaagaacagagtcttgaagaggtttatagtaaacttaatctaaaccatgtcgctaggacaaaatctgacactgaaccagctgctggaattagacctccgaagcttccaaagaagatgaaaaaatctgctagtaccaaatctccgttctctcactttcaagaagatgaaatctccgtggaggctcgccgtcctgcgacggtgaaagtgccgagagttacgacggtggaagaagctgatgaagaagtagatgcaaaagctgatgactttatcaatcgattcaagcatcagttgaagttacagagaattgattccatcactaagtataaggagatggtgaagaaaagaaacgacaagtga

SEQ ID NO: 3650 - protein, 309 aa, Arabidopsis thaliana
  peptide (1)..(309): Ceres Seq. ID no. 13492958
  misc_feature (1)..(309): NCBI GI NO: 15225251 NR Description: expressed protein [Arabidopsis thaliana]
  misc_feature (71)..(308): NCBI GI NO: 549977 NR Description: cDNA-5-encoded protein
  misc_feature (71)..(308): NCBI GI NO: 15236117 NR Description: uncharacterized protein [Arabidopsis thaliana]
  misc_feature (71)..(308): NCBI GI NO: 21594851 NR Description: uncharacterized protein [Arabidopsis thaliana]
  misc_feature (77)..(304): NCBI GI NO: 21592758 NR Description: unknown [Arabidopsis thaliana]
  misc_feature (77)..(304): NCBI GI NO: 9757987 NR Description: gene_id:MHM17
  misc_feature (77)..(304): NCBI GI NO: 18423922 NR Description: expressed protein [Arabidopsis thaliana]
  misc_feature (77)..(304): NCBI GI NO: 14326479 NR Description: AT5g56980/MHM17_10 [Arabidopsis thaliana]
  misc_feature (41)..(291): NCBI GI NO: 549977 NR Description: cDNA-5-encoded protein
  misc_feature (41)..(291): NCBI GI NO: 15236117 NR Description: uncharacterized protein [Arabidopsis thaliana]
MCFYLLSEKNQTHPSPSSSPFLSEQRTQPKQKSMLDMSESVLTAMYSWFTPTVLFVFLNLMIGTIAISSSFSSKSNDPNQTQIQRSPSMIHRLKSINFSSFTSPDKSHLEFPPSTPEDNSNNNFHQPASIEQNQPFLSRSPSVLHRIKSFNLYNYISQEPTNIIEASPPSVTVETKQEQVQEQEVKEEQEEEEQSLEEVYSKLNLNHVARTKSDTEPAAGIRPPKLPKKMKKSASTKSPFSHFQEDEISVEARRPATVKVPRVTTVEEADEEVDAKADDFINRFKHQLKLQRIDSITKYKEMVKKRNDK

SEQ ID NO: 3651 - protein, 276 aa, Arabidopsis thaliana
  peptide (1)..(276): Ceres Seq. ID no. 13492959
  misc_feature (1)..(276): NCBI GI NO: 15225251 NR Description: expressed protein [Arabidopsis thaliana]
  misc_feature (38)..(275): NCBI GI NO: 549977 NR Description: cDNA-5-encoded protein
  misc_feature (38)..(275): NCBI GI NO: 21594851 NR Description: uncharacterized protein [Arabidopsis thaliana]
  misc_feature (38)..(275): NCBI GI NO: 15236117 NR Description: uncharacterized protein [Arabidopsis thaliana]
  misc_feature (44)..(271): NCBI GI NO: 21592758 NR Description: unknown [Arabidopsis thaliana]
  misc_feature (44)..(271): NCBI GI NO: 9757987 NR Description: gene_id:MHM17
  misc_feature (44)..(271): NCBI GI NO: 18423922 NR Description: expressed protein [Arabidopsis thaliana]
  misc_feature (44)..(271): NCBI GI NO: 14326479 NR Description: AT5g56980/MHM17_10 [Arabidopsis thaliana]
  misc_feature (8)..(258): NCBI GI NO: 549977 NR Description: cDNA-5-encoded protein
  misc_feature (8)..(258): NCBI GI NO: 15236117 NR Description: uncharacterized protein [Arabidopsis thaliana]
MLDMSESVLTAMYSWFTPTVLFVFLNLMIGTIAISSSFSSKSNDPNQTQIQRSPSMIHRLKSINFSSFTSPDKSHLEFPPSTPEDNSNNNFHQPASIEQNQPFLSRSPSVLHRIKSFNLYNYISQEPTNIIEASPPSVTVETKQEQVQEQEVKEEQEEEEQSLEEVYSKLNLNHVARTKSDTEPAAGIRPPKLPKKMKKSASTKSPFSHFQEDEISVEARRPATVKVPRVTTVEEADEEVDAKADDFINRFKHQLKLQRIDSITKYKEMVKKRNDK

SEQ ID NO: 3652 - protein, 273 aa, Arabidopsis thaliana
  peptide (1)..(273): Ceres Seq. ID no. 13492960
  misc_feature (1)..(273): NCBI GI NO: 15225251 NR Description: expressed protein [Arabidopsis thaliana]
  misc_feature (35)..(272): NCBI GI NO: 549977 NR Description: cDNA-5-encoded protein
  misc_feature (35)..(272): NCBI GI NO: 15236117 NR Description: uncharacterized protein [Arabidopsis thaliana]
  misc_feature (35)..(272): NCBI GI NO: 21594851 NR Description: uncharacterized protein [Arabidopsis thaliana]
  misc_feature (41)..(268): NCBI GI NO: 21592758 NR Description: unknown [Arabidopsis thaliana]
  misc_feature (41)..(268): NCBI GI NO: 9757987 NR Description: gene_id:MHM17
  misc_feature (41)..(268): NCBI GI NO: 18423922 NR Description: expressed protein [Arabidopsis thaliana]
  misc_feature (41)..(268): NCBI GI NO: 14326479 NR Description: AT5g56980/MHM17_10 [Arabidopsis thaliana]
  misc_feature (5)..(255): NCBI GI NO: 549977 NR Description: cDNA-5-encoded protein
  misc_feature (5)..(255): NCBI GI NO: 15236117 NR Description: uncharacterized protein [Arabidopsis thaliana]
MSESVLTAMYSWFTPTVLFVFLNLMIGTIAISSSFSSKSNDPNQTQIQRSPSMIHRLKSINFSSFTSPDKSHLEFPPSTPEDNSNNNFHQPASIEQNQPFLSRSPSVLHRIKSFNLYNYISQEPTNIIEASPPSVTVETKQEQVQEQEVKEEQEEEEQSLEEVYSKLNLNHVARTKSDTEPAAGIRPPKLPKKMKKSASTKSPFSHFQEDEISVEARRPATVKVPRVTTVEEADEEVDAKADDFINRFKHQLKLQRIDSITKYKEMVKKRNDK

SEQ ID NO: 3653 - DNA, 1225 bp, Arabidopsis thaliana
  misc_feature (1)..(1225): Ceres Seq. ID no. 12328732
attcacacaaacccagagatctgaaactaagaagccatggatgctcaatatcaagatctacctcctctcaaaagattaagactgttgcagagagatctcgaagctgctcaacagcaccagctaccgaaccaaccggagatgaagtcgttgcagttgccggcaaagaagaggaagcagactcgtgttgattatgacgatgacgacgcagagaactccaatcccacctatcattgtcttccggcgaagaaaaggatctgggcgattgatcccgatcttctctccggtggtggtaaccccttttcgccttttgatctaaatgtagagtataagccttatgttgaagagaaatcaattgagaaaaagtcaactctaaatgttgaatctagtctagaggtagaagaagatgatgataaagagaatatagatcctctagggaaaggaaaagctttagatctctctgatagagaagtagaagatgaagatgggattatgtgtgctgtatgtcaaagtacagatggtgatccattgaatccaattgtgttctgtgatggttgtgatttgatggttcatgcttcttgctatgggaatcctcttgttaaggctattccagaaggtgattggttttgtagacagtgtttatcgtcgaagaaccgagaaaagatcttctcttgctgcttgtgtacaactaaaggcggggcgatgaaacctacgaatgatggtagatgggctcatattacttgtgcgttgtttgttccggaagtttactttgaggatcctgaaggaagagaagggatttgttgtagtgaggtattgagtaagagatggaaagataggtgttatttgtgtaaggttagacgcggttgtgttattgagtgttcggagatgagatgtaagttggcttttcatgttacttgtgggttaaaggaagatctttgtattgagtatcgtgaagggaagaagagtggtggtattgttgttggtttctgtaatgagcataccaaactttgggaaagggaaagtggaaagtacaagattgttgccagagaagaagataaaaagtaggagaaagctcaagggccatgacctgaagaccatgctttttttgcttgcaactctgaagcttccactcatgtatttgattgttttaaaacgtttgttcttcttatttatctgattagtgagagtagctgatcctaaatgctatcaagtttattatatttttgtg

SEQ ID NO: 3654 - protein, 341 aa, Arabidopsis thaliana
  peptide (1)..(341): Ceres Seq. ID no. 12328733
  misc_feature (152)..(203): Pfam Name: Pfam Description:  PHD-finger
  misc_feature (1)..(341): NCBI GI NO: 18400507 NR Description: zinc finger protein-related; protein id: At3g14740
  misc_feature (1)..(341): NCBI GI NO: 9294395 NR Description: gene_id:MIE1
  misc_feature (102)..(336): NCBI GI NO: 34906262 NR Description: P0489A01.16
  misc_feature (91)..(338): NCBI GI NO: 28422365 NR Description: Similar to RIKEN cDNA D530048A03 gene
  misc_feature (147)..(341): NCBI GI NO: 40389479 NR Description: TPA: putative Jade1 [Takifugu rubripes]
  misc_feature (147)..(341): NCBI GI NO: 40389487 NR Description: TPA: Jade1S protein [Mus musculus]
  misc_feature (147)..(337): NCBI GI NO: 19923609 NR Description: PHD protein Jade-1 [Homo sapiens]
  misc_feature (147)..(337): NCBI GI NO: 22760789 NR Description: unnamed protein product [Homo sapiens]
  misc_feature (76)..(330): NCBI GI NO: 40389473 NR Description: TPA: Jade protein [Ciona intestinalis]
  misc_feature (147)..(341): NCBI GI NO: 26340050 NR Description: unnamed protein product [Mus musculus]
MDAQYQDLPPLKRLRLLQRDLEAAQQHQLPNQPEMKSLQLPAKKRKQTRVDYDDDDAENSNPTYHCLPAKKRIWAIDPDLLSGGGNPFSPFDLNVEYKPYVEEKSIEKKSTLNVESSLEVEEDDDKENIDPLGKGKALDLSDREVEDEDGIMCAVCQSTDGDPLNPIVFCDGCDLMVHASCYGNPLVKAIPEGDWFCRQCLSSKNREKIFSCCLCTTKGGAMKPTNDGRWAHITCALFVPEVYFEDPEGREGICCSEVLSKRWKDRCYLCKVRRGCVIECSEMRCKLAFHVTCGLKEDLCIEYREGKKSGGIVVGFCNEHTKLWERESGKYKIVAREEDKK

SEQ ID NO: 3655 - protein, 307 aa, Arabidopsis thaliana
  peptide (1)..(307): Ceres Seq. ID no. 12328734
  misc_feature (118)..(169): Pfam Name: Pfam Description:  PHD-finger
  misc_feature (1)..(307): NCBI GI NO: 18400507 NR Description: zinc finger protein-related; protein id: At3g14740
  misc_feature (1)..(307): NCBI GI NO: 9294395 NR Description: gene_id:MIE1
  misc_feature (68)..(302): NCBI GI NO: 34906262 NR Description: P0489A01.16
  misc_feature (57)..(304): NCBI GI NO: 28422365 NR Description: Similar to RIKEN cDNA D530048A03 gene
  misc_feature (113)..(307): NCBI GI NO: 40389479 NR Description: TPA: putative Jade1 [Takifugu rubripes]
  misc_feature (113)..(307): NCBI GI NO: 40389487 NR Description: TPA: Jade1S protein [Mus musculus]
  misc_feature (113)..(303): NCBI GI NO: 19923609 NR Description: PHD protein Jade-1 [Homo sapiens]
  misc_feature (113)..(303): NCBI GI NO: 22760789 NR Description: unnamed protein product [Homo sapiens]
  misc_feature (42)..(296): NCBI GI NO: 40389473 NR Description: TPA: Jade protein [Ciona intestinalis]
  misc_feature (113)..(307): NCBI GI NO: 26340050 NR Description: unnamed protein product [Mus musculus]
MKSLQLPAKKRKQTRVDYDDDDAENSNPTYHCLPAKKRIWAIDPDLLSGGGNPFSPFDLNVEYKPYVEEKSIEKKSTLNVESSLEVEEDDDKENIDPLGKGKALDLSDREVEDEDGIMCAVCQSTDGDPLNPIVFCDGCDLMVHASCYGNPLVKAIPEGDWFCRQCLSSKNREKIFSCCLCTTKGGAMKPTNDGRWAHITCALFVPEVYFEDPEGREGICCSEVLSKRWKDRCYLCKVRRGCVIECSEMRCKLAFHVTCGLKEDLCIEYREGKKSGGIVVGFCNEHTKLWERESGKYKIVAREEDKK

SEQ ID NO: 3656 - protein, 190 aa, Arabidopsis thaliana
  peptide (1)..(190): Ceres Seq. ID no. 12328735
  misc_feature (1)..(52): Pfam Name: Pfam Description:  PHD-finger
  misc_feature (1)..(190): NCBI GI NO: 18400507 NR Description: zinc finger protein-related; protein id: At3g14740
  misc_feature (1)..(190): NCBI GI NO: 9294395 NR Description: gene_id:MIE1
  misc_feature (1)..(185): NCBI GI NO: 34906262 NR Description: P0489A01.16
  misc_feature (1)..(187): NCBI GI NO: 28422365 NR Description: Similar to RIKEN cDNA D530048A03 gene
  misc_feature (1)..(190): NCBI GI NO: 40389479 NR Description: TPA: putative Jade1 [Takifugu rubripes]
  misc_feature (1)..(190): NCBI GI NO: 40389487 NR Description: TPA: Jade1S protein [Mus musculus]
  misc_feature (1)..(186): NCBI GI NO: 19923609 NR Description: PHD protein Jade-1 [Homo sapiens]
  misc_feature (1)..(186): NCBI GI NO: 22760789 NR Description: unnamed protein product [Homo sapiens]
  misc_feature (1)..(179): NCBI GI NO: 40389473 NR Description: TPA: Jade protein [Ciona intestinalis]
  misc_feature (1)..(190): NCBI GI NO: 26340050 NR Description: unnamed protein product [Mus musculus]
MCAVCQSTDGDPLNPIVFCDGCDLMVHASCYGNPLVKAIPEGDWFCRQCLSSKNREKIFSCCLCTTKGGAMKPTNDGRWAHITCALFVPEVYFEDPEGREGICCSEVLSKRWKDRCYLCKVRRGCVIECSEMRCKLAFHVTCGLKEDLCIEYREGKKSGGIVVGFCNEHTKLWERESGKYKIVAREEDKK

SEQ ID NO: 3657 - DNA, 2022 bp, Arabidopsis thaliana
  misc_feature (1)..(2022): Ceres Seq. ID no. 12328620
acagtaacaatctctctctcgcaccttcttaaaagctgctctatttcttcgcttccctcttctcttcactcacaaaacattttgttctaatcccgcaactgctaaaaacaaacccttttgtcaaaaatctctcctttcggtggtgacagaaatctattgcaggaaatggcagaagcagcatacacagtagcatcagacagtgaaaacactggagaggagaaatcatcatcatctccttcattacccgaaatcgcccttggtatcgacattggtacttctcaatgcagtatagctgtttggaacggttctcaagttcacatcttgaggaacacaagaaaccagaagctcatcaaatcatttgtcactttcaaagatgaagttcctgctggtggtgttagcaaccagctcgcacatgagcaggaaatgctaaccggagccgctatcttcaacatgaagcggctcgttggtcgtgtagacactgatcctgtggttcacgctagcaagaaccttcctttcttggttcaaactcttgatattggagttagaccgtttattgcagctttggtgaacaatgcttggagatcaacaacaccagaggaagttttagctatatttctggtggagttacgtctgatggctgaagctcagttgaaacgtcctgtgagaaatgtagtgcttacggttccggtttcgttctctaggttccagctcacacggttcgaaagagcttgcgctatggctggacttcatgttcttcgtttgatgccggaaccaactgctattgcgttgctttatgcgcaacagcagcagatgactacgcatgataacatgggaagcggaagcgagaggcttgcggttatattcaatatgggagctggttactgcgatgttgcggttactgctactgctggtggtgtttcacagataaaagctttagctggtagccccattgggggtgaagacattttgcagagcacaattcgccatatcgctccacctaatgaagaagcttcggggttgcttcgtgtagcggcacaggacgcgattcacaggctaacggatcaagaaaatgtccaaattgaagtggatttgggaaatggtaacaagatatccaaggttcttgataggttagagtttgaggaagtgaaccagaaggtatttgaggaatgtgagagacttgttgtgcagtgcctgcgagatgcgagagtcaatggtggtgatatcgatgatttgataatggttggagggtgttcgtacatcccgaaagtaagaactattatcaagaacgtatgcaagaaggatgagatatacaaaggcgtgaatcctttagaagctgcggttagaggagctgctttggaaggtgcggtgacttcagggattcatgatccttttgggagcttagatctgttaaccatacaagccacacctcttgcagttggagcaagagctaacggaaacaaattcatacccgtgattcctcgtaacacgatggttccagcgcggaaagacctctttttcacaacggttcaagacaaccagaaggaagctctgatcattatatacgaaggagaaggagagactgttgaagagaatcatcttcttggttatttcaagctcgttgggattccgccagcaccgaaaggtgttccagagatcaatgtttgtatggacatcgatgcgtcgaatgctttacgggttttcgcagctgtgttgatgccgggatcttcgactccggtggttcctgtgattgaggtgaggatgcctacggttgatgatggacatggttggtgtgctcaagctttgaatgtgaaatatggagctactcttgatttgattacttttcagagaaagatgtaagattaaaataaaatggtgttggtgatagattttagattagatgtaagatacgaggatgcttcgtatagaaaagagtttgtaaagtttgtgtgtgttttggggtttgtcgttgaagtggtaaacaatgtttatgtgtgtaatgaagtaataatgctttgcagattg

SEQ ID NO: 3658 - protein, 563 aa, Arabidopsis thaliana
  peptide (1)..(563): Ceres Seq. ID no. 12328621
  misc_feature (319)..(505): Pfam Name: Pfam Description:  Hsp70 protein
  misc_feature (1)..(563): NCBI GI NO: 21618151 NR Description: 70kD heat shock protein [Arabidopsis thaliana]
  misc_feature (1)..(563): NCBI GI NO: 15225187 NR Description: 70kD heat shock protein; protein id: At2g32120
  misc_feature (30)..(513): NCBI GI NO: 15230534 NR Description: heat shock protein 70; protein id: At3g12580.1
  misc_feature (30)..(513): NCBI GI NO: 3962377 NR Description: heat shock protein 70 [Arabidopsis thaliana]
  misc_feature (17)..(514): NCBI GI NO: 32699500 NR Description: 78 kDa glucose-regulated protein homolog precursor
  misc_feature (28)..(513): NCBI GI NO: 15219109 NR Description: heat shock protein hsp70, putative
  misc_feature (30)..(513): NCBI GI NO: 6969976 NR Description: high molecular weight heat shock protein
  misc_feature (30)..(513): NCBI GI NO: 34908140 NR Description: putative HSP70
  misc_feature (17)..(514): NCBI GI NO: 11277118 NR Description: dnaK-type molecular chaperone BiP
  misc_feature (30)..(513): NCBI GI NO: 2827002 NR Description: HSP70 [Triticum aestivum]
MAEAAYTVASDSENTGEEKSSSSPSLPEIALGIDIGTSQCSIAVWNGSQVHILRNTRNQKLIKSFVTFKDEVPAGGVSNQLAHEQEMLTGAAIFNMKRLVGRVDTDPVVHASKNLPFLVQTLDIGVRPFIAALVNNAWRSTTPEEVLAIFLVELRLMAEAQLKRPVRNVVLTVPVSFSRFQLTRFERACAMAGLHVLRLMPEPTAIALLYAQQQQMTTHDNMGSGSERLAVIFNMGAGYCDVAVTATAGGVSQIKALAGSPIGGEDILQSTIRHIAPPNEEASGLLRVAAQDAIHRLTDQENVQIEVDLGNGNKISKVLDRLEFEEVNQKVFEECERLVVQCLRDARVNGGDIDDLIMVGGCSYIPKVRTIIKNVCKKDEIYKGVNPLEAAVRGAALEGAVTSGIHDPFGSLDLLTIQATPLAVGARANGNKFIPVIPRNTMVPARKDLFFTTVQDNQKEALIIIYEGEGETVEENHLLGYFKLVGIPPAPKGVPEINVCMDIDASNALRVFAAVLMPGSSTPVVPVIEVRMPTVDDGHGWCAQALNVKYGATLDLITFQRKM

SEQ ID NO: 3659 - protein, 477 aa, Arabidopsis thaliana
  peptide (1)..(477): Ceres Seq. ID no. 12328622
  misc_feature (233)..(419): Pfam Name: Pfam Description:  Hsp70 protein
  misc_feature (1)..(477): NCBI GI NO: 21618151 NR Description: 70kD heat shock protein [Arabidopsis thaliana]
  misc_feature (1)..(477): NCBI GI NO: 15225187 NR Description: 70kD heat shock protein; protein id: At2g32120
  misc_feature (1)..(427): NCBI GI NO: 15230534 NR Description: heat shock protein 70; protein id: At3g12580.1
  misc_feature (1)..(427): NCBI GI NO: 3962377 NR Description: heat shock protein 70 [Arabidopsis thaliana]
  misc_feature (1)..(428): NCBI GI NO: 32699500 NR Description: 78 kDa glucose-regulated protein homolog precursor
  misc_feature (1)..(427): NCBI GI NO: 15219109 NR Description: heat shock protein hsp70, putative
  misc_feature (1)..(427): NCBI GI NO: 6969976 NR Description: high molecular weight heat shock protein
  misc_feature (1)..(427): NCBI GI NO: 34908140 NR Description: putative HSP70
  misc_feature (1)..(428): NCBI GI NO: 11277118 NR Description: dnaK-type molecular chaperone BiP
  misc_feature (1)..(427): NCBI GI NO: 2827002 NR Description: HSP70 [Triticum aestivum]
MLTGAAIFNMKRLVGRVDTDPVVHASKNLPFLVQTLDIGVRPFIAALVNNAWRSTTPEEVLAIFLVELRLMAEAQLKRPVRNVVLTVPVSFSRFQLTRFERACAMAGLHVLRLMPEPTAIALLYAQQQQMTTHDNMGSGSERLAVIFNMGAGYCDVAVTATAGGVSQIKALAGSPIGGEDILQSTIRHIAPPNEEASGLLRVAAQDAIHRLTDQENVQIEVDLGNGNKISKVLDRLEFEEVNQKVFEECERLVVQCLRDARVNGGDIDDLIMVGGCSYIPKVRTIIKNVCKKDEIYKGVNPLEAAVRGAALEGAVTSGIHDPFGSLDLLTIQATPLAVGARANGNKFIPVIPRNTMVPARKDLFFTTVQDNQKEALIIIYEGEGETVEENHLLGYFKLVGIPPAPKGVPEINVCMDIDASNALRVFAAVLMPGSSTPVVPVIEVRMPTVDDGHGWCAQALNVKYGATLDLITFQRKM

SEQ ID NO: 3660 - protein, 468 aa, Arabidopsis thaliana
  peptide (1)..(468): Ceres Seq. ID no. 12328623
  misc_feature (224)..(410): Pfam Name: Pfam Description:  Hsp70 protein
  misc_feature (1)..(468): NCBI GI NO: 21618151 NR Description: 70kD heat shock protein [Arabidopsis thaliana]
  misc_feature (1)..(468): NCBI GI NO: 15225187 NR Description: 70kD heat shock protein; protein id: At2g32120
  misc_feature (1)..(418): NCBI GI NO: 15230534 NR Description: heat shock protein 70; protein id: At3g12580.1
  misc_feature (1)..(418): NCBI GI NO: 3962377 NR Description: heat shock protein 70 [Arabidopsis thaliana]
  misc_feature (1)..(419): NCBI GI NO: 32699500 NR Description: 78 kDa glucose-regulated protein homolog precursor
  misc_feature (1)..(418): NCBI GI NO: 15219109 NR Description: heat shock protein hsp70, putative
  misc_feature (1)..(418): NCBI GI NO: 6969976 NR Description: high molecular weight heat shock protein
  misc_feature (1)..(418): NCBI GI NO: 34908140 NR Description: putative HSP70
  misc_feature (1)..(419): NCBI GI NO: 11277118 NR Description: dnaK-type molecular chaperone BiP
  misc_feature (1)..(418): NCBI GI NO: 2827002 NR Description: HSP70 [Triticum aestivum]
MKRLVGRVDTDPVVHASKNLPFLVQTLDIGVRPFIAALVNNAWRSTTPEEVLAIFLVELRLMAEAQLKRPVRNVVLTVPVSFSRFQLTRFERACAMAGLHVLRLMPEPTAIALLYAQQQQMTTHDNMGSGSERLAVIFNMGAGYCDVAVTATAGGVSQIKALAGSPIGGEDILQSTIRHIAPPNEEASGLLRVAAQDAIHRLTDQENVQIEVDLGNGNKISKVLDRLEFEEVNQKVFEECERLVVQCLRDARVNGGDIDDLIMVGGCSYIPKVRTIIKNVCKKDEIYKGVNPLEAAVRGAALEGAVTSGIHDPFGSLDLLTIQATPLAVGARANGNKFIPVIPRNTMVPARKDLFFTTVQDNQKEALIIIYEGEGETVEENHLLGYFKLVGIPPAPKGVPEINVCMDIDASNALRVFAAVLMPGSSTPVVPVIEVRMPTVDDGHGWCAQALNVKYGATLDLITFQRKM

SEQ ID NO: 3661 - DNA, 1254 bp, Arabidopsis thaliana
  misc_feature (1)..(1254): Ceres Seq. ID no. 13499860
aacttcgtggtactcttttgctttacccatttttcaatgtcttacgatgagatgctttctgctgcgaagaaagctgtttctctcgctgctcgtctcagcaacgaagtgaggaaatctctgttggtaactgacgtttggaacaaatcagatgatagtcctgttactgttgctgattatggttcgcaggcggtggttagccttgtactggaaagggaactccagaatgaacctgtgtctttagtggctgaagaggattctggtgagttaaggaagattgctgctgagaccgttttggctcgtattacagagcttgtcaaagatactcttgcaagtgatgaatcatatgctattgcttctcctttgacttcggatgatgtgctcaacgctatagatcgtggtaaatcagaaggaggtcctaagggtcgccactggatcttggatcctattggtggcactagaggatttataagaggagaacaatatgcaataggattagcattgttggtggaaggcaaagtagtactaggtgtaatggcttgtcctaagcttccattggcatcaactgctggtaatgcactcaagtctttacctgaaaaagttggttgccttttctatggttcggttggcaatgggacttatgtccagtctctcagtgtcgactctcttcctgcgaaggtggaggttagcagcatagatgatcctgcgaaagcgagtttcttcgagtcataccacacacctgtccccatccataacaccattgctacgaaattggggataaaagaatctccaatcaagatcaacagccagactaagtatgcagctttatctagaggagatggagaggtttacttgaggtttactcgcaaagcaagacccgaatcaatatggaatcacgctgctggctcaatcattgtttcagaagcaggagggaaagtgactgatgcagcagggaatccattggacttttcgaaagggaagtatcttgattacaagagaggaatcgtcgttacgacgcagaaactgttgccaaggcttttaacagcagtaagagaatcaattaaagaagaagaagaggaagaagaaaaagctgcttctctaaaacttcactaacacgcaactgtaatatacttattattgttgtctttgggtatactctgttgtctctgtgtttttcacagtctatttattgaaaaccagaaacaaaaaaaaaactcacctttgatatatataagaaacactaattctcttttgaat

SEQ ID NO: 3662 - protein, 369 aa, Arabidopsis thaliana
  peptide (1)..(369): Ceres Seq. ID no. 13499861
  misc_feature (13)..(369): NCBI GI NO: 18424775 NR Description: 3(2),5-bisphosphate nucleotidase
  misc_feature (13)..(369): NCBI GI NO: 21618152 NR Description: 3(2),5-bisphosphate nucleotidase
  misc_feature (13)..(369): NCBI GI NO: 8777312 NR Description: 3'(2'),5'-bisphosphate nucleotidase
  misc_feature (13)..(356): NCBI GI NO: 15237589 NR Description: 3(2),5-bisphosphate nucleotidase (emb|CAB05889.1)
  misc_feature (13)..(358): NCBI GI NO: 15237567 NR Description: 3(2),5-bisphosphate nucleotidase
  misc_feature (13)..(356): NCBI GI NO: 34395640 NR Description: Probable SAL4 phosphatase
  misc_feature (13)..(356): NCBI GI NO: 15242383 NR Description: 3'
  misc_feature (15)..(366): NCBI GI NO: 14268820 NR Description: diphosphonucleotide phosphatase 1 [Zea mays]
  misc_feature (15)..(358): NCBI GI NO: 3913517 NR Description: 3'
  misc_feature (14)..(329): NCBI GI NO: 15239631 NR Description: HAL2-related protein (Ahl) [Arabidopsis thaliana]
NFVVLFCFTHFSMSYDEMLSAAKKAVSLAARLSNEVRKSLLVTDVWNKSDDSPVTVADYGSQAVVSLVLERELQNEPVSLVAEEDSGELRKIAAETVLARITELVKDTLASDESYAIASPLTSDDVLNAIDRGKSEGGPKGRHWILDPIGGTRGFIRGEQYAIGLALLVEGKVVLGVMACPKLPLASTAGNALKSLPEKVGCLFYGSVGNGTYVQSLSVDSLPAKVEVSSIDDPAKASFFESYHTPVPIHNTIATKLGIKESPIKINSQTKYAALSRGDGEVYLRFTRKARPESIWNHAAGSIIVSEAGGKVTDAAGNPLDFSKGKYLDYKRGIVVTTQKLLPRLLTAVRESIKEEEEEEEKAASLKLH

SEQ ID NO: 3663 - protein, 357 aa, Arabidopsis thaliana
  peptide (1)..(357): Ceres Seq. ID no. 13499862
  misc_feature (1)..(357): NCBI GI NO: 18424775 NR Description: 3(2),5-bisphosphate nucleotidase
  misc_feature (1)..(357): NCBI GI NO: 21618152 NR Description: 3(2),5-bisphosphate nucleotidase
  misc_feature (1)..(357): NCBI GI NO: 8777312 NR Description: 3'(2'),5'-bisphosphate nucleotidase
  misc_feature (1)..(344): NCBI GI NO: 15237589 NR Description: 3(2),5-bisphosphate nucleotidase (emb|CAB05889.1)
  misc_feature (1)..(346): NCBI GI NO: 15237567 NR Description: 3(2),5-bisphosphate nucleotidase
  misc_feature (1)..(344): NCBI GI NO: 34395640 NR Description: Probable SAL4 phosphatase
  misc_feature (1)..(344): NCBI GI NO: 15242383 NR Description: 3'
  misc_feature (3)..(354): NCBI GI NO: 14268820 NR Description: diphosphonucleotide phosphatase 1 [Zea mays]
  misc_feature (3)..(346): NCBI GI NO: 3913517 NR Description: 3'
  misc_feature (2)..(317): NCBI GI NO: 15239631 NR Description: HAL2-related protein (Ahl) [Arabidopsis thaliana]
MSYDEMLSAAKKAVSLAARLSNEVRKSLLVTDVWNKSDDSPVTVADYGSQAVVSLVLERELQNEPVSLVAEEDSGELRKIAAETVLARITELVKDTLASDESYAIASPLTSDDVLNAIDRGKSEGGPKGRHWILDPIGGTRGFIRGEQYAIGLALLVEGKVVLGVMACPKLPLASTAGNALKSLPEKVGCLFYGSVGNGTYVQSLSVDSLPAKVEVSSIDDPAKASFFESYHTPVPIHNTIATKLGIKESPIKINSQTKYAALSRGDGEVYLRFTRKARPESIWNHAAGSIIVSEAGGKVTDAAGNPLDFSKGKYLDYKRGIVVTTQKLLPRLLTAVRESIKEEEEEEEKAASLKLH

SEQ ID NO: 3664 - protein, 352 aa, Arabidopsis thaliana
  peptide (1)..(352): Ceres Seq. ID no. 13499863
  misc_feature (1)..(352): NCBI GI NO: 18424775 NR Description: 3(2),5-bisphosphate nucleotidase
  misc_feature (1)..(352): NCBI GI NO: 21618152 NR Description: 3(2),5-bisphosphate nucleotidase
  misc_feature (1)..(352): NCBI GI NO: 8777312 NR Description: 3'(2'),5'-bisphosphate nucleotidase
  misc_feature (1)..(339): NCBI GI NO: 15237589 NR Description: 3(2),5-bisphosphate nucleotidase (emb|CAB05889.1)
  misc_feature (1)..(341): NCBI GI NO: 15237567 NR Description: 3(2),5-bisphosphate nucleotidase
  misc_feature (1)..(339): NCBI GI NO: 34395640 NR Description: Probable SAL4 phosphatase
  misc_feature (1)..(339): NCBI GI NO: 15242383 NR Description: 3'
  misc_feature (1)..(349): NCBI GI NO: 14268820 NR Description: diphosphonucleotide phosphatase 1 [Zea mays]
  misc_feature (1)..(341): NCBI GI NO: 3913517 NR Description: 3'
  misc_feature (1)..(312): NCBI GI NO: 15239631 NR Description: HAL2-related protein (Ahl) [Arabidopsis thaliana]
MLSAAKKAVSLAARLSNEVRKSLLVTDVWNKSDDSPVTVADYGSQAVVSLVLERELQNEPVSLVAEEDSGELRKIAAETVLARITELVKDTLASDESYAIASPLTSDDVLNAIDRGKSEGGPKGRHWILDPIGGTRGFIRGEQYAIGLALLVEGKVVLGVMACPKLPLASTAGNALKSLPEKVGCLFYGSVGNGTYVQSLSVDSLPAKVEVSSIDDPAKASFFESYHTPVPIHNTIATKLGIKESPIKINSQTKYAALSRGDGEVYLRFTRKARPESIWNHAAGSIIVSEAGGKVTDAAGNPLDFSKGKYLDYKRGIVVTTQKLLPRLLTAVRESIKEEEEEEEKAASLKLH

SEQ ID NO: 3665 - DNA, 1198 bp, Arabidopsis thaliana
  misc_feature (1)..(1198): Ceres Seq. ID no. 12328752
atgagggacaccattgaaacgtttggttaacatattgccttcaaagccttttttggtttttcttcatttctctttcgcgaagtttcattgatcagaaagggttcccactttctccattgattattcttttgttcgattcttctcggtgtgatttggtatcaaaatggcgtatgaggaacactttcagcaaacttctgaagctaaatatgattgtcttttatttgatatagatgatactctttaccctctcagttctggtttggccatggaagtgaaaaagaacattcaagaatatatggttcagaaacttggtattgaagaagataaagtccaagaactttgcctttccctttataaaatctatggaactactatggctggtctcaaggctgtgggttatgactttgattatgacgatttccatcgttttgttcatgggagattgccatactcaacactgaagcctgacccaattctgaggaatattattcttagcttgcctattcggaaagttgtttttacgaatgcagacaaggctcatgcagccaagattattgccaggctaggcctagagggctgctttgagaaaatcatatctttcgagactctgaaccccatcaccaaaactgaatctcctgttgataccaaaaccagagaaatcttcgacataatcagttacatggcaaatcctgattcaagcattgaacttccaaagacttctgttgtatgcaaaccttctgaaggagcattcgaacaggttttcaagatggccaacatcaatcctaagaagacattgttcttcgatgacagcatccgcaacattcaaactgggaagcgcgttggtctccacaccgtatgggttgggacctcacacagagaggaaggagtagatattgcattggagcatattcacaacatacgtgaagctcttcctcaactatgggatgctgttgatgacaaagccaaggagattagaaccaggcaaaaggtcgccattgaaaccattgcttaaacaaaacattcactggctcattttgcagctaatagtatcgagaatagcgagaaaaccacataactatttcactcttgtaagaggaaaaataagtgtaatttaaagctttgattgagaccactttttgagattatgagtagttatgaaaaaagctttactttattcaatgaagtgcaacatcgtttg

SEQ ID NO: 3666 - protein, 282 aa, Arabidopsis thaliana
  peptide (1)..(282): Ceres Seq. ID no. 12328753
  misc_feature (15)..(236): Pfam Name: Pfam Description:  haloacid dehalogenase-like hydrolase
  misc_feature (1)..(282): NCBI GI NO: 30697234 NR Description: haloacid dehalogenase-like hydrolase family
  misc_feature (1)..(282): NCBI GI NO: 30697236 NR Description: haloacid dehalogenase-like hydrolase family
  misc_feature (1)..(282): NCBI GI NO: 21618155 NR Description: putative ripening-related protein-like
  misc_feature (1)..(155): NCBI GI NO: 7406669 NR Description: putative ripening-related protein [Vitis vinifera]
  misc_feature (141)..(280): NCBI GI NO: 7406669 NR Description: putative ripening-related protein [Vitis vinifera]
  misc_feature (1)..(280): NCBI GI NO: 15241720 NR Description: putative protein; protein id: At5g02230
  misc_feature (1)..(280): NCBI GI NO: 21593165 NR Description: unknown [Arabidopsis thaliana]
  misc_feature (4)..(156): NCBI GI NO: 8885554 NR Description: ripening-related protein-like; hydrolase-like
  misc_feature (182)..(280): NCBI GI NO: 8885554 NR Description: ripening-related protein-like; hydrolase-like
  misc_feature (7)..(156): NCBI GI NO: 15238429 NR Description: putative ripening-related protein - like
MAYEEHFQQTSEAKYDCLLFDIDDTLYPLSSGLAMEVKKNIQEYMVQKLGIEEDKVQELCLSLYKIYGTTMAGLKAVGYDFDYDDFHRFVHGRLPYSTLKPDPILRNIILSLPIRKVVFTNADKAHAAKIIARLGLEGCFEKIISFETLNPITKTESPVDTKTREIFDIISYMANPDSSIELPKTSVVCKPSEGAFEQVFKMANINPKKTLFFDDSIRNIQTGKRVGLHTVWVGTSHREEGVDIALEHIHNIREALPQLWDAVDDKAKEIRTRQKVAIETIA

SEQ ID NO: 3667 - protein, 248 aa, Arabidopsis thaliana
  peptide (1)..(248): Ceres Seq. ID no. 12328754
  misc_feature (1)..(202): Pfam Name: Pfam Description:  haloacid dehalogenase-like hydrolase
  misc_feature (1)..(248): NCBI GI NO: 30697234 NR Description: haloacid dehalogenase-like hydrolase family
  misc_feature (1)..(248): NCBI GI NO: 30697236 NR Description: haloacid dehalogenase-like hydrolase family
  misc_feature (1)..(248): NCBI GI NO: 21618155 NR Description: putative ripening-related protein-like
  misc_feature (1)..(121): NCBI GI NO: 7406669 NR Description: putative ripening-related protein [Vitis vinifera]
  misc_feature (107)..(246): NCBI GI NO: 7406669 NR Description: putative ripening-related protein [Vitis vinifera]
  misc_feature (1)..(246): NCBI GI NO: 15241720 NR Description: putative protein; protein id: At5g02230
  misc_feature (1)..(246): NCBI GI NO: 21593165 NR Description: unknown [Arabidopsis thaliana]
  misc_feature (1)..(122): NCBI GI NO: 8885554 NR Description: ripening-related protein-like; hydrolase-like
  misc_feature (148)..(246): NCBI GI NO: 8885554 NR Description: ripening-related protein-like; hydrolase-like
  misc_feature (1)..(122): NCBI GI NO: 15238429 NR Description: putative ripening-related protein - like
MEVKKNIQEYMVQKLGIEEDKVQELCLSLYKIYGTTMAGLKAVGYDFDYDDFHRFVHGRLPYSTLKPDPILRNIILSLPIRKVVFTNADKAHAAKIIARLGLEGCFEKIISFETLNPITKTESPVDTKTREIFDIISYMANPDSSIELPKTSVVCKPSEGAFEQVFKMANINPKKTLFFDDSIRNIQTGKRVGLHTVWVGTSHREEGVDIALEHIHNIREALPQLWDAVDDKAKEIRTRQKVAIETIA

SEQ ID NO: 3668 - protein, 238 aa, Arabidopsis thaliana
  peptide (1)..(238): Ceres Seq. ID no. 12328755
  misc_feature (1)..(192): Pfam Name: Pfam Description:  haloacid dehalogenase-like hydrolase
  misc_feature (1)..(238): NCBI GI NO: 30697234 NR Description: haloacid dehalogenase-like hydrolase family
  misc_feature (1)..(238): NCBI GI NO: 30697236 NR Description: haloacid dehalogenase-like hydrolase family
  misc_feature (1)..(238): NCBI GI NO: 21618155 NR Description: putative ripening-related protein-like
  misc_feature (1)..(111): NCBI GI NO: 7406669 NR Description: putative ripening-related protein [Vitis vinifera]
  misc_feature (97)..(236): NCBI GI NO: 7406669 NR Description: putative ripening-related protein [Vitis vinifera]
  misc_feature (1)..(236): NCBI GI NO: 15241720 NR Description: putative protein; protein id: At5g02230
  misc_feature (1)..(236): NCBI GI NO: 21593165 NR Description: unknown [Arabidopsis thaliana]
  misc_feature (1)..(112): NCBI GI NO: 8885554 NR Description: ripening-related protein-like; hydrolase-like
  misc_feature (138)..(236): NCBI GI NO: 8885554 NR Description: ripening-related protein-like; hydrolase-like
  misc_feature (1)..(112): NCBI GI NO: 15238429 NR Description: putative ripening-related protein - like
MVQKLGIEEDKVQELCLSLYKIYGTTMAGLKAVGYDFDYDDFHRFVHGRLPYSTLKPDPILRNIILSLPIRKVVFTNADKAHAAKIIARLGLEGCFEKIISFETLNPITKTESPVDTKTREIFDIISYMANPDSSIELPKTSVVCKPSEGAFEQVFKMANINPKKTLFFDDSIRNIQTGKRVGLHTVWVGTSHREEGVDIALEHIHNIREALPQLWDAVDDKAKEIRTRQKVAIETIA

SEQ ID NO: 3669 - DNA, 745 bp, Arabidopsis thaliana
  misc_feature (1)..(745): Ceres Seq. ID no. 5672374
agaaagcggaaaaaaaaacaaaaggtcgtgaatgtctctgtccctttcttcctcagttctcacgcaagcttcaacgagaaaagatcggaatctcgccgtcggtaaagcgccgccgtaagtaaaagacggaaaaccagaagaaggaggagattgtatttatgtgtagcagcgtttagtgtgaggaaggaggagattttgtatatagttagaatttgcttcgaagacgatgtcgctgagaattaaattagtggtggataagtttgtggaggagcttaagcaagcacttgacgctgatatacaagatcggatcatgaaggagagagagatgcagagttatatagaagagcgtgagcgtgaagtcgctgagcgagaagctgcctggaaagctgagctctctcgccgtgagacggagatcgctagacaggaagcgaggttgaagatggagagagagaatctggagaaggagaagagtgttcttatggggactgcgtcgaatcaggataatcaagatggtgctctggaaattactgtgagtggtgagaaatatcggtgtcttagattctctaaggctaagaaatgaggttggaaattggaatctggattctaaatttagggcacaaaaggaaaagatttgttcttgcgtttatgatggatgcaatgggaattgttggaatgatgcttggtttgtgtaaattattaattcaatgaagaaagtattgtgttttctggaaagagagtttgtctg

SEQ ID NO: 3670 - protein, 117 aa, Arabidopsis thaliana
  peptide (1)..(117): Ceres Seq. ID no. 5672375
  misc_feature (1)..(106): NCBI GI NO: 25371273 NR Description: hypothetical protein At2g17350
  misc_feature (1)..(117): NCBI GI NO: 18398390 NR Description: expressed protein; protein id: At2g17350
MSLRIKLVVDKFVEELKQALDADIQDRIMKEREMQSYIEEREREVAEREAAWKAELSRRETEIARQEARLKMERENLEKEKSVLMGTASNQDNQDGALEITVSGEKYRCLRFSKAKK

SEQ ID NO: 3671 - protein, 89 aa, Arabidopsis thaliana
  peptide (1)..(89): Ceres Seq. ID no. 5672376
  misc_feature (1)..(78): NCBI GI NO: 25371273 NR Description: hypothetical protein At2g17350
  misc_feature (1)..(89): NCBI GI NO: 18398390 NR Description: expressed protein; protein id: At2g17350
MKEREMQSYIEEREREVAEREAAWKAELSRRETEIARQEARLKMERENLEKEKSVLMGTASNQDNQDGALEITVSGEKYRCLRFSKAKK

SEQ ID NO: 3672 - protein, 84 aa, Arabidopsis thaliana
  peptide (1)..(84): Ceres Seq. ID no. 5672377
  misc_feature (1)..(73): NCBI GI NO: 25371273 NR Description: hypothetical protein At2g17350
  misc_feature (1)..(84): NCBI GI NO: 18398390 NR Description: expressed protein; protein id: At2g17350
MQSYIEEREREVAEREAAWKAELSRRETEIARQEARLKMERENLEKEKSVLMGTASNQDNQDGALEITVSGEKYRCLRFSKAKK

SEQ ID NO: 3673 - DNA, 1945 bp, Arabidopsis thaliana
  misc_feature (1)..(1945): Ceres Seq. ID no. 13574947
aagtgtctctctataaccagagaaattatttcaagatctacttctcatcatcgttcttttcttatctcttcttgtccaacttcttctgaatcaagacaagagaaaagcaaccaaagatggcacatcttcaaagaacatttcctactgagatgtcaaaaggtagagctagctttccaaaaggctttctctttggaactgcttcatcttcttatcagtacgaaggagcagtgaatgaaggtgcgagaggacaaagcgtgtgggatcatttctccaacaggtttcctcacagaatcagtgattctagcgacggaaacgttgccgttgatttctaccatcgttacaaggaagatattaagagaatgaaggatataaacatggattcgtttcggctttccattgcttggccacgagttctaccttatggcaaaagggatagaggagttagtgaagaaggaattaagttttacaatgatgttattgatgaactcttagccaatgaaatcactcctcttgttactatctttcattgggacataccacaggatcttgaagatgaatacggcggttttctaagcgagcagattatagatgacttcagagactatgcgagtctctgcttcgagagatttggggacagagtgagtctgtggtgcacaatgaatgagccgtgggtctacagtgtcgcgggctatgacacaggaaggaaagcgccaggacggtgctccaagtatgttaatggcgctagtgttgctggaatgtcgggatacgaggcatatattgtgagccataacatgcttctagcgcacgcagaagcagtggaagtgtttagaaaatgtgaccatattaaaaacggacaaattgggattgcgcataatccactttggtacgagccatatgatccgagtgatccagatgatgtcgaaggatgtaatcgagctatggacttcatgcttggttggcatcagcatccgactgcttgtggagactatccagaaacgatgaagaaatcagttggagatagattaccgagttttacaccagaacaatctaagaaacttataggctcttgcgattacgttggtataaactactatagctcgcttttcgtgaagagtatcaaacacgtggatcctacgcaacctacttggagaactgaccaaggcgttgattggatgaaaaccaacatagatgggaaacaaatagcaaaacaaggaggatcagagtggagtttcacatatccaacaggactcagaaacattttgaagtatgtgaaaaaaacttatggcaatcctcccattctcataactgaaaacgggtatggtgaagtagcggaacagagtcagagtctttatatgtacaatccttcaatcgacacagagagattggagtacattgaaggacatatccacgctattcatcaagccatccatgaagatggagtaagagtggaaggttattacgtatggtcattgctagataacttcgagtggaacagtggatatggtgtgagatatggtttatattacattgattacaaagatgggcttagacgatacccgaaaatgtcggcgttatggttgaaagagttcttgaggtttgatcaagaagacgattcttcgacgtctaagaaagaagagaagaaagagagctatggaaaacagttattgcattctgttcaggacagtcaatttgttcattcgattaaagacagtggtgcgttacctgcggttttggggagcttgttcgttgtgtctgcaactgttggtacttctctgttcttcaaaggagctaataattgaaacagaagaaacaaaattttaaaaaattgttgggatttgttgttgttcttgaaagattgaaaaagaactatgtgatactttgtactattcttttctataatttattgtgtgttttgttattgaaaacttgtgtggtctattagttg

SEQ ID NO: 3674 - protein, 560 aa, Arabidopsis thaliana
  peptide (1)..(560): Ceres Seq. ID no. 13574948
  misc_feature (1)..(560): NCBI GI NO: 15224886 NR Description: glycosyl hydrolase family 1 [Arabidopsis thaliana]
  misc_feature (13)..(515): NCBI GI NO: 15232260 NR Description: glycosyl hydrolase family 1 [Arabidopsis thaliana]
  misc_feature (10)..(492): NCBI GI NO: 25289457 NR Description: probable beta-glucosidase (EC 3.2.1.21) ATA27
  misc_feature (10)..(492): NCBI GI NO: 15222905 NR Description: glycosyl hydrolase family 1, beta-glucosidase
  misc_feature (10)..(492): NCBI GI NO: 25404995 NR Description: protein T4O12.15 [imported] - Arabidopsis thaliana
  misc_feature (16)..(492): NCBI GI NO: 18377977 NR Description: putative beta-glucosidase [Arabidopsis thaliana]
  misc_feature (9)..(507): NCBI GI NO: 15232626 NR Description: glycosyl hydrolase family 1 [Arabidopsis thaliana]
  misc_feature (16)..(493): NCBI GI NO: 22327030 NR Description: glycosyl hydrolase family 1 [Arabidopsis thaliana]
  misc_feature (9)..(507): NCBI GI NO: 22331243 NR Description: glycosyl hydrolase family 1 [Arabidopsis thaliana]
  misc_feature (9)..(507): NCBI GI NO: 1363489 NR Description: thioglucosidase (EC 3
MAHLQRTFPTEMSKGRASFPKGFLFGTASSSYQYEGAVNEGARGQSVWDHFSNRFPHRISDSSDGNVAVDFYHRYKEDIKRMKDINMDSFRLSIAWPRVLPYGKRDRGVSEEGIKFYNDVIDELLANEITPLVTIFHWDIPQDLEDEYGGFLSEQIIDDFRDYASLCFERFGDRVSLWCTMNEPWVYSVAGYDTGRKAPGRCSKYVNGASVAGMSGYEAYIVSHNMLLAHAEAVEVFRKCDHIKNGQIGIAHNPLWYEPYDPSDPDDVEGCNRAMDFMLGWHQHPTACGDYPETMKKSVGDRLPSFTPEQSKKLIGSCDYVGINYYSSLFVKSIKHVDPTQPTWRTDQGVDWMKTNIDGKQIAKQGGSEWSFTYPTGLRNILKYVKKTYGNPPILITENGYGEVAEQSQSLYMYNPSIDTERLEYIEGHIHAIHQAIHEDGVRVEGYYVWSLLDNFEWNSGYGVRYGLYYIDYKDGLRRYPKMSALWLKEFLRFDQEDDSSTSKKEEKKESYGKQLLHSVQDSQFVHSIKDSGALPAVLGSLFVVSATVGTSLFFKGANN

SEQ ID NO: 3675 - protein, 549 aa, Arabidopsis thaliana
  peptide (1)..(549): Ceres Seq. ID no. 13574949
  misc_feature (1)..(549): NCBI GI NO: 15224886 NR Description: glycosyl hydrolase family 1 [Arabidopsis thaliana]
  misc_feature (2)..(504): NCBI GI NO: 15232260 NR Description: glycosyl hydrolase family 1 [Arabidopsis thaliana]
  misc_feature (1)..(481): NCBI GI NO: 25289457 NR Description: probable beta-glucosidase (EC 3.2.1.21) ATA27
  misc_feature (1)..(481): NCBI GI NO: 15222905 NR Description: glycosyl hydrolase family 1, beta-glucosidase
  misc_feature (1)..(481): NCBI GI NO: 25404995 NR Description: protein T4O12.15 [imported] - Arabidopsis thaliana
  misc_feature (5)..(481): NCBI GI NO: 18377977 NR Description: putative beta-glucosidase [Arabidopsis thaliana]
  misc_feature (1)..(496): NCBI GI NO: 15232626 NR Description: glycosyl hydrolase family 1 [Arabidopsis thaliana]
  misc_feature (5)..(482): NCBI GI NO: 22327030 NR Description: glycosyl hydrolase family 1 [Arabidopsis thaliana]
  misc_feature (1)..(496): NCBI GI NO: 22331243 NR Description: glycosyl hydrolase family 1 [Arabidopsis thaliana]
  misc_feature (1)..(496): NCBI GI NO: 1363489 NR Description: thioglucosidase (EC 3
MSKGRASFPKGFLFGTASSSYQYEGAVNEGARGQSVWDHFSNRFPHRISDSSDGNVAVDFYHRYKEDIKRMKDINMDSFRLSIAWPRVLPYGKRDRGVSEEGIKFYNDVIDELLANEITPLVTIFHWDIPQDLEDEYGGFLSEQIIDDFRDYASLCFERFGDRVSLWCTMNEPWVYSVAGYDTGRKAPGRCSKYVNGASVAGMSGYEAYIVSHNMLLAHAEAVEVFRKCDHIKNGQIGIAHNPLWYEPYDPSDPDDVEGCNRAMDFMLGWHQHPTACGDYPETMKKSVGDRLPSFTPEQSKKLIGSCDYVGINYYSSLFVKSIKHVDPTQPTWRTDQGVDWMKTNIDGKQIAKQGGSEWSFTYPTGLRNILKYVKKTYGNPPILITENGYGEVAEQSQSLYMYNPSIDTERLEYIEGHIHAIHQAIHEDGVRVEGYYVWSLLDNFEWNSGYGVRYGLYYIDYKDGLRRYPKMSALWLKEFLRFDQEDDSSTSKKEEKKESYGKQLLHSVQDSQFVHSIKDSGALPAVLGSLFVVSATVGTSLFFKGANN

SEQ ID NO: 3676 - protein, 479 aa, Arabidopsis thaliana
  peptide (1)..(479): Ceres Seq. ID no. 13574950
  misc_feature (1)..(479): NCBI GI NO: 15224886 NR Description: glycosyl hydrolase family 1 [Arabidopsis thaliana]
  misc_feature (1)..(434): NCBI GI NO: 15232260 NR Description: glycosyl hydrolase family 1 [Arabidopsis thaliana]
  misc_feature (1)..(411): NCBI GI NO: 25289457 NR Description: probable beta-glucosidase (EC 3.2.1.21) ATA27
  misc_feature (1)..(411): NCBI GI NO: 15222905 NR Description: glycosyl hydrolase family 1, beta-glucosidase
  misc_feature (1)..(411): NCBI GI NO: 25404995 NR Description: protein T4O12.15 [imported] - Arabidopsis thaliana
  misc_feature (1)..(411): NCBI GI NO: 18377977 NR Description: putative beta-glucosidase [Arabidopsis thaliana]
  misc_feature (1)..(426): NCBI GI NO: 15232626 NR Description: glycosyl hydrolase family 1 [Arabidopsis thaliana]
  misc_feature (1)..(412): NCBI GI NO: 22327030 NR Description: glycosyl hydrolase family 1 [Arabidopsis thaliana]
  misc_feature (1)..(426): NCBI GI NO: 22331243 NR Description: glycosyl hydrolase family 1 [Arabidopsis thaliana]
  misc_feature (1)..(426): NCBI GI NO: 1363489 NR Description: thioglucosidase (EC 3
MKDINMDSFRLSIAWPRVLPYGKRDRGVSEEGIKFYNDVIDELLANEITPLVTIFHWDIPQDLEDEYGGFLSEQIIDDFRDYASLCFERFGDRVSLWCTMNEPWVYSVAGYDTGRKAPGRCSKYVNGASVAGMSGYEAYIVSHNMLLAHAEAVEVFRKCDHIKNGQIGIAHNPLWYEPYDPSDPDDVEGCNRAMDFMLGWHQHPTACGDYPETMKKSVGDRLPSFTPEQSKKLIGSCDYVGINYYSSLFVKSIKHVDPTQPTWRTDQGVDWMKTNIDGKQIAKQGGSEWSFTYPTGLRNILKYVKKTYGNPPILITENGYGEVAEQSQSLYMYNPSIDTERLEYIEGHIHAIHQAIHEDGVRVEGYYVWSLLDNFEWNSGYGVRYGLYYIDYKDGLRRYPKMSALWLKEFLRFDQEDDSSTSKKEEKKESYGKQLLHSVQDSQFVHSIKDSGALPAVLGSLFVVSATVGTSLFFKGANN

SEQ ID NO: 3677 - DNA, 2028 bp, Arabidopsis thaliana
  misc_feature (1)..(2028): Ceres Seq. ID no. 13492917
  misc_feature (1291)..(1291): n is a, c, t, g, unknown, or other
atttttgtaatctggctctataattgtctctgtttgctgctactctcgagcttggttgacgcggatcaggccaacatagattgcttaaggacctttaaatctcaagtagaggatccaaatagatatttatcgacttgggtttttggcaacgagactgctggttatatctgcaagttcagtggtgtgacttgttggcatgatgatgagaatagggttttgagtattaagctatctggttatggtcttagaggagtgtttcctcctgcggttaagctatgtgctgatctcactggtttagatctttctagaaacaacttctctggacctttaccagccaacattagcaccttgattccacttgttacgattctagacctctcctacaatagcttctctggtgaaatccctatgttgatctccaacattacctttttgaacactcttatgcttcagcataaccagttcacgggtactcttcctccccagctagcgcaacttggacggctcaaaacattctctgtgtctgacaatcgtctcgttggtcctatcccaaatttcaaccaaaccttgcagtttaagcaggaattgtttgctaataacctggatctgtgtggtaagcctctagatgactgtaagagtgcttctagctctcgtggtaaagttgttattatagcggcagttggtggactgactgcagcagcattagtcgttggggttgttttgttcttctatttccgtaaattgggtgctgttcggaagaagcaggatgatcctgaaggaaacagatgggcaaagagcttgaaaggacagaaaggtgttaaggttttcatgtttaagaaatcggtttcaaagatgaaattaagcgatcttatgaaggcaacagaggaattcaagaaagataatatcattgcaacaggaagaacaggaactatgtacaaaggtaggcttgaagacgggtctctacttatgataaagaggttgcaggattctcaacgctctgagaaagagtttgatgcagagatgaagactttgggctctgttaaaaacagaaacttagtccctctcttgggctattgtgttgccaataaggagaggcttctaatgtatgagtacatggcaaacggttacctttatgatcagttacatcctgcagatgaagaatccttcaagcccttggattggccttcaaggctgaaaatcgcgattgggacggcaaaaggattggcatggcttcatcatagctgcaacccgagaatcatccatcgcaacataagctcgaaatgcatattgntgactgcagagtttgagccaaagatctcggatttcggtctagctaggctgatgaacccaattgatacccatttaagcacattcgtcaatggagaatttggggatttcggttatgttgctcccgagtattcaagaaccatggttgcaactccaaaaggagatgtctacagcttcggtgttgtgcttctagagctagtaacgggccaaaaagcaacgagtgtaacaaaagtatctgaagaaaaagctgaggaagaaaacttcaagggtaacctcgtggaatggattacaaagctatcaagtgaatcaaaactgcaggaagcaatcgacaggtccttacttgggaacggtgtggatgatgaaatcttcaaagtactcaaagtagcatgcaactgcgttctaccggaaatagcaaagcagaggccaaccatgtttgaagtttatcagcttctaagagccattggagagagctacaacttcaccgccgatgatgatatcttaatcccatctgaatcaggtgaaggcgatttcattgaagagctcatagttgctcgttgatcaagaggaagggtaagaattgtgaaacaaacatctctagtcgtagcagtccaaagatatatataatgtataagtattgtttttattttatttttgggttctcgtcgtcgatggtgtgttgtaatatgatatattgttagatgcactctcttattactatgtactaagctttgggtgtgtggc

SEQ ID NO: 3678 - protein, 614 aa, Arabidopsis thaliana
  peptide (1)..(614): Ceres Seq. ID no. 13492918
  misc_feature (10)..(594): NCBI GI NO: 15223445 NR Description: leucine-rich repeat transmembrane protein kinase
  misc_feature (2)..(594): NCBI GI NO: 15233004 NR Description: leucine-rich repeat transmembrane protein kinase
  misc_feature (12)..(592): NCBI GI NO: 15222519 NR Description: leucine-rich repeat transmembrane protein kinase
  misc_feature (25)..(605): NCBI GI NO: 38344230 NR Description: OJ991113_30.7
  misc_feature (96)..(592): NCBI GI NO: 25406019 NR Description: hypothetical protein F20P5.27
  misc_feature (261)..(583): NCBI GI NO: 38423526 NR Description: putative brassinosteroid-insensitive protein 1
  misc_feature (67)..(213): NCBI GI NO: 38423526 NR Description: putative brassinosteroid-insensitive protein 1
  misc_feature (263)..(583): NCBI GI NO: 34910644 NR Description: putative brassinosteroid-insensitive protein BRI1
  misc_feature (59)..(213): NCBI GI NO: 34910644 NR Description: putative brassinosteroid-insensitive protein BRI1
  misc_feature (74)..(184): NCBI GI NO: 38423526 NR Description: putative brassinosteroid-insensitive protein 1
  misc_feature (431)..(431): Xaa is any aa, unknown or other
IFVIWLYNCLCLLLLSSLVDADQANIDCLRTFKSQVEDPNRYLSTWVFGNETAGYICKFSGVTCWHDDENRVLSIKLSGYGLRGVFPPAVKLCADLTGLDLSRNNFSGPLPANISTLIPLVTILDLSYNSFSGEIPMLISNITFLNTLMLQHNQFTGTLPPQLAQLGRLKTFSVSDNRLVGPIPNFNQTLQFKQELFANNLDLCGKPLDDCKSASSSRGKVVIIAAVGGLTAAALVVGVVLFFYFRKLGAVRKKQDDPEGNRWAKSLKGQKGVKVFMFKKSVSKMKLSDLMKATEEFKKDNIIATGRTGTMYKGRLEDGSLLMIKRLQDSQRSEKEFDAEMKTLGSVKNRNLVPLLGYCVANKERLLMYEYMANGYLYDQLHPADEESFKPLDWPSRLKIAIGTAKGLAWLHHSCNPRIIHRNISSKCILXTAEFEPKISDFGLARLMNPIDTHLSTFVNGEFGDFGYVAPEYSRTMVATPKGDVYSFGVVLLELVTGQKATSVTKVSEEKAEEENFKGNLVEWITKLSSESKLQEAIDRSLLGNGVDDEIFKVLKVACNCVLPEIAKQRPTMFEVYQLLRAIGESYNFTADDDILIPSESGEGDFIEELIVAR

SEQ ID NO: 3679 - protein, 478 aa, Arabidopsis thaliana
  peptide (1)..(478): Ceres Seq. ID no. 13492919
  misc_feature (1)..(458): NCBI GI NO: 15223445 NR Description: leucine-rich repeat transmembrane protein kinase
  misc_feature (1)..(458): NCBI GI NO: 15233004 NR Description: leucine-rich repeat transmembrane protein kinase
  misc_feature (1)..(456): NCBI GI NO: 15222519 NR Description: leucine-rich repeat transmembrane protein kinase
  misc_feature (1)..(469): NCBI GI NO: 38344230 NR Description: OJ991113_30.7
  misc_feature (1)..(456): NCBI GI NO: 25406019 NR Description: hypothetical protein F20P5.27
  misc_feature (125)..(447): NCBI GI NO: 38423526 NR Description: putative brassinosteroid-insensitive protein 1
  misc_feature (1)..(77): NCBI GI NO: 38423526 NR Description: putative brassinosteroid-insensitive protein 1
  misc_feature (127)..(447): NCBI GI NO: 34910644 NR Description: putative brassinosteroid-insensitive protein BRI1
  misc_feature (1)..(77): NCBI GI NO: 34910644 NR Description: putative brassinosteroid-insensitive protein BRI1
  misc_feature (1)..(48): NCBI GI NO: 38423526 NR Description: putative brassinosteroid-insensitive protein 1
  misc_feature (295)..(295): Xaa is any aa, unknown or other
MLISNITFLNTLMLQHNQFTGTLPPQLAQLGRLKTFSVSDNRLVGPIPNFNQTLQFKQELFANNLDLCGKPLDDCKSASSSRGKVVIIAAVGGLTAAALVVGVVLFFYFRKLGAVRKKQDDPEGNRWAKSLKGQKGVKVFMFKKSVSKMKLSDLMKATEEFKKDNIIATGRTGTMYKGRLEDGSLLMIKRLQDSQRSEKEFDAEMKTLGSVKNRNLVPLLGYCVANKERLLMYEYMANGYLYDQLHPADEESFKPLDWPSRLKIAIGTAKGLAWLHHSCNPRIIHRNISSKCILXTAEFEPKISDFGLARLMNPIDTHLSTFVNGEFGDFGYVAPEYSRTMVATPKGDVYSFGVVLLELVTGQKATSVTKVSEEKAEEENFKGNLVEWITKLSSESKLQEAIDRSLLGNGVDDEIFKVLKVACNCVLPEIAKQRPTMFEVYQLLRAIGESYNFTADDDILIPSESGEGDFIEELIVAR

SEQ ID NO: 3680 - protein, 466 aa, Arabidopsis thaliana
  peptide (1)..(466): Ceres Seq. ID no. 13492920
  misc_feature (1)..(446): NCBI GI NO: 15223445 NR Description: leucine-rich repeat transmembrane protein kinase
  misc_feature (1)..(446): NCBI GI NO: 15233004 NR Description: leucine-rich repeat transmembrane protein kinase
  misc_feature (1)..(444): NCBI GI NO: 15222519 NR Description: leucine-rich repeat transmembrane protein kinase
  misc_feature (1)..(457): NCBI GI NO: 38344230 NR Description: OJ991113_30.7
  misc_feature (1)..(444): NCBI GI NO: 25406019 NR Description: hypothetical protein F20P5.27
  misc_feature (113)..(435): NCBI GI NO: 38423526 NR Description: putative brassinosteroid-insensitive protein 1
  misc_feature (1)..(65): NCBI GI NO: 38423526 NR Description: putative brassinosteroid-insensitive protein 1
  misc_feature (115)..(435): NCBI GI NO: 34910644 NR Description: putative brassinosteroid-insensitive protein BRI1
  misc_feature (1)..(65): NCBI GI NO: 34910644 NR Description: putative brassinosteroid-insensitive protein BRI1
  misc_feature (1)..(36): NCBI GI NO: 38423526 NR Description: putative brassinosteroid-insensitive protein 1
  misc_feature (283)..(283): Xaa is any aa, unknown or other
MLQHNQFTGTLPPQLAQLGRLKTFSVSDNRLVGPIPNFNQTLQFKQELFANNLDLCGKPLDDCKSASSSRGKVVIIAAVGGLTAAALVVGVVLFFYFRKLGAVRKKQDDPEGNRWAKSLKGQKGVKVFMFKKSVSKMKLSDLMKATEEFKKDNIIATGRTGTMYKGRLEDGSLLMIKRLQDSQRSEKEFDAEMKTLGSVKNRNLVPLLGYCVANKERLLMYEYMANGYLYDQLHPADEESFKPLDWPSRLKIAIGTAKGLAWLHHSCNPRIIHRNISSKCILXTAEFEPKISDFGLARLMNPIDTHLSTFVNGEFGDFGYVAPEYSRTMVATPKGDVYSFGVVLLELVTGQKATSVTKVSEEKAEEENFKGNLVEWITKLSSESKLQEAIDRSLLGNGVDDEIFKVLKVACNCVLPEIAKQRPTMFEVYQLLRAIGESYNFTADDDILIPSESGEGDFIEELIVAR

SEQ ID NO: 3681 - DNA, 2019 bp, Arabidopsis thaliana
  misc_feature (1)..(2019): Ceres Seq. ID no. 12328728
gtaaatcaaaagagaactaaaccaagaaacaaaatgggatacgaaaggctcggaccatccggagcaactggttcggtcaccacctccactactacagctccaatccttaaccaagtctccacgtcagaacaaccggagaacaacaaccgaagaagcaaaaagaagcttgtagtatcatctatcgtcttagccatctcacttatcctcgccgccgcgatcttcgccggagtcagatcacgtctcaagttaaaccaatcagtcccaggcctagctcgtaaaccgagtcaagcaatctctaaagcttgtgagttaactcgtttccccgagttatgcgttgactcactcatggactttcccggctcactcgccgcttcctcctctaaagatctcatccacgtgactgtgaacatgacgctccaccacttcagccacgctctctactcgtctgcttccctctccttcgtcgacatgccgccacgtgctcgctcagcttacgactcttgcgtcgagctacttgacgattccgttgacgcgctatcacgcgctctttcctccgtcgtatcctcctccgctaagccgcaagatgttacaacgtggcttagcgcggctttaacaaaccatgacacgtgtactgaaggattcgacggcgtcgacgacggtggagtgaaggatcatatgacggcggcgttacagaatctttctgagcttgttagtaactgtcttgctatattctcggcgagtcacgacggtgacgatttcgccggagttccaatacagaacaggaggctgctgggagtggaggaacgagaagagaaattcccgagatggatgagaccaaaagaacgcgagatactggaaatgccggtatctcagatacaagctgatattatcgtatcgaaagacggtaacggcacgtgcaaaactatatcggaagctatcaagaaagctcctcagaacagtactcgccggataattatctacgtcaaggccggaagatatgaagagaacaacctcaaggtcggtaggaaaaaaattaatttgatgttcgttggagatggcaagggtaaaactgttatttcgggaggcaaaagtatatttgacaacatcactactttccacacggcgtcatttgctgcgaccggagctggatttattgcaagggacatcacattcgaaaactgggccggtccagcgaagcaccaagccgtggctctccgcatcggagctgaccacgcagtgatctaccgatgcaatataatcggttaccaagacacactctacgtccattcaaaccgccaattctttcgtgaatgcgatatctacggtacagtcgattttatctttggtaacgcagccgtcgtactacaaaactgtagcatctacgcacggaagccaatggattttcagaaaaatacaatcacggctcaaaacagaaaagatccgaaccaaaacaccggaatatcaatacatgcgtctagggttcttgcagcatccgatctccaagcgacaaacggtagtacacagacgtatctaggccgaccttggaagctattctctaggacagtgtatatgatgtcgtatatcggtggtcatgtacacacgagaggttggctcgagtggaacacaacatttgctttagatactttgtattacggagagtatttgaacagtggacctgggtcgggtctcgggcaacgtgtgagctggccgggttatcgggtcatcaattcgacggccgaggcaaaccggttcactgtggcagaatttatatacggttcctcgtggttgccatcgaccggagtttcgttcttggccggattaagcatataggtagagaaaaaattgaaatgcttatttttccgatgaattgtttcattcttacggtccttatattaatggacatatcagtattccaatatatatgagtatattttaactttaattgtaatgtctccactctccagaggtattattcaataatagatgaacactcgaggataattttcccttgttttcttg

SEQ ID NO: 3682 - protein, 609 aa, Arabidopsis thaliana
  peptide (1)..(609): Ceres Seq. ID no. 12328729
  misc_feature (295)..(594): Pfam Name: Pfam Description:  Pectinesterase
  misc_feature (12)..(608): NCBI GI NO: 15238729 NR Description: pectinesterase; protein id: At5g53370
  misc_feature (195)..(609): NCBI GI NO: 34904380 NR Description: unnamed protein product
  misc_feature (48)..(221): NCBI GI NO: 34904380 NR Description: unnamed protein product
  misc_feature (40)..(607): NCBI GI NO: 2098711 NR Description: pectinesterase [Citrus sinensis]
  misc_feature (40)..(607): NCBI GI NO: 6174912 NR Description: Pectinesterase 1
  misc_feature (48)..(607): NCBI GI NO: 8671350 NR Description: pectin methylesterase [Nicotiana tabacum]
  misc_feature (48)..(607): NCBI GI NO: 29602797 NR Description: pectin methyl-esterase [Nicotiana benthamiana]
  misc_feature (97)..(608): NCBI GI NO: 34393863 NR Description: putative pectinesterase
  misc_feature (356)..(608): NCBI GI NO: 38566730 NR Description: pectin methylesterase [Cicer arietinum]
  misc_feature (53)..(607): NCBI GI NO: 6689892 NR Description: pectin methyl esterase [Solanum tuberosum]
VNQKRTKPRNKMGYERLGPSGATGSVTTSTTTAPILNQVSTSEQPENNNRRSKKKLVVSSIVLAISLILAAAIFAGVRSRLKLNQSVPGLARKPSQAISKACELTRFPELCVDSLMDFPGSLAASSSKDLIHVTVNMTLHHFSHALYSSASLSFVDMPPRARSAYDSCVELLDDSVDALSRALSSVVSSSAKPQDVTTWLSAALTNHDTCTEGFDGVDDGGVKDHMTAALQNLSELVSNCLAIFSASHDGDDFAGVPIQNRRLLGVEEREEKFPRWMRPKEREILEMPVSQIQADIIVSKDGNGTCKTISEAIKKAPQNSTRRIIIYVKAGRYEENNLKVGRKKINLMFVGDGKGKTVISGGKSIFDNITTFHTASFAATGAGFIARDITFENWAGPAKHQAVALRIGADHAVIYRCNIIGYQDTLYVHSNRQFFRECDIYGTVDFIFGNAAVVLQNCSIYARKPMDFQKNTITAQNRKDPNQNTGISIHASRVLAASDLQATNGSTQTYLGRPWKLFSRTVYMMSYIGGHVHTRGWLEWNTTFALDTLYYGEYLNSGPGSGLGQRVSWPGYRVINSTAEANRFTVAEFIYGSSWLPSTGVSFLAGLSI

SEQ ID NO: 3683 - protein, 598 aa, Arabidopsis thaliana
  peptide (1)..(598): Ceres Seq. ID no. 12328730
  misc_feature (284)..(583): Pfam Name: Pfam Description:  Pectinesterase
  misc_feature (1)..(597): NCBI GI NO: 15238729 NR Description: pectinesterase; protein id: At5g53370
  misc_feature (184)..(598): NCBI GI NO: 34904380 NR Description: unnamed protein product
  misc_feature (37)..(210): NCBI GI NO: 34904380 NR Description: unnamed protein product
  misc_feature (29)..(596): NCBI GI NO: 2098711 NR Description: pectinesterase [Citrus sinensis]
  misc_feature (29)..(596): NCBI GI NO: 6174912 NR Description: Pectinesterase 1
  misc_feature (37)..(596): NCBI GI NO: 8671350 NR Description: pectin methylesterase [Nicotiana tabacum]
  misc_feature (37)..(596): NCBI GI NO: 29602797 NR Description: pectin methyl-esterase [Nicotiana benthamiana]
  misc_feature (86)..(597): NCBI GI NO: 34393863 NR Description: putative pectinesterase
  misc_feature (345)..(597): NCBI GI NO: 38566730 NR Description: pectin methylesterase [Cicer arietinum]
  misc_feature (42)..(596): NCBI GI NO: 6689892 NR Description: pectin methyl esterase [Solanum tuberosum]
MGYERLGPSGATGSVTTSTTTAPILNQVSTSEQPENNNRRSKKKLVVSSIVLAISLILAAAIFAGVRSRLKLNQSVPGLARKPSQAISKACELTRFPELCVDSLMDFPGSLAASSSKDLIHVTVNMTLHHFSHALYSSASLSFVDMPPRARSAYDSCVELLDDSVDALSRALSSVVSSSAKPQDVTTWLSAALTNHDTCTEGFDGVDDGGVKDHMTAALQNLSELVSNCLAIFSASHDGDDFAGVPIQNRRLLGVEEREEKFPRWMRPKEREILEMPVSQIQADIIVSKDGNGTCKTISEAIKKAPQNSTRRIIIYVKAGRYEENNLKVGRKKINLMFVGDGKGKTVISGGKSIFDNITTFHTASFAATGAGFIARDITFENWAGPAKHQAVALRIGADHAVIYRCNIIGYQDTLYVHSNRQFFRECDIYGTVDFIFGNAAVVLQNCSIYARKPMDFQKNTITAQNRKDPNQNTGISIHASRVLAASDLQATNGSTQTYLGRPWKLFSRTVYMMSYIGGHVHTRGWLEWNTTFALDTLYYGEYLNSGPGSGLGQRVSWPGYRVINSTAEANRFTVAEFIYGSSWLPSTGVSFLAGLSI

SEQ ID NO: 3684 - protein, 494 aa, Arabidopsis thaliana
  peptide (1)..(494): Ceres Seq. ID no. 12328731
  misc_feature (180)..(479): Pfam Name: Pfam Description:  Pectinesterase
  misc_feature (1)..(493): NCBI GI NO: 15238729 NR Description: pectinesterase; protein id: At5g53370
  misc_feature (80)..(494): NCBI GI NO: 34904380 NR Description: unnamed protein product
  misc_feature (1)..(106): NCBI GI NO: 34904380 NR Description: unnamed protein product
  misc_feature (1)..(492): NCBI GI NO: 2098711 NR Description: pectinesterase [Citrus sinensis]
  misc_feature (1)..(492): NCBI GI NO: 6174912 NR Description: Pectinesterase 1
  misc_feature (1)..(492): NCBI GI NO: 8671350 NR Description: pectin methylesterase [Nicotiana tabacum]
  misc_feature (1)..(492): NCBI GI NO: 29602797 NR Description: pectin methyl-esterase [Nicotiana benthamiana]
  misc_feature (1)..(493): NCBI GI NO: 34393863 NR Description: putative pectinesterase
  misc_feature (241)..(493): NCBI GI NO: 38566730 NR Description: pectin methylesterase [Cicer arietinum]
  misc_feature (1)..(492): NCBI GI NO: 6689892 NR Description: pectin methyl esterase [Solanum tuberosum]
MDFPGSLAASSSKDLIHVTVNMTLHHFSHALYSSASLSFVDMPPRARSAYDSCVELLDDSVDALSRALSSVVSSSAKPQDVTTWLSAALTNHDTCTEGFDGVDDGGVKDHMTAALQNLSELVSNCLAIFSASHDGDDFAGVPIQNRRLLGVEEREEKFPRWMRPKEREILEMPVSQIQADIIVSKDGNGTCKTISEAIKKAPQNSTRRIIIYVKAGRYEENNLKVGRKKINLMFVGDGKGKTVISGGKSIFDNITTFHTASFAATGAGFIARDITFENWAGPAKHQAVALRIGADHAVIYRCNIIGYQDTLYVHSNRQFFRECDIYGTVDFIFGNAAVVLQNCSIYARKPMDFQKNTITAQNRKDPNQNTGISIHASRVLAASDLQATNGSTQTYLGRPWKLFSRTVYMMSYIGGHVHTRGWLEWNTTFALDTLYYGEYLNSGPGSGLGQRVSWPGYRVINSTAEANRFTVAEFIYGSSWLPSTGVSFLAGLSI

SEQ ID NO: 3685 - DNA, 1499 bp, Arabidopsis thaliana
  misc_feature (1)..(1499): Ceres Seq. ID no. 12394512
atttctcaattcccaagttctttatccaaattgttctgaaacatagagagaaacaatgggtgttacaggaggattagtcagaagcattttcttcaggaacaaatcatttggagctcatgactacaacaatggaagaggcaatctaggagagaagaaacgatggagctcggttagatcatacctttgcggagatgaatttaactctgttcgcgctgtgaatgattcagaatcgataaaggattctgaggctcttcttacaatgtctcagcaactgagttcagagttcggtatgccttttggttcggttatcgcaatcgaagattcagcttctgtgagacatttggaggatgaggactctggttccgttaagagctctgaggcacagtgactcaacctttactggaggagaaatcgaaaggactggattgttatctaaaagaagaagatgttgaagataaccaaagcgaagcaacagagacacacatacccaagaagcatcagactactccaatctccaagttgttcctcgaagaagacgctgcagtcataattcagtcagcattcaggagttacctggcaatacgccggagcaaagaagaagaggaaacatttgctaaggaggagagcttctcaggagaggaatctcaagacaatgcatccatggggacatcactagaagctcagacaggtaattccgtgaaagcaccatttttcaggagaaagcgagtatctgcgaatcgaagaacactacagaagaacaacactcaagttctgaggataaaggaagactgggatgatagtacagtgagcagcaccatatcaaaatcaaggattcaaagcagagtcgaagcaatgacaaaacgggagagagcacttgcgtatgcattttcacagcagctaagaatttgctcaaagaagaaacaaatagatcgtagcagtgaagatgattccaatatcggttggagttggttagaacgctggatggcaacccgtgtaccagacagcattccaattgaaccaagaacagatgttgcaacgaaaaatcaaagcttgataagaaagaatagagcttttggtacagctggcgagttggagagctgtgcttccaacgacctacctctccattttgaaagcatatcagagacacaaggagatgcaactacagttttgcagaccgaaaaaagtagttttaaaccaagtatatctaagcgtaaatctgttccaagctacaaaagccagagaaagcatcacaagcttcaggccaccaaaagtgatctgcaacaacaaacaaagaaagcaaagaaggccaaaaccacacccacaagctgcaaaacaggaaacgaatgcgaagaaacctcacataagctaaatagcagcacctaagataagcattacctgtaaatctttgcatttaaatcacaaaagtttgttctttcgaatcagataacaactttctgtaaattatttagggattcaaatcaaaccagtaatagtaaggg

SEQ ID NO: 3686 - protein, 240 aa, Arabidopsis thaliana
  peptide (1)..(240): Ceres Seq. ID no. 12394513
  misc_feature (1)..(240): NCBI GI NO: 18421483 NR Description: putative protein; protein id: At5g35670
  misc_feature (1)..(240): NCBI GI NO: 9758640 NR Description: gene_id:MXH1
  misc_feature (1)..(205): NCBI GI NO: 15231175 NR Description: unknown protein; protein id: At3g52290.1
  misc_feature (1)..(226): NCBI GI NO: 15225299 NR Description: putative SF16 protein {Helianthus annuus}
  misc_feature (1)..(240): NCBI GI NO: 15232741 NR Description: putative SF16 protein; protein id: At3g09710.1
  misc_feature (1)..(212): NCBI GI NO: 15982840 NR Description: AT5g03040/F15A17_70 [Arabidopsis thaliana]
  misc_feature (1)..(238): NCBI GI NO: 15231733 NR Description: putative protein; protein id: At3g59690.1
  misc_feature (1)..(115): NCBI GI NO: 18414094 NR Description: putative protein; protein id: At5g03040
  misc_feature (1)..(135): NCBI GI NO: 15225258 NR Description: putative SF16 protein {Helianthus annuus}
  misc_feature (1)..(240): NCBI GI NO: 34903518 NR Description: P0001B06.11
MGTSLEAQTGNSVKAPFFRRKRVSANRRTLQKNNTQVLRIKEDWDDSTVSSTISKSRIQSRVEAMTKRERALAYAFSQQLRICSKKKQIDRSSEDDSNIGWSWLERWMATRVPDSIPIEPRTDVATKNQSLIRKNRAFGTAGELESCASNDLPLHFESISETQGDATTVLQTEKSSFKPSISKRKSVPSYKSQRKHHKLQATKSDLQQQTKKAKKAKTTPTSCKTGNECEETSHKLNSST

SEQ ID NO: 3687 - protein, 176 aa, Arabidopsis thaliana
  peptide (1)..(176): Ceres Seq. ID no. 12394514
  misc_feature (1)..(176): NCBI GI NO: 18421483 NR Description: putative protein; protein id: At5g35670
  misc_feature (1)..(176): NCBI GI NO: 9758640 NR Description: gene_id:MXH1
  misc_feature (1)..(141): NCBI GI NO: 15231175 NR Description: unknown protein; protein id: At3g52290.1
  misc_feature (1)..(162): NCBI GI NO: 15225299 NR Description: putative SF16 protein {Helianthus annuus}
  misc_feature (1)..(176): NCBI GI NO: 15232741 NR Description: putative SF16 protein; protein id: At3g09710.1
  misc_feature (1)..(148): NCBI GI NO: 15982840 NR Description: AT5g03040/F15A17_70 [Arabidopsis thaliana]
  misc_feature (1)..(174): NCBI GI NO: 15231733 NR Description: putative protein; protein id: At3g59690.1
  misc_feature (1)..(51): NCBI GI NO: 18414094 NR Description: putative protein; protein id: At5g03040
  misc_feature (1)..(71): NCBI GI NO: 15225258 NR Description: putative SF16 protein {Helianthus annuus}
  misc_feature (1)..(176): NCBI GI NO: 34903518 NR Description: P0001B06.11
MTKRERALAYAFSQQLRICSKKKQIDRSSEDDSNIGWSWLERWMATRVPDSIPIEPRTDVATKNQSLIRKNRAFGTAGELESCASNDLPLHFESISETQGDATTVLQTEKSSFKPSISKRKSVPSYKSQRKHHKLQATKSDLQQQTKKAKKAKTTPTSCKTGNECEETSHKLNSST

SEQ ID NO: 3688 - protein, 133 aa, Arabidopsis thaliana
  peptide (1)..(133): Ceres Seq. ID no. 12394515
  misc_feature (1)..(133): NCBI GI NO: 18421483 NR Description: putative protein; protein id: At5g35670
  misc_feature (1)..(133): NCBI GI NO: 9758640 NR Description: gene_id:MXH1
  misc_feature (1)..(98): NCBI GI NO: 15231175 NR Description: unknown protein; protein id: At3g52290.1
  misc_feature (1)..(119): NCBI GI NO: 15225299 NR Description: putative SF16 protein {Helianthus annuus}
  misc_feature (1)..(133): NCBI GI NO: 15232741 NR Description: putative SF16 protein; protein id: At3g09710.1
  misc_feature (1)..(105): NCBI GI NO: 15982840 NR Description: AT5g03040/F15A17_70 [Arabidopsis thaliana]
  misc_feature (1)..(131): NCBI GI NO: 15231733 NR Description: putative protein; protein id: At3g59690.1
  misc_feature (1)..(28): NCBI GI NO: 15225258 NR Description: putative SF16 protein {Helianthus annuus}
  misc_feature (1)..(133): NCBI GI NO: 34903518 NR Description: P0001B06.11
  misc_feature (1)..(91): NCBI GI NO: 15233296 NR Description: unknown protein; protein id: At3g22190.1
MATRVPDSIPIEPRTDVATKNQSLIRKNRAFGTAGELESCASNDLPLHFESISETQGDATTVLQTEKSSFKPSISKRKSVPSYKSQRKHHKLQATKSDLQQQTKKAKKAKTTPTSCKTGNECEETSHKLNSST

SEQ ID NO: 3689 - DNA, 1699 bp, Arabidopsis thaliana
  misc_feature (1)..(1699): Ceres Seq. ID no. 13487978
gccgaaccaatcaccctaaggggacacttaaagagagaaacaaatccttcttctaaaatattcttcaatcttcttctcgaagcttctccaaaaatggcgattacttcttctagaaccaccagatcaaacggatctgcttcgctccgatccaaatcaccgtccggtcgattctgtggcgtttactcaaaccgtatgccgtcatcatctccgtcgtcgtcaggtttcgcttcttccacaagctcaagtttctcctcaccgtctacagcgtttttcagcagccacaatcagaacaaccaccaccaacacagatctgcttctccgacgcgtgtgaatctattcacatcagctccgatgacgcaatcgtttcgttactcaatcgataacagatctatatcaccgaatcgatccatcgctgtttcttccaacaaacctagcaatcatcacaagattccggattcgaggagaagatgtatgtgctctccgacaacgcatcctggttcattccggtgtagtctacacaagaacgtcgcgaatccacatggtcaaggtacagcttcgtatacaacgaatggattgaatatgcgtcgatctgcgatgacgaattctcttgtgagaattggtggtgttgaaggtgaatgggtgcgaagagctttgactactttgattagaccatcttcacatcaactaaagagaagatctgcttatgagcctcgtcgtagtagactcgcatctatgtcgaaagcagaagatctttgaatctctcttcaggtttgttcttgtttttgatatactcagatctgccatgaacgagttgaatcaaggagcagaatcggagctgagtcataccggaccgagtcaaattcggagctgagttataccggaccgagttatgtaaaacggtgactaagacgacaccgtttttgttttgttgggtgggagatgagatgatgatgatgcattgtacatacacatattgcttattgaagcagaacaaaaaaatttcgcaagtcgaaagtatctagaaatctaaaaatggaaaatagtagtgacgaattgggtaattaaaatctggaaaaggacttagtagtaaatattgtttggattcaactttgcaaatctctccatctccattgttcgttgccttcaccgttagtttgttccgtcaagtcaacgttctctattctccgtcgttgacccgttctgtttgccgttaaccgtcgtcgtgtgttatgtgtgttccgttattatttctccaggtatgtgttgttcgtcgtgtcaggtatgtattttccgtttcttatttatttggttaatttcgttttactttttttgtgcacgtttgatctgtttttttttttttggtttgtctttttcaggtttcgtacaatgaggagaagatgattacttaaccgttacgttcaactttggaatattttgggtttgtggactttggaagaaaaatgaatttggactatgagaaaaatcaaatatatgacctaaaacacggagaatttgataaaggacgatcgaatatgagtgattttgattcgtggaacgattaaggttttggttttggagctggagaatgtgaaagattcgaaggaatcagatttttctctggaatttgtgaatcacagatttagattcctgaaacggttgaggttaaagtgaaaagattcaatgaaatcatatttttacc

SEQ ID NO: 3690 - protein, 251 aa, Arabidopsis thaliana
  peptide (1)..(251): Ceres Seq. ID no. 13487979
  misc_feature (32)..(251): NCBI GI NO: 15238753 NR Description: serine-rich protein [Arabidopsis thaliana]
  misc_feature (32)..(251): NCBI GI NO: 21618161 NR Description: serine-rich protein [Arabidopsis thaliana]
  misc_feature (32)..(250): NCBI GI NO: 15238947 NR Description: expressed protein [Arabidopsis thaliana]
  misc_feature (32)..(251): NCBI GI NO: 24461857 NR Description: CTV.15 [Poncirus trifoliata]
  misc_feature (79)..(241): NCBI GI NO: 15241329 NR Description: hypothetical protein [Arabidopsis thaliana]
AEPITLRGHLKRETNPSSKIFFNLLLEASPKMAITSSRTTRSNGSASLRSKSPSGRFCGVYSNRMPSSSPSSSGFASSTSSSFSSPSTAFFSSHNQNNHHQHRSASPTRVNLFTSAPMTQSFRYSIDNRSISPNRSIAVSSNKPSNHHKIPDSRRRCMCSPTTHPGSFRCSLHKNVANPHGQGTASYTTNGLNMRRSAMTNSLVRIGGVEGEWVRRALTTLIRPSSHQLKRRSAYEPRRSRLASMSKAEDL

SEQ ID NO: 3691 - protein, 220 aa, Arabidopsis thaliana
  peptide (1)..(220): Ceres Seq. ID no. 13487980
  misc_feature (1)..(220): NCBI GI NO: 15238753 NR Description: serine-rich protein [Arabidopsis thaliana]
  misc_feature (1)..(220): NCBI GI NO: 21618161 NR Description: serine-rich protein [Arabidopsis thaliana]
  misc_feature (1)..(219): NCBI GI NO: 15238947 NR Description: expressed protein [Arabidopsis thaliana]
  misc_feature (1)..(220): NCBI GI NO: 24461857 NR Description: CTV.15 [Poncirus trifoliata]
  misc_feature (48)..(210): NCBI GI NO: 15241329 NR Description: hypothetical protein [Arabidopsis thaliana]
MAITSSRTTRSNGSASLRSKSPSGRFCGVYSNRMPSSSPSSSGFASSTSSSFSSPSTAFFSSHNQNNHHQHRSASPTRVNLFTSAPMTQSFRYSIDNRSISPNRSIAVSSNKPSNHHKIPDSRRRCMCSPTTHPGSFRCSLHKNVANPHGQGTASYTTNGLNMRRSAMTNSLVRIGGVEGEWVRRALTTLIRPSSHQLKRRSAYEPRRSRLASMSKAEDL

SEQ ID NO: 3692 - protein, 187 aa, Arabidopsis thaliana
  peptide (1)..(187): Ceres Seq. ID no. 13487981
  misc_feature (1)..(187): NCBI GI NO: 15238753 NR Description: serine-rich protein [Arabidopsis thaliana]
  misc_feature (1)..(187): NCBI GI NO: 21618161 NR Description: serine-rich protein [Arabidopsis thaliana]
  misc_feature (1)..(186): NCBI GI NO: 15238947 NR Description: expressed protein [Arabidopsis thaliana]
  misc_feature (1)..(187): NCBI GI NO: 24461857 NR Description: CTV.15 [Poncirus trifoliata]
  misc_feature (15)..(177): NCBI GI NO: 15241329 NR Description: hypothetical protein [Arabidopsis thaliana]
MPSSSPSSSGFASSTSSSFSSPSTAFFSSHNQNNHHQHRSASPTRVNLFTSAPMTQSFRYSIDNRSISPNRSIAVSSNKPSNHHKIPDSRRRCMCSPTTHPGSFRCSLHKNVANPHGQGTASYTTNGLNMRRSAMTNSLVRIGGVEGEWVRRALTTLIRPSSHQLKRRSAYEPRRSRLASMSKAEDL

SEQ ID NO: 3693 - DNA, 1376 bp, Arabidopsis thaliana; identical to SEQ ID NO: 2275
  misc_feature (1)..(1376): Ceres Seq. ID no. 13575567

SEQ ID NO: 3694 - protein, 309 aa, Arabidopsis thaliana; identical to SEQ ID NO: 2276
  peptide (1)..(309): Ceres Seq. ID no. 13575568
  misc_feature (1)..(309): NCBI GI NO: 15229043 NR Description: F-box protein family [Arabidopsis thaliana]
  misc_feature (1)..(309): NCBI GI NO: 21618163 NR Description: unknown [Arabidopsis thaliana]
  misc_feature (111)..(309): NCBI GI NO: 37535806 NR Description: putative Rhizobium-induced nodule development associatedprotein
  misc_feature (59)..(307): NCBI GI NO: 15234238 NR Description: F-box protein family [Arabidopsis thaliana]
  misc_feature (4)..(63): NCBI GI NO: 15234238 NR Description: F-box protein family [Arabidopsis thaliana]
  misc_feature (1)..(231): NCBI GI NO: 18412953 NR Description: F-box protein family, AtFBL9/AtFBL23
  misc_feature (12)..(222): NCBI GI NO: 37718854 NR Description: hypothetical protein
  misc_feature (1)..(231): NCBI GI NO: 18412951 NR Description: F-box protein family, AtFBL22
  misc_feature (11)..(231): NCBI GI NO: 30692594 NR Description: predicted protein [Arabidopsis thaliana]
  misc_feature (13)..(231): NCBI GI NO: 18424042 NR Description: SKP1 interacting partner 1 (SKIP1)

SEQ ID NO: 3695 - protein, 248 aa, Arabidopsis thaliana; identical to SEQ ID NO: 2277
  peptide (1)..(248): Ceres Seq. ID no. 13575569
  misc_feature (1)..(248): NCBI GI NO: 15229043 NR Description: F-box protein family [Arabidopsis thaliana]
  misc_feature (1)..(248): NCBI GI NO: 21618163 NR Description: unknown [Arabidopsis thaliana]
  misc_feature (50)..(248): NCBI GI NO: 37535806 NR Description: putative Rhizobium-induced nodule development associatedprotein
  misc_feature (1)..(246): NCBI GI NO: 15234238 NR Description: F-box protein family [Arabidopsis thaliana]
  misc_feature (1)..(170): NCBI GI NO: 18412953 NR Description: F-box protein family, AtFBL9/AtFBL23
  misc_feature (1)..(161): NCBI GI NO: 37718854 NR Description: hypothetical protein
  misc_feature (1)..(170): NCBI GI NO: 18412951 NR Description: F-box protein family, AtFBL22
  misc_feature (1)..(170): NCBI GI NO: 30692594 NR Description: predicted protein [Arabidopsis thaliana]
  misc_feature (1)..(170): NCBI GI NO: 18424042 NR Description: SKP1 interacting partner 1 (SKIP1)
  misc_feature (1)..(170): NCBI GI NO: 18413178 NR Description: F-box protein family, AtFBW2

SEQ ID NO: 3696 - protein, 217 aa, Arabidopsis thaliana; identical to SEQ ID NO: 2278
  peptide (1)..(217): Ceres Seq. ID no. 13575570
  misc_feature (1)..(217): NCBI GI NO: 15229043 NR Description: F-box protein family [Arabidopsis thaliana]
  misc_feature (1)..(217): NCBI GI NO: 21618163 NR Description: unknown [Arabidopsis thaliana]
  misc_feature (19)..(217): NCBI GI NO: 37535806 NR Description: putative Rhizobium-induced nodule development associatedprotein
  misc_feature (1)..(215): NCBI GI NO: 15234238 NR Description: F-box protein family [Arabidopsis thaliana]
  misc_feature (1)..(139): NCBI GI NO: 18412953 NR Description: F-box protein family, AtFBL9/AtFBL23
  misc_feature (1)..(130): NCBI GI NO: 37718854 NR Description: hypothetical protein
  misc_feature (1)..(139): NCBI GI NO: 18412951 NR Description: F-box protein family, AtFBL22
  misc_feature (1)..(139): NCBI GI NO: 30692594 NR Description: predicted protein [Arabidopsis thaliana]
  misc_feature (1)..(139): NCBI GI NO: 18424042 NR Description: SKP1 interacting partner 1 (SKIP1)
  misc_feature (1)..(139): NCBI GI NO: 18413178 NR Description: F-box protein family, AtFBW2

SEQ ID NO: 3697 - DNA, 2315 bp, Arabidopsis thaliana
  misc_feature (1)..(2315): Ceres Seq. ID no. 12562127
caaaaaccaaaatcacaatcgaagaaatcttttgaaagcaaaatggaagagatttcgacggatccggttgttccagcggtgaaacctgacccgagaacatcttcagttggtgaaggtgctaatcgtcatgaaaatgacgacggaggaagcggcggttctgagattggagcaccggatctggataaagacttgctttgtccgatttgtatgcagattattaaagatgctttcctcacggcttgtggtcatagtttctgctatatgtgtatcatcacacatcttaggaacaagagtgattgtccctgttgtagccaacacctcaccaataatcagctttaccctaatttcttgctcgataagctattgaagaaaacttcagctcggcatgtgtcaaaaactgcatcgcccttggatcagtttcgggaagcactacaaaggggttgtgatgtgtcaattaaggaggttgataatcttctgacacttcttgcggaaaggaagagaaaaatggaacaggaagaagctgagaggaacatgcagatacttttggactttttgcattgtctaaggaagcaaaaagttgatgaactaaatgaggtgcaaactgatctccagtatattaaagaagatataaatgccgttgagagacatagaatagatttataccgagctagggacagatattctgtaaagttgcggatgctcggagatgatccaagcacaagaaatgcatggccacatgagaagaaccagattggtttcaactccaattctctcagcataagaggaggaaattttgtaggcaattatcaaaacaaaaaggtagaggggaaggcacaaggaagctctcatgggctaccaaagaaggatgcgctgagtgggtcagattcgcaaagtttgaatcagtcaactgtctcaatggctagaaagaaacggattcatgctcagttcaatgatttacaagaatgttacctccaaaagcggcgtcagttggcagaccaaccaaatagtaaacaagaaaatgataagagtgtagtacggagggaaggctatagcaacggccttgcagattttcaatctgtgttgactaccttcactcgctacagtcgtctaagagttatagcagaaatccggcatggggatatatttcattcagccaacattgtatcaagcatagagtttgatcgtgatgatgagctgtttgccactgctggtgtttctagatgtataaaggtttttgacttctcttcggttgtaaatgaaccagcagatatgcagtgtccgattgtggagatgtcaactcggtctaaacttagttgcttgagttggaataagcatgaaaaaaatcacatagcaagcagtgattatgaaggaatagtaacagtgtgggatgtaactactaggcagagtcttatggagtatgaagagcacgaaaaacgtgcctggagtgttgacttttcacgaacagaaccatcaatgcttgtatctggtagtgacgactgcaaggttaaagtttggtgcacgaggcaggaagcaagtgtgattaatattgatatgaaagcaaacatatgttgtgtcaagtacaatcctggctcaagcaactacattgcggtcggatcagctgatcatcacatccattattacgatctaagaaacataagccaaccacttcatgtcttcagtggacacaagaaagcagtttcctatgttaaatttttgtccaacaacgagctcgcttctgcgtccacagatagcacactacgcttatgggatgtcaaagacaacttgccagttcgaacattcagaggacatactaacgagaagaactttgtgggtctcacagtgaacagcgagtatctcgcctgtggaagcgagacaaacgaagtatatgtatatcacaaggaaatcacgagacccgtgacatcgcacagatttggatcgccagacatggacgatgcagaggaagaggcaggttcctactttattagtgcggtttgctggaagagtgatagtcccacgatgttgactgcgaatagtcaaggaaccatcaaagttctggtactcgctgcgtgattctagtagacattacaaaagatcttatagcttcgtgaatcaataaaaacaaatttgccgtctatgttctttagtgggagttacatatagagagagaacaatttattaaaagtagggttcatcatttggaaagcaactttgtattattatgcttgccttggaacactcctcaagaagaatttgtatcagtgatgtagatatgtcttacggtttcttagcttctactttatataattaaatgttag

SEQ ID NO: 3698 - protein, 689 aa, Arabidopsis thaliana
  peptide (1)..(689): Ceres Seq. ID no. 12562128
  misc_feature (66)..(103): Pfam Name: RING finger Pfam Description: Zinc finger, C3HC4 type
  misc_feature (15)..(689): NCBI GI NO: 3121867 NR Description: COP1 regulatory protein
  misc_feature (15)..(689): NCBI GI NO: 7688063 NR Description: constitutively photomorphogenic 1 protein
  misc_feature (15)..(689): NCBI GI NO: 4090943 NR Description: COP1 homolog [Lycopersicon esculentum]
  misc_feature (15)..(689): NCBI GI NO: 15029364 NR Description: photoregulatory zinc-finger protein COP1
  misc_feature (12)..(689): NCBI GI NO: 11127996 NR Description: COP1 [Ipomoea nil]
  misc_feature (22)..(688): NCBI GI NO: 16151847 NR Description: copI [Oryza sativa]
  misc_feature (22)..(688): NCBI GI NO: 7592844 NR Description: COP1 [Oryza sativa (japonica cultivar-group)]
  misc_feature (116)..(689): NCBI GI NO: 8574407 NR Description: COP1 regulatory protein [Pisum sativum]
  misc_feature (15)..(478): NCBI GI NO: 8574407 NR Description: COP1 regulatory protein [Pisum sativum]
  misc_feature (286)..(687): NCBI GI NO: 26024211 NR Description: constitutive photomorphogenic protein 1
QKPKSQSKKSFESKMEEISTDPVVPAVKPDPRTSSVGEGANRHENDDGGSGGSEIGAPDLDKDLLCPICMQIIKDAFLTACGHSFCYMCIITHLRNKSDCPCCSQHLTNNQLYPNFLLDKLLKKTSARHVSKTASPLDQFREALQRGCDVSIKEVDNLLTLLAERKRKMEQEEAERNMQILLDFLHCLRKQKVDELNEVQTDLQYIKEDINAVERHRIDLYRARDRYSVKLRMLGDDPSTRNAWPHEKNQIGFNSNSLSIRGGNFVGNYQNKKVEGKAQGSSHGLPKKDALSGSDSQSLNQSTVSMARKKRIHAQFNDLQECYLQKRRQLADQPNSKQENDKSVVRREGYSNGLADFQSVLTTFTRYSRLRVIAEIRHGDIFHSANIVSSIEFDRDDELFATAGVSRCIKVFDFSSVVNEPADMQCPIVEMSTRSKLSCLSWNKHEKNHIASSDYEGIVTVWDVTTRQSLMEYEEHEKRAWSVDFSRTEPSMLVSGSDDCKVKVWCTRQEASVINIDMKANICCVKYNPGSSNYIAVGSADHHIHYYDLRNISQPLHVFSGHKKAVSYVKFLSNNELASASTDSTLRLWDVKDNLPVRTFRGHTNEKNFVGLTVNSEYLACGSETNEVYVYHKEITRPVTSHRFGSPDMDDAEEEAGSYFISAVCWKSDSPTMLTANSQGTIKVLVLAA

SEQ ID NO: 3699 - protein, 675 aa, Arabidopsis thaliana
  peptide (1)..(675): Ceres Seq. ID no. 12562129
  misc_feature (52)..(89): Pfam Name: RING finger Pfam Description: Zinc finger, C3HC4 type
  misc_feature (1)..(675): NCBI GI NO: 3121867 NR Description: COP1 regulatory protein
  misc_feature (1)..(675): NCBI GI NO: 7688063 NR Description: constitutively photomorphogenic 1 protein
  misc_feature (1)..(675): NCBI GI NO: 4090943 NR Description: COP1 homolog [Lycopersicon esculentum]
  misc_feature (1)..(675): NCBI GI NO: 15029364 NR Description: photoregulatory zinc-finger protein COP1
  misc_feature (1)..(675): NCBI GI NO: 11127996 NR Description: COP1 [Ipomoea nil]
  misc_feature (8)..(674): NCBI GI NO: 16151847 NR Description: copI [Oryza sativa]
  misc_feature (8)..(674): NCBI GI NO: 7592844 NR Description: COP1 [Oryza sativa (japonica cultivar-group)]
  misc_feature (102)..(675): NCBI GI NO: 8574407 NR Description: COP1 regulatory protein [Pisum sativum]
  misc_feature (1)..(464): NCBI GI NO: 8574407 NR Description: COP1 regulatory protein [Pisum sativum]
  misc_feature (272)..(673): NCBI GI NO: 26024211 NR Description: constitutive photomorphogenic protein 1
MEEISTDPVVPAVKPDPRTSSVGEGANRHENDDGGSGGSEIGAPDLDKDLLCPICMQIIKDAFLTACGHSFCYMCIITHLRNKSDCPCCSQHLTNNQLYPNFLLDKLLKKTSARHVSKTASPLDQFREALQRGCDVSIKEVDNLLTLLAERKRKMEQEEAERNMQILLDFLHCLRKQKVDELNEVQTDLQYIKEDINAVERHRIDLYRARDRYSVKLRMLGDDPSTRNAWPHEKNQIGFNSNSLSIRGGNFVGNYQNKKVEGKAQGSSHGLPKKDALSGSDSQSLNQSTVSMARKKRIHAQFNDLQECYLQKRRQLADQPNSKQENDKSVVRREGYSNGLADFQSVLTTFTRYSRLRVIAEIRHGDIFHSANIVSSIEFDRDDELFATAGVSRCIKVFDFSSVVNEPADMQCPIVEMSTRSKLSCLSWNKHEKNHIASSDYEGIVTVWDVTTRQSLMEYEEHEKRAWSVDFSRTEPSMLVSGSDDCKVKVWCTRQEASVINIDMKANICCVKYNPGSSNYIAVGSADHHIHYYDLRNISQPLHVFSGHKKAVSYVKFLSNNELASASTDSTLRLWDVKDNLPVRTFRGHTNEKNFVGLTVNSEYLACGSETNEVYVYHKEITRPVTSHRFGSPDMDDAEEEAGSYFISAVCWKSDSPTMLTANSQGTIKVLVLAA

SEQ ID NO: 3700 - protein, 620 aa, Arabidopsis thaliana
  peptide (1)..(620): Ceres Seq. ID no. 12562130
  misc_feature (1)..(34): Pfam Name: RING finger Pfam Description: Zinc finger, C3HC4 type
  misc_feature (1)..(620): NCBI GI NO: 3121867 NR Description: COP1 regulatory protein
  misc_feature (1)..(620): NCBI GI NO: 7688063 NR Description: constitutively photomorphogenic 1 protein
  misc_feature (1)..(620): NCBI GI NO: 4090943 NR Description: COP1 homolog [Lycopersicon esculentum]
  misc_feature (1)..(620): NCBI GI NO: 15029364 NR Description: photoregulatory zinc-finger protein COP1
  misc_feature (1)..(620): NCBI GI NO: 11127996 NR Description: COP1 [Ipomoea nil]
  misc_feature (1)..(619): NCBI GI NO: 16151847 NR Description: copI [Oryza sativa]
  misc_feature (1)..(619): NCBI GI NO: 7592844 NR Description: COP1 [Oryza sativa (japonica cultivar-group)]
  misc_feature (47)..(620): NCBI GI NO: 8574407 NR Description: COP1 regulatory protein [Pisum sativum]
  misc_feature (1)..(409): NCBI GI NO: 8574407 NR Description: COP1 regulatory protein [Pisum sativum]
  misc_feature (217)..(618): NCBI GI NO: 26024211 NR Description: constitutive photomorphogenic protein 1
MQIIKDAFLTACGHSFCYMCIITHLRNKSDCPCCSQHLTNNQLYPNFLLDKLLKKTSARHVSKTASPLDQFREALQRGCDVSIKEVDNLLTLLAERKRKMEQEEAERNMQILLDFLHCLRKQKVDELNEVQTDLQYIKEDINAVERHRIDLYRARDRYSVKLRMLGDDPSTRNAWPHEKNQIGFNSNSLSIRGGNFVGNYQNKKVEGKAQGSSHGLPKKDALSGSDSQSLNQSTVSMARKKRIHAQFNDLQECYLQKRRQLADQPNSKQENDKSVVRREGYSNGLADFQSVLTTFTRYSRLRVIAEIRHGDIFHSANIVSSIEFDRDDELFATAGVSRCIKVFDFSSVVNEPADMQCPIVEMSTRSKLSCLSWNKHEKNHIASSDYEGIVTVWDVTTRQSLMEYEEHEKRAWSVDFSRTEPSMLVSGSDDCKVKVWCTRQEASVINIDMKANICCVKYNPGSSNYIAVGSADHHIHYYDLRNISQPLHVFSGHKKAVSYVKFLSNNELASASTDSTLRLWDVKDNLPVRTFRGHTNEKNFVGLTVNSEYLACGSETNEVYVYHKEITRPVTSHRFGSPDMDDAEEEAGSYFISAVCWKSDSPTMLTANSQGTIKVLVLAA

SEQ ID NO: 3701 - DNA, 1016 bp, Arabidopsis thaliana
  misc_feature (1)..(1016): Ceres Seq. ID no. 12329124
ccatattattcacgattctcatcaaatcatctccgatactcacaaccgaaataactaacccctcctcaacaaaaaacaacaaaacatgtacactccatcatacttaaaatattcaataatctcaattatatccgtattattcctccaaggaactcatggagacgacggaggttggcaaggtggtcacgccacgttttacggcggcgaagatgcttccggcaccatgggcggagcttgtggctatggaaatttgtatggccaaggttacgggacgaacacggcggctttaagtacggctctattcaacaacggactcacgtgtggcgcgtgctatgagatgaagtgtaacgatgacccgaggtggtgtctcgggtcaaccatcaccgtcacagctacaaacttttgcccacctaaccctggcctctccaacgataatggaggttggtgcaatcctcctcttcagcatttcgacctcgccgagccagcttttcttcagatcgctcagtatcgtgccggcattgttcctgtctctttccgaagagtaccatgtatgaagaaaggaggaataaggtttacgatcaacggacactcatacttcaacctcgttctgatctccaacgtaggaggagcaggagacgtacacgccgtctcaatcaaaggctcaaaaacacagtcgtggcaagcgatgtctagaaactggggacaaaactggcagagcaattcatacatgaacgaccaaagcctttccttccaggtaacgaccagcgatggtcgcacactcgttagcaacgacgtggctccttctaattggcagttcggacaaacctaccaaggtggtcagttctgatccaaaccatcatccacatctctctgttttgggtgctgacgtggctgcatattgctgaggtggctcgtaagcacccgcttaattagcttagcctttttttctcttatttacgaattattgcttcaatggttgtattttcattgtgcctacaaaaaagcaaggttttttt

SEQ ID NO: 3702 - protein, 253 aa, Arabidopsis thaliana
  peptide (1)..(253): Ceres Seq. ID no. 12329125
  misc_feature (161)..(239): Pfam Name: Pfam Description:  Pollen allergen
  misc_feature (1)..(253): NCBI GI NO: 15226718 NR Description: expansin, putative; protein id: At2g40610
  misc_feature (1)..(253): NCBI GI NO: 29421120 NR Description: expansin [Vitis labrusca x Vitis vinifera]
  misc_feature (10)..(253): NCBI GI NO: 7025493 NR Description: expansin 2 [Zinnia elegans]
  misc_feature (1)..(253): NCBI GI NO: 29421122 NR Description: expansin [Vitis labrusca x Vitis vinifera]
  misc_feature (5)..(253): NCBI GI NO: 11932092 NR Description: expansin [Cicer arietinum]
  misc_feature (5)..(253): NCBI GI NO: 11907554 NR Description: expansin [Prunus persica]
  misc_feature (2)..(253): NCBI GI NO: 29467499 NR Description: expansin [Pyrus communis]
  misc_feature (14)..(253): NCBI GI NO: 38046728 NR Description: alpha-expansin 2
  misc_feature (5)..(253): NCBI GI NO: 29467501 NR Description: expansin [Pyrus communis]
  misc_feature (4)..(253): NCBI GI NO: 3510538 NR Description: expansin [Prunus armeniaca]
MYTPSYLKYSIISIISVLFLQGTHGDDGGWQGGHATFYGGEDASGTMGGACGYGNLYGQGYGTNTAALSTALFNNGLTCGACYEMKCNDDPRWCLGSTITVTATNFCPPNPGLSNDNGGWCNPPLQHFDLAEPAFLQIAQYRAGIVPVSFRRVPCMKKGGIRFTINGHSYFNLVLISNVGGAGDVHAVSIKGSKTQSWQAMSRNWGQNWQSNSYMNDQSLSFQVTTSDGRTLVSNDVAPSNWQFGQTYQGGQF

SEQ ID NO: 3703 - protein, 207 aa, Arabidopsis thaliana
  peptide (1)..(207): Ceres Seq. ID no. 12329126
  misc_feature (115)..(193): Pfam Name: Pfam Description:  Pollen allergen
  misc_feature (1)..(207): NCBI GI NO: 15226718 NR Description: expansin, putative; protein id: At2g40610
  misc_feature (1)..(207): NCBI GI NO: 29421120 NR Description: expansin [Vitis labrusca x Vitis vinifera]
  misc_feature (1)..(207): NCBI GI NO: 7025493 NR Description: expansin 2 [Zinnia elegans]
  misc_feature (1)..(207): NCBI GI NO: 29421122 NR Description: expansin [Vitis labrusca x Vitis vinifera]
  misc_feature (1)..(207): NCBI GI NO: 11932092 NR Description: expansin [Cicer arietinum]
  misc_feature (1)..(207): NCBI GI NO: 11907554 NR Description: expansin [Prunus persica]
  misc_feature (1)..(207): NCBI GI NO: 29467499 NR Description: expansin [Pyrus communis]
  misc_feature (1)..(207): NCBI GI NO: 38046728 NR Description: alpha-expansin 2
  misc_feature (1)..(207): NCBI GI NO: 29467501 NR Description: expansin [Pyrus communis]
  misc_feature (1)..(207): NCBI GI NO: 3510538 NR Description: expansin [Prunus armeniaca]
MGGACGYGNLYGQGYGTNTAALSTALFNNGLTCGACYEMKCNDDPRWCLGSTITVTATNFCPPNPGLSNDNGGWCNPPLQHFDLAEPAFLQIAQYRAGIVPVSFRRVPCMKKGGIRFTINGHSYFNLVLISNVGGAGDVHAVSIKGSKTQSWQAMSRNWGQNWQSNSYMNDQSLSFQVTTSDGRTLVSNDVAPSNWQFGQTYQGGQF

SEQ ID NO: 3704 - protein, 169 aa, Arabidopsis thaliana
  peptide (1)..(169): Ceres Seq. ID no. 12329127
  misc_feature (77)..(155): Pfam Name: Pfam Description:  Pollen allergen
  misc_feature (1)..(169): NCBI GI NO: 15226718 NR Description: expansin, putative; protein id: At2g40610
  misc_feature (1)..(169): NCBI GI NO: 29421120 NR Description: expansin [Vitis labrusca x Vitis vinifera]
  misc_feature (1)..(169): NCBI GI NO: 7025493 NR Description: expansin 2 [Zinnia elegans]
  misc_feature (1)..(169): NCBI GI NO: 29421122 NR Description: expansin [Vitis labrusca x Vitis vinifera]
  misc_feature (1)..(169): NCBI GI NO: 11932092 NR Description: expansin [Cicer arietinum]
  misc_feature (1)..(169): NCBI GI NO: 11907554 NR Description: expansin [Prunus persica]
  misc_feature (1)..(169): NCBI GI NO: 29467499 NR Description: expansin [Pyrus communis]
  misc_feature (1)..(169): NCBI GI NO: 38046728 NR Description: alpha-expansin 2
  misc_feature (1)..(169): NCBI GI NO: 29467501 NR Description: expansin [Pyrus communis]
  misc_feature (1)..(169): NCBI GI NO: 3510538 NR Description: expansin [Prunus armeniaca]
MKCNDDPRWCLGSTITVTATNFCPPNPGLSNDNGGWCNPPLQHFDLAEPAFLQIAQYRAGIVPVSFRRVPCMKKGGIRFTINGHSYFNLVLISNVGGAGDVHAVSIKGSKTQSWQAMSRNWGQNWQSNSYMNDQSLSFQVTTSDGRTLVSNDVAPSNWQFGQTYQGGQF

SEQ ID NO: 3705 - DNA, 1793 bp, Arabidopsis thaliana
  misc_feature (1)..(1793): Ceres Seq. ID no. 12328926
gaaaaggatttttaattttcggagaggaagaagaagagagagatattgaagagcgctgaaggcggaaaagactattttgacctcgtcgtctccgtagatcatttttcttcagctcttcttcttcctctttctccgattctccttcttttgattttatctatccgccatgaacgagaaagccaacgtctctaaggagcttaatgcccgccatagaaagattcttgaagggcttcttaaacatccagagaacagagaatgtgctgactgcaaaacaaaaggtccaagatgggctagtgttaatttaggtatctttatctgcatgcaatgttctgggattcacaggagtctcggggtacacatatcgaaggttcgatctgccactctggacacatggctccccgagcaggttgcatttatacagtcaatgggaaatgataaagcaaatagttactgggaagcagagctacccccaaactatgatagagttggaattgagaattttatacgtgcaaagtatgaagagaagagatgggtttctagaggggaaaaggctagatcacctcctagagtcgagcaggaacggcggaaatctgtggagagaagtgggccgggatatgagcatggacatagtagtagtcctgtaaatttgtttgaggagaggaaaactattccagcatctagaacaagaaataatgttgctgcaacgagaataaatcttcccgtgcctccccaaggacccagtcaggttataaagccacagcagaaaatggagtctgcagctactccagtagagagggagaaacaagcagtaaatgttgcaccagcatcagatcctccaaaggtggattttgctactgatctgtttaacatgctatcaatggatgattcgactacaaatacctcagaggcaactcctggcgatactcctgccgatgataactcatgggctggctttcagtctgctggaagtggtcaaacggcagagaaaattgtcacagccaagcctgctgagagcagttctcctccagcttcatcttctgactttgaggatttgtttaaggacacacctaatttaacaactcaacaagcaccaaaagatgtgaaaggcgatatcatgagcctgtttgagaagacgaatatagtatcgccttttgccatgcatcagcaacaggttgctatgctcgctcagcagcaagccctttacatggctgcagcgaaagctgctggaggcactccaaacggcgtgaatcaacaagctattgctaatgctcttaacgtagcttctgcaaattggtcaaaccccggcggctaccagatccccggaatgactaaccccgtaggtggtcaagctgatctccagaaacttatgcaaaacatgaatatgaacgcaaacatgaacacgagacccgcacaaccgcaagagaacactctacaatacccatcatccagtttctacacaatgggtcaagctaatcaagtgaacggtatgaccccaaactcaaccggtaaacctcagtcatcatccgcaacccaaccaacaagcaccacaccatcttcacaatcaggcaaagactttgatttctcttccttgatggatggaatgttcacaaaacattgatcaagagagagagactttttctgaatttgcctttacatctttgttctaaatttgaagaaccaaaagaatatatatacaatcatctctggacagtttttctctgttaaacatatattttcttttctttggaactgtgttgtagccgagctttgatttatgattttactcgattgtc

SEQ ID NO: 3706 - protein, 483 aa, Arabidopsis thaliana
  peptide (1)..(483): Ceres Seq. ID no. 12328927
  misc_feature (16)..(130): Pfam Name: Pfam Description:  Putative GTPase activating protein for Arf
  misc_feature (1)..(483): NCBI GI NO: 18423615 NR Description: expressed protein; protein id: At5g54310
  misc_feature (1)..(483): NCBI GI NO: 21618169 NR Description: ARF GAP-like zinc finger-containing protein ZIGA3
  misc_feature (7)..(483): NCBI GI NO: 10441352 NR Description: ARF GAP-like zinc finger-containing protein ZIGA3
  misc_feature (1)..(482): NCBI GI NO: 34898734 NR Description: contains ESTs C28562
  misc_feature (1)..(213): NCBI GI NO: 9294154 NR Description: emb|CAB07858
  misc_feature (1)..(117): NCBI GI NO: 15229090 NR Description: unknown protein; protein id: At3g17660.1
  misc_feature (8)..(307): NCBI GI NO: 20152063 NR Description: RE02759p [Drosophila melanogaster]
  misc_feature (8)..(307): NCBI GI NO: 24651922 NR Description: CG8243-PA [Drosophila melanogaster]
  misc_feature (8)..(428): NCBI GI NO: 28077013 NR Description: stromal membrane-associated protein [Mus musculus]
  misc_feature (8)..(239): NCBI GI NO: 10435055 NR Description: unnamed protein product [Homo sapiens]
MNEKANVSKELNARHRKILEGLLKHPENRECADCKTKGPRWASVNLGIFICMQCSGIHRSLGVHISKVRSATLDTWLPEQVAFIQSMGNDKANSYWEAELPPNYDRVGIENFIRAKYEEKRWVSRGEKARSPPRVEQERRKSVERSGPGYEHGHSSSPVNLFEERKTIPASRTRNNVAATRINLPVPPQGPSQVIKPQQKMESAATPVEREKQAVNVAPASDPPKVDFATDLFNMLSMDDSTTNTSEATPGDTPADDNSWAGFQSAGSGQTAEKIVTAKPAESSSPPASSSDFEDLFKDTPNLTTQQAPKDVKGDIMSLFEKTNIVSPFAMHQQQVAMLAQQQALYMAAAKAAGGTPNGVNQQAIANALNVASANWSNPGGYQIPGMTNPVGGQADLQKLMQNMNMNANMNTRPAQPQENTLQYPSSSFYTMGQANQVNGMTPNSTGKPQSSSATQPTSTTPSSQSGKDFDFSSLMDGMFTKH

SEQ ID NO: 3707 - protein, 432 aa, Arabidopsis thaliana
  peptide (1)..(432): Ceres Seq. ID no. 12328928
  misc_feature (1)..(79): Pfam Name: Pfam Description:  Putative GTPase activating protein for Arf
  misc_feature (1)..(432): NCBI GI NO: 18423615 NR Description: expressed protein; protein id: At5g54310
  misc_feature (1)..(432): NCBI GI NO: 21618169 NR Description: ARF GAP-like zinc finger-containing protein ZIGA3
  misc_feature (1)..(432): NCBI GI NO: 10441352 NR Description: ARF GAP-like zinc finger-containing protein ZIGA3
  misc_feature (1)..(431): NCBI GI NO: 34898734 NR Description: contains ESTs C28562
  misc_feature (1)..(162): NCBI GI NO: 9294154 NR Description: emb|CAB07858
  misc_feature (1)..(66): NCBI GI NO: 15229090 NR Description: unknown protein; protein id: At3g17660.1
  misc_feature (1)..(256): NCBI GI NO: 20152063 NR Description: RE02759p [Drosophila melanogaster]
  misc_feature (1)..(256): NCBI GI NO: 24651922 NR Description: CG8243-PA [Drosophila melanogaster]
  misc_feature (1)..(377): NCBI GI NO: 28077013 NR Description: stromal membrane-associated protein [Mus musculus]
  misc_feature (1)..(188): NCBI GI NO: 10435055 NR Description: unnamed protein product [Homo sapiens]
MQCSGIHRSLGVHISKVRSATLDTWLPEQVAFIQSMGNDKANSYWEAELPPNYDRVGIENFIRAKYEEKRWVSRGEKARSPPRVEQERRKSVERSGPGYEHGHSSSPVNLFEERKTIPASRTRNNVAATRINLPVPPQGPSQVIKPQQKMESAATPVEREKQAVNVAPASDPPKVDFATDLFNMLSMDDSTTNTSEATPGDTPADDNSWAGFQSAGSGQTAEKIVTAKPAESSSPPASSSDFEDLFKDTPNLTTQQAPKDVKGDIMSLFEKTNIVSPFAMHQQQVAMLAQQQALYMAAAKAAGGTPNGVNQQAIANALNVASANWSNPGGYQIPGMTNPVGGQADLQKLMQNMNMNANMNTRPAQPQENTLQYPSSSFYTMGQANQVNGMTPNSTGKPQSSSATQPTSTTPSSQSGKDFDFSSLMDGMFTKH

SEQ ID NO: 3708 - protein, 397 aa, Arabidopsis thaliana
  peptide (1)..(397): Ceres Seq. ID no. 12328929
  misc_feature (1)..(397): NCBI GI NO: 18423615 NR Description: expressed protein; protein id: At5g54310
  misc_feature (1)..(397): NCBI GI NO: 21618169 NR Description: ARF GAP-like zinc finger-containing protein ZIGA3
  misc_feature (1)..(397): NCBI GI NO: 10441352 NR Description: ARF GAP-like zinc finger-containing protein ZIGA3
  misc_feature (1)..(396): NCBI GI NO: 34898734 NR Description: contains ESTs C28562
  misc_feature (1)..(127): NCBI GI NO: 9294154 NR Description: emb|CAB07858
  misc_feature (1)..(31): NCBI GI NO: 15229090 NR Description: unknown protein; protein id: At3g17660.1
  misc_feature (1)..(221): NCBI GI NO: 20152063 NR Description: RE02759p [Drosophila melanogaster]
  misc_feature (1)..(221): NCBI GI NO: 24651922 NR Description: CG8243-PA [Drosophila melanogaster]
  misc_feature (1)..(342): NCBI GI NO: 28077013 NR Description: stromal membrane-associated protein [Mus musculus]
  misc_feature (1)..(153): NCBI GI NO: 10435055 NR Description: unnamed protein product [Homo sapiens]
MGNDKANSYWEAELPPNYDRVGIENFIRAKYEEKRWVSRGEKARSPPRVEQERRKSVERSGPGYEHGHSSSPVNLFEERKTIPASRTRNNVAATRINLPVPPQGPSQVIKPQQKMESAATPVEREKQAVNVAPASDPPKVDFATDLFNMLSMDDSTTNTSEATPGDTPADDNSWAGFQSAGSGQTAEKIVTAKPAESSSPPASSSDFEDLFKDTPNLTTQQAPKDVKGDIMSLFEKTNIVSPFAMHQQQVAMLAQQQALYMAAAKAAGGTPNGVNQQAIANALNVASANWSNPGGYQIPGMTNPVGGQADLQKLMQNMNMNANMNTRPAQPQENTLQYPSSSFYTMGQANQVNGMTPNSTGKPQSSSATQPTSTTPSSQSGKDFDFSSLMDGMFTKH

SEQ ID NO: 3709 - DNA, 1258 bp, Arabidopsis thaliana
  misc_feature (1)..(1258): Ceres Seq. ID no. 12323144
acggagattgtaacaaggaaaccgccgtcgccggatctgatagtgcatatccatgaagtagaagacgaagaaacttactttctgatcttagaacggagtatatgtacagaagattcgcgtccctcaatttttgatctcaagggtcgggtttacctttttttccttcttatttttggtggctttgcgttttctcattcgacgatttctggatttggggatttcaaaaccatgaggaagaagctcgatactcggttcccagctgctcgtattaaaaagattatgcaagctgatgaggatgttggcaagatagctttggcagtgcctgtcttagtctcaaaatctttggagttgttcttgcaagacctttgtgatcgtacatatgaaattacccttgaaagaggtgccaagactgtgagctcattgcacctaaaacattgtgtggaaagatataacgtgtttgattttctgagggaagttgtgagtaaggtgcctgactatggccattcccaagggcaaggacatggtgatgttaccatggatgatcgcagcatctccaagagaaggaagcccatcagcgatgaagtgaatgacagtgacgaggaatataagaaaagcaaaacgcaagagatagggagtgctaagaccagtggcaggggtggtagaggaagagggcgaggaagaggtcgtggtggacgagctgcaaaagcagccgaaagagagggtctcaaccgcgagatggaagtagaagccgccaattctggacagccaccaccagaagacaatgtcaagatgcatgcgtcagagtcatcaccacaagaggatgagaagaaaggcatcgacggcacagcagcatcgaacgaagacaccaagcaacaccttcaaagtcccaaagaaggcattgactttgatctcaacgctgaatccctcgacctaaacgagaccaaactggcaccagccacaggcacaaccacaaccacaactgcagcaacagactctgaggagtattcgggctggcctatgatggacataagcaaaatggatccagcacagcttgctagtctgggtaagaggatagacgaggatgaggaagattatgacgaagaaggctaagtcataacagcactataggatatatagagtagcagcgtttagcagtttgtctagaaaatgcttcttctgtcatcaaaatcttctcctgtttccatttattgtatgaaccaaagattgcatgcactctatgaaacttaatttattctcg

SEQ ID NO: 3710 - protein, 369 aa, Arabidopsis thaliana
  peptide (1)..(369): Ceres Seq. ID no. 12323145
  misc_feature (83)..(147): Pfam Name: CBF/NF-Y Pfam Description: Histone-like transcription factor
  misc_feature (77)..(369): NCBI GI NO: 30682195 NR Description: transcription factor Hap5a, putative
  misc_feature (88)..(369): NCBI GI NO: 12321975 NR Description: unknown protein; 69004-67516
  misc_feature (77)..(271): NCBI GI NO: 18481624 NR Description: repressor protein [Oryza sativa]
  misc_feature (77)..(275): NCBI GI NO: 18481626 NR Description: repressor protein [Zea mays]
  misc_feature (105)..(316): NCBI GI NO: 15239766 NR Description: putative protein; protein id: At5g19490.1
  misc_feature (78)..(337): NCBI GI NO: 24657218 NR Description: CG10318-PA [Drosophila melanogaster]
  misc_feature (78)..(337): NCBI GI NO: 10242351 NR Description: NC2alpha [Drosophila melanogaster]
  misc_feature (78)..(190): NCBI GI NO: 27661225 NR Description: similar to RIKEN cDNA 2310074H19
  misc_feature (78)..(190): NCBI GI NO: 18426973 NR Description: DR1-associated protein 1
  misc_feature (78)..(196): NCBI GI NO: 28279647 NR Description: Similar to Dr1 associated protein 1
TEIVTRKPPSPDLIVHIHEVEDEETYFLILERSICTEDSRPSIFDLKGRVYLFFLLIFGGFAFSHSTISGFGDFKTMRKKLDTRFPAARIKKIMQADEDVGKIALAVPVLVSKSLELFLQDLCDRTYEITLERGAKTVSSLHLKHCVERYNVFDFLREVVSKVPDYGHSQGQGHGDVTMDDRSISKRRKPISDEVNDSDEEYKKSKTQEIGSAKTSGRGGRGRGRGRGRGGRAAKAAEREGLNREMEVEAANSGQPPPEDNVKMHASESSPQEDEKKGIDGTAASNEDTKQHLQSPKEGIDFDLNAESLDLNETKLAPATGTTTTTTAATDSEEYSGWPMMDISKMDPAQLASLGKRIDEDEEDYDEEG

SEQ ID NO: 3711 - protein, 293 aa, Arabidopsis thaliana
  peptide (1)..(293): Ceres Seq. ID no. 12323146
  misc_feature (7)..(71): Pfam Name: CBF/NF-Y Pfam Description: Histone-like transcription factor
  misc_feature (1)..(293): NCBI GI NO: 30682195 NR Description: transcription factor Hap5a, putative
  misc_feature (12)..(293): NCBI GI NO: 12321975 NR Description: unknown protein; 69004-67516
  misc_feature (1)..(195): NCBI GI NO: 18481624 NR Description: repressor protein [Oryza sativa]
  misc_feature (1)..(199): NCBI GI NO: 18481626 NR Description: repressor protein [Zea mays]
  misc_feature (29)..(240): NCBI GI NO: 15239766 NR Description: putative protein; protein id: At5g19490.1
  misc_feature (2)..(261): NCBI GI NO: 24657218 NR Description: CG10318-PA [Drosophila melanogaster]
  misc_feature (2)..(261): NCBI GI NO: 10242351 NR Description: NC2alpha [Drosophila melanogaster]
  misc_feature (2)..(114): NCBI GI NO: 27661225 NR Description: similar to RIKEN cDNA 2310074H19
  misc_feature (2)..(114): NCBI GI NO: 18426973 NR Description: DR1-associated protein 1
  misc_feature (2)..(120): NCBI GI NO: 28279647 NR Description: Similar to Dr1 associated protein 1
MRKKLDTRFPAARIKKIMQADEDVGKIALAVPVLVSKSLELFLQDLCDRTYEITLERGAKTVSSLHLKHCVERYNVFDFLREVVSKVPDYGHSQGQGHGDVTMDDRSISKRRKPISDEVNDSDEEYKKSKTQEIGSAKTSGRGGRGRGRGRGRGGRAAKAAEREGLNREMEVEAANSGQPPPEDNVKMHASESSPQEDEKKGIDGTAASNEDTKQHLQSPKEGIDFDLNAESLDLNETKLAPATGTTTTTTAATDSEEYSGWPMMDISKMDPAQLASLGKRIDEDEEDYDEEG

SEQ ID NO: 3712 - protein, 276 aa, Arabidopsis thaliana
  peptide (1)..(276): Ceres Seq. ID no. 12323147
  misc_feature (1)..(54): Pfam Name: CBF/NF-Y Pfam Description: Histone-like transcription factor
  misc_feature (1)..(276): NCBI GI NO: 30682195 NR Description: transcription factor Hap5a, putative
  misc_feature (1)..(276): NCBI GI NO: 12321975 NR Description: unknown protein; 69004-67516
  misc_feature (1)..(178): NCBI GI NO: 18481624 NR Description: repressor protein [Oryza sativa]
  misc_feature (1)..(182): NCBI GI NO: 18481626 NR Description: repressor protein [Zea mays]
  misc_feature (12)..(223): NCBI GI NO: 15239766 NR Description: putative protein; protein id: At5g19490.1
  misc_feature (1)..(244): NCBI GI NO: 24657218 NR Description: CG10318-PA [Drosophila melanogaster]
  misc_feature (1)..(244): NCBI GI NO: 10242351 NR Description: NC2alpha [Drosophila melanogaster]
  misc_feature (1)..(97): NCBI GI NO: 27661225 NR Description: similar to RIKEN cDNA 2310074H19
  misc_feature (1)..(97): NCBI GI NO: 18426973 NR Description: DR1-associated protein 1
  misc_feature (1)..(103): NCBI GI NO: 28279647 NR Description: Similar to Dr1 associated protein 1
MQADEDVGKIALAVPVLVSKSLELFLQDLCDRTYEITLERGAKTVSSLHLKHCVERYNVFDFLREVVSKVPDYGHSQGQGHGDVTMDDRSISKRRKPISDEVNDSDEEYKKSKTQEIGSAKTSGRGGRGRGRGRGRGGRAAKAAEREGLNREMEVEAANSGQPPPEDNVKMHASESSPQEDEKKGIDGTAASNEDTKQHLQSPKEGIDFDLNAESLDLNETKLAPATGTTTTTTAATDSEEYSGWPMMDISKMDPAQLASLGKRIDEDEEDYDEEG

SEQ ID NO: 3713 - DNA, 1348 bp, Arabidopsis thaliana
  misc_feature (1)..(1348): Ceres Seq. ID no. 13489207
atttcataaatcatagagagagagagagagagagagagagagtttggaaacattccaaaaccagaactcgatattatttcaccaaagaatgatagaaacaagaactatctttttataaaactctttacaccccaaaagaaaatgtctcactcgttttgccttataatatttctttcaacaacaacccaaatctacaaaaaatcccaataaaaaaaaacttcagtctgtttgacattttgtcgaacacttggacggcatcacaaaaagctctaaactttctgactaccaatggcggattcgtcttccgacaaggagaagaaggaaaataataagcagcccgtgtatcgtggagtccgtatgaggagctggggaaaatgggtatcggagattcgcgaaccgaggaagaaatcgagaatctggctcgggacttttccgacggcggagatggctatgcgtgctcacgacgtggcggctatgagtatcaaaggaacttcagccattctcaatttccctgagctctctaaacttcttccccgacccgtttcgctcagccctcgtgacgtcagagctgcggcgaccaaagctgctctcatggacttcgatacgacggcgtttcgttcggatactgagactagcgaaacgacgacgtcgaataaaatgtcagagagtagtgagagtaacgaaacggtgtcgttctcatcgtcgtcttggtcctctgttacgagcattgaggaaagtacagtctccgacgatcttgacgagatcgtaaagttaccgagtctaggaacgagcctaaacgagtcgaacgagttcgtgatatttgactcgttggaggatttggtgtacatgcctcggtggttaagcggtacggaagaagaagtttttacgtataataacaatgattcttcgttgaattactcatcagttttcgaatcttggaaacattttccctgagaaaagaaagaagccatattttctctctctttttcgccatttttggttttaagttttttgatgggattctctctgtttttgctatgcgtgagatatctctctttgtggaatagataacttttctgttgaaaatctcctaagtctgtgaaatgaacgacgatggaaatgtaagtgtgtatattagcccgaaataatgactgtatacattcttttttgcaagatcattagaaaaaaataaataggaaatgtggtttgtattagagtatagaattgattaagatcggtttagatcatcaatatcggtttaatgtctgtgaaccagaaccctctcattgtataagaggcttcaatgtaatatttcctaagcaagataatgagaatgatcgtttgtttt

SEQ ID NO: 3714 - protein, 221 aa, Arabidopsis thaliana
  peptide (1)..(221): Ceres Seq. ID no. 13489208
  misc_feature (16)..(80): Pfam Name: Pfam Description:  AP2 domain
  misc_feature (1)..(221): NCBI GI NO: 15233928 NR Description: AP2 domain transcription factor TINY, putative
  misc_feature (6)..(219): NCBI GI NO: 25352180 NR Description: TINY-like AP2 domain transcription factor
  misc_feature (2)..(196): NCBI GI NO: 15239113 NR Description: AP2 domain transcription factor TINY, putative
  misc_feature (3)..(216): NCBI GI NO: 15223860 NR Description: AP2 domain transcription factor TINY, putative
  misc_feature (3)..(193): NCBI GI NO: 15239501 NR Description: AP2 domain transcription factor TINY
  misc_feature (3)..(204): NCBI GI NO: 15232340 NR Description: AP2 domain transcription factor TINY, putative
  misc_feature (19)..(219): NCBI GI NO: 25992102 NR Description: dehydration responsive element binding protein
  misc_feature (8)..(177): NCBI GI NO: 15225381 NR Description: AP2 domain transcription factor TINY, putative
  misc_feature (8)..(177): NCBI GI NO: 21592664 NR Description: putative AP2 domain transcription factor
  misc_feature (3)..(175): NCBI GI NO: 9279711 NR Description: transcription factor TINY-like protein
MADSSSDKEKKENNKQPVYRGVRMRSWGKWVSEIREPRKKSRIWLGTFPTAEMAMRAHDVAAMSIKGTSAILNFPELSKLLPRPVSLSPRDVRAAATKAALMDFDTTAFRSDTETSETTTSNKMSESSESNETVSFSSSSWSSVTSIEESTVSDDLDEIVKLPSLGTSLNESNEFVIFDSLEDLVYMPRWLSGTEEEVFTYNNNDSSLNYSSVFESWKHFP

SEQ ID NO: 3715 - protein, 198 aa, Arabidopsis thaliana
  peptide (1)..(198): Ceres Seq. ID no. 13489209
  misc_feature (1)..(57): Pfam Name: Pfam Description:  AP2 domain
  misc_feature (1)..(198): NCBI GI NO: 15233928 NR Description: AP2 domain transcription factor TINY, putative
  misc_feature (1)..(196): NCBI GI NO: 25352180 NR Description: TINY-like AP2 domain transcription factor
  misc_feature (1)..(173): NCBI GI NO: 15239113 NR Description: AP2 domain transcription factor TINY, putative
  misc_feature (1)..(193): NCBI GI NO: 15223860 NR Description: AP2 domain transcription factor TINY, putative
  misc_feature (1)..(170): NCBI GI NO: 15239501 NR Description: AP2 domain transcription factor TINY
  misc_feature (1)..(181): NCBI GI NO: 15232340 NR Description: AP2 domain transcription factor TINY, putative
  misc_feature (1)..(196): NCBI GI NO: 25992102 NR Description: dehydration responsive element binding protein
  misc_feature (1)..(154): NCBI GI NO: 15225381 NR Description: AP2 domain transcription factor TINY, putative
  misc_feature (1)..(154): NCBI GI NO: 21592664 NR Description: putative AP2 domain transcription factor
  misc_feature (1)..(152): NCBI GI NO: 9279711 NR Description: transcription factor TINY-like protein
MRSWGKWVSEIREPRKKSRIWLGTFPTAEMAMRAHDVAAMSIKGTSAILNFPELSKLLPRPVSLSPRDVRAAATKAALMDFDTTAFRSDTETSETTTSNKMSESSESNETVSFSSSSWSSVTSIEESTVSDDLDEIVKLPSLGTSLNESNEFVIFDSLEDLVYMPRWLSGTEEEVFTYNNNDSSLNYSSVFESWKHFP

SEQ ID NO: 3716 - protein, 169 aa, Arabidopsis thaliana
  peptide (1)..(169): Ceres Seq. ID no. 13489210
  misc_feature (1)..(169): NCBI GI NO: 15233928 NR Description: AP2 domain transcription factor TINY, putative
  misc_feature (1)..(167): NCBI GI NO: 25352180 NR Description: TINY-like AP2 domain transcription factor
  misc_feature (1)..(144): NCBI GI NO: 15239113 NR Description: AP2 domain transcription factor TINY, putative
  misc_feature (1)..(164): NCBI GI NO: 15223860 NR Description: AP2 domain transcription factor TINY, putative
  misc_feature (1)..(141): NCBI GI NO: 15239501 NR Description: AP2 domain transcription factor TINY
  misc_feature (1)..(152): NCBI GI NO: 15232340 NR Description: AP2 domain transcription factor TINY, putative
  misc_feature (1)..(167): NCBI GI NO: 25992102 NR Description: dehydration responsive element binding protein
  misc_feature (1)..(125): NCBI GI NO: 15225381 NR Description: AP2 domain transcription factor TINY, putative
  misc_feature (1)..(125): NCBI GI NO: 21592664 NR Description: putative AP2 domain transcription factor
  misc_feature (1)..(123): NCBI GI NO: 9279711 NR Description: transcription factor TINY-like protein
MAMRAHDVAAMSIKGTSAILNFPELSKLLPRPVSLSPRDVRAAATKAALMDFDTTAFRSDTETSETTTSNKMSESSESNETVSFSSSSWSSVTSIEESTVSDDLDEIVKLPSLGTSLNESNEFVIFDSLEDLVYMPRWLSGTEEEVFTYNNNDSSLNYSSVFESWKHFP

SEQ ID NO: 3717 - DNA, 1509 bp, Arabidopsis thaliana
  misc_feature (1)..(1509): Ceres Seq. ID no. 12422481
gtacgccaaatatctaacaaggagctctttagattgagactagtggaagagagacgagcaaggaattagcaatggcggcggatttgccggaggcgacagtacagaacattctggaccaagagtctcttaaatgggttttcgtcggaggtaaaggaggtgttgggaagacgacatgcagttcaattctcgcaatttgtctcgccattgttcgatcctccgttctcatcatctccaccgatcctgctcacaatcttagtgatgcctttcagcaacgcttcactaaatctcccactttggttcaaggtttctctaatctctttgccatggaggtagatcctaccgttgaaactgatgacatggctggtacagacgggatggatggtttattctctgatttggcaaatgcgattcctggaatcgatgaggctatgagttttgctgagatgttgaagttggtgcaaacaatggattatgctactattgtgtttgacactgctcctactggacatactctccgcctgttacagtttccggccacactagaaaagggactttcgaagttgatgtcattgaagagtagatttggtggcttgatgactcggatgagccgtatgtttggcatggaggatgagttcggagaggatgctctgctgggaagacttgagggcttgaaagatgtgattgagcaagtaaatcggcaattcaaagacccggatatgactacgttcgtttgtgtctgcatccccgagttcttgtctctctatgaaacagagagacttgttcaggaactcgccaagtttgagattgacacgcataacattatcatcaaccaagtactatacgacgacgaagatgtggagtccaagttgctcagagcaaggatgcggatgcaacagaagtatcttgatcagttttatatgctatacgatgactttaatatcacaaagcttcctctgcttccggaagaggtgacaggggttgaagccttaaaggcgttttcacataagttcttgacgccgtaccatcctaccactagcaggagcaatgtagaggagctggagaggaaagtacacacattgcgtttgcagttaaaaacagctgaagaagaactcgaacgggtcaagagtggctaaagataaggctctgttcttccctttaattgtggaaaattaaaactgaatctttttctctctagttcttcatctagcaacaactctttataggacaggaaacaagatcaagcagaatcttcttttgcgttgttttattgttatgcattggatttgtttttatatttgtaataatcatgactacatagactcatatctaccaagaaatcgttgttttacgacttaatcagctttttatatattaagttgaagggtatctcacaagcgaatgctatgatctcttgtaacagctttttatatactgtagactggtcttgcaacagagaagcaaaattcatgtaaaaaaattatagtaaataagagatgttttgatttattg

SEQ ID NO: 3718 - protein, 353 aa, Arabidopsis thaliana
  peptide (1)..(353): Ceres Seq. ID no. 12422482
  misc_feature (19)..(315): Pfam Name: Pfam Description:  Anion-transporting ATPase
  misc_feature (1)..(353): NCBI GI NO: 18378897 NR Description: arsA homolog
  misc_feature (1)..(353): NCBI GI NO: 25290846 NR Description: hypothetical protein F22M8.4
  misc_feature (1)..(321): NCBI GI NO: 19717679 NR Description: arsenite transport subunit A
  misc_feature (1)..(319): NCBI GI NO: 24586297 NR Description: CG1598-PA [Drosophila melanogaster]
  misc_feature (1)..(319): NCBI GI NO: 17945070 NR Description: RE07422p [Drosophila melanogaster]
  misc_feature (1)..(323): NCBI GI NO: 6647417 NR Description: Arsenical pump-driving ATPase
  misc_feature (1)..(323): NCBI GI NO: 12025542 NR Description: arsA
  misc_feature (1)..(323): NCBI GI NO: 2905657 NR Description: arsenite translocating ATPase [Homo sapiens]
  misc_feature (7)..(323): NCBI GI NO: 4757796 NR Description: arsA arsenite transporter, ATP-binding, homolog 1
  misc_feature (7)..(257): NCBI GI NO: 23489654 NR Description: arsenite transport subunit A
MAADLPEATVQNILDQESLKWVFVGGKGGVGKTTCSSILAICLAIVRSSVLIISTDPAHNLSDAFQQRFTKSPTLVQGFSNLFAMEVDPTVETDDMAGTDGMDGLFSDLANAIPGIDEAMSFAEMLKLVQTMDYATIVFDTAPTGHTLRLLQFPATLEKGLSKLMSLKSRFGGLMTRMSRMFGMEDEFGEDALLGRLEGLKDVIEQVNRQFKDPDMTTFVCVCIPEFLSLYETERLVQELAKFEIDTHNIIINQVLYDDEDVESKLLRARMRMQQKYLDQFYMLYDDFNITKLPLLPEEVTGVEALKAFSHKFLTPYHPTTSRSNVEELERKVHTLRLQLKTAEEELERVKSG

SEQ ID NO: 3719 - protein, 269 aa, Arabidopsis thaliana
  peptide (1)..(269): Ceres Seq. ID no. 12422483
  misc_feature (1)..(231): Pfam Name: Pfam Description:  Anion-transporting ATPase
  misc_feature (1)..(269): NCBI GI NO: 18378897 NR Description: arsA homolog
  misc_feature (1)..(269): NCBI GI NO: 25290846 NR Description: hypothetical protein F22M8.4
  misc_feature (1)..(237): NCBI GI NO: 19717679 NR Description: arsenite transport subunit A
  misc_feature (1)..(235): NCBI GI NO: 24586297 NR Description: CG1598-PA [Drosophila melanogaster]
  misc_feature (1)..(235): NCBI GI NO: 17945070 NR Description: RE07422p [Drosophila melanogaster]
  misc_feature (1)..(239): NCBI GI NO: 6647417 NR Description: Arsenical pump-driving ATPase
  misc_feature (1)..(239): NCBI GI NO: 12025542 NR Description: arsA
  misc_feature (1)..(239): NCBI GI NO: 2905657 NR Description: arsenite translocating ATPase [Homo sapiens]
  misc_feature (1)..(239): NCBI GI NO: 4757796 NR Description: arsA arsenite transporter, ATP-binding, homolog 1
  misc_feature (1)..(173): NCBI GI NO: 23489654 NR Description: arsenite transport subunit A
MEVDPTVETDDMAGTDGMDGLFSDLANAIPGIDEAMSFAEMLKLVQTMDYATIVFDTAPTGHTLRLLQFPATLEKGLSKLMSLKSRFGGLMTRMSRMFGMEDEFGEDALLGRLEGLKDVIEQVNRQFKDPDMTTFVCVCIPEFLSLYETERLVQELAKFEIDTHNIIINQVLYDDEDVESKLLRARMRMQQKYLDQFYMLYDDFNITKLPLLPEEVTGVEALKAFSHKFLTPYHPTTSRSNVEELERKVHTLRLQLKTAEEELERVKSG

SEQ ID NO: 3720 - protein, 258 aa, Arabidopsis thaliana
  peptide (1)..(258): Ceres Seq. ID no. 12422484
  misc_feature (1)..(220): Pfam Name: Pfam Description:  Anion-transporting ATPase
  misc_feature (1)..(258): NCBI GI NO: 18378897 NR Description: arsA homolog
  misc_feature (1)..(258): NCBI GI NO: 25290846 NR Description: hypothetical protein F22M8.4
  misc_feature (1)..(226): NCBI GI NO: 19717679 NR Description: arsenite transport subunit A
  misc_feature (1)..(224): NCBI GI NO: 24586297 NR Description: CG1598-PA [Drosophila melanogaster]
  misc_feature (1)..(224): NCBI GI NO: 17945070 NR Description: RE07422p [Drosophila melanogaster]
  misc_feature (1)..(228): NCBI GI NO: 6647417 NR Description: Arsenical pump-driving ATPase
  misc_feature (1)..(228): NCBI GI NO: 12025542 NR Description: arsA
  misc_feature (1)..(228): NCBI GI NO: 2905657 NR Description: arsenite translocating ATPase [Homo sapiens]
  misc_feature (1)..(228): NCBI GI NO: 4757796 NR Description: arsA arsenite transporter, ATP-binding, homolog 1
  misc_feature (1)..(162): NCBI GI NO: 23489654 NR Description: arsenite transport subunit A
MAGTDGMDGLFSDLANAIPGIDEAMSFAEMLKLVQTMDYATIVFDTAPTGHTLRLLQFPATLEKGLSKLMSLKSRFGGLMTRMSRMFGMEDEFGEDALLGRLEGLKDVIEQVNRQFKDPDMTTFVCVCIPEFLSLYETERLVQELAKFEIDTHNIIINQVLYDDEDVESKLLRARMRMQQKYLDQFYMLYDDFNITKLPLLPEEVTGVEALKAFSHKFLTPYHPTTSRSNVEELERKVHTLRLQLKTAEEELERVKSG

SEQ ID NO: 3721 - DNA, 765 bp, Arabidopsis thaliana
  misc_feature (1)..(765): Ceres Seq. ID no. 12337978
gacaaaaaaagaaacagtgaagaagaaaaaaaaaaaaggtcattttcattttctccatttgatttttgccgaccggagaaaatatcttcttgccgtcttcttcttcatttcaccaggaacttttatttgaaatcggtttgatttagccatggcaaacgcggcatcgggaatggctgtgcatgatgattgcaagctgaaatttatggaactgaaggcgaaaagaacattccgtaccatagtctacaagattgaggataagcaagtgattgtagagaaactcggtgaacctgaacaatcatatgatgactttgcagctagtcttccagctgatgattgccgatattgcatttacgatttcgactttgtcactgcggagaactgccagaagagcaagatcttcttgcatggtctccggacactgccaaagtgagagacaagatgatttacgcgagctctaaagataggttcaagagagaactagatggaattcaagtggaacttcaagctactgatccaacagaaatgggtcttgatgttttcaaaagccgcaccaactaagtaaaacaaaaccctgtaagggcatttgaataagtttggtttctggagtgaatatgtttcctctgactgttatgaaaactttttaacaccttcaacttcattctacttggtattattgtatgtctttgatgtgttatgtgtgccttgtgatggttttcaattagttttacatgtacaatacttgaaatcagattgttgctaagcttc

SEQ ID NO: 3722 - protein, 93 aa, Arabidopsis thaliana
  peptide (1)..(93): Ceres Seq. ID no. 12337979
  misc_feature (12)..(84): Pfam Name: Pfam Description:  Cofilin/tropomyosin-type actin-binding protein
  misc_feature (1)..(84): NCBI GI NO: 18408116 NR Description: actin depolymerizing factor 2
  misc_feature (8)..(84): NCBI GI NO: 11276987 NR Description: actin depolymerizing factor 2
  misc_feature (1)..(84): NCBI GI NO: 30697300 NR Description: actin depolymerizing factor 4 - like protein
  misc_feature (1)..(84): NCBI GI NO: 15231309 NR Description: actin depolymerizing factor 1
  misc_feature (1)..(84): NCBI GI NO: 17366765 NR Description: Actin-depolymerizing factor 2 (ADF 2)
  misc_feature (1)..(84): NCBI GI NO: 4185511 NR Description: actin depolymerizing factor 4
  misc_feature (1)..(84): NCBI GI NO: 17366768 NR Description: Actin-depolymerizing factor 1 (ADF 1)
  misc_feature (1)..(84): NCBI GI NO: 30697295 NR Description: actin depolymerizing factor 3 - like protein
  misc_feature (1)..(84): NCBI GI NO: 22857914 NR Description: pollen specific actin-depolymerizing factor 2
  misc_feature (1)..(84): NCBI GI NO: 18402587 NR Description: actin depolymerizing factor 6
MANAASGMAVHDDCKLKFMELKAKRTFRTIVYKIEDKQVIVEKLGEPEQSYDDFAASLPADDCRYCIYDFDFVTAENCQKSKIFLHGLRTLPK

SEQ ID NO: 3723 - protein, 86 aa, Arabidopsis thaliana
  peptide (1)..(86): Ceres Seq. ID no. 12337980
  misc_feature (5)..(77): Pfam Name: Pfam Description:  Cofilin/tropomyosin-type actin-binding protein
  misc_feature (1)..(77): NCBI GI NO: 18408116 NR Description: actin depolymerizing factor 2
  misc_feature (1)..(77): NCBI GI NO: 11276987 NR Description: actin depolymerizing factor 2
  misc_feature (1)..(77): NCBI GI NO: 30697300 NR Description: actin depolymerizing factor 4 - like protein
  misc_feature (1)..(77): NCBI GI NO: 15231309 NR Description: actin depolymerizing factor 1
  misc_feature (1)..(77): NCBI GI NO: 17366765 NR Description: Actin-depolymerizing factor 2 (ADF 2)
  misc_feature (1)..(77): NCBI GI NO: 4185511 NR Description: actin depolymerizing factor 4
  misc_feature (1)..(77): NCBI GI NO: 17366768 NR Description: Actin-depolymerizing factor 1 (ADF 1)
  misc_feature (1)..(77): NCBI GI NO: 30697295 NR Description: actin depolymerizing factor 3 - like protein
  misc_feature (1)..(77): NCBI GI NO: 22857914 NR Description: pollen specific actin-depolymerizing factor 2
  misc_feature (1)..(77): NCBI GI NO: 18402587 NR Description: actin depolymerizing factor 6
MAVHDDCKLKFMELKAKRTFRTIVYKIEDKQVIVEKLGEPEQSYDDFAASLPADDCRYCIYDFDFVTAENCQKSKIFLHGLRTLPK

SEQ ID NO: 3724 - protein, 75 aa, Arabidopsis thaliana
  peptide (1)..(75): Ceres Seq. ID no. 12337981
  misc_feature (1)..(66): Pfam Name: Pfam Description:  Cofilin/tropomyosin-type actin-binding protein
  misc_feature (1)..(66): NCBI GI NO: 18408116 NR Description: actin depolymerizing factor 2
  misc_feature (1)..(66): NCBI GI NO: 11276987 NR Description: actin depolymerizing factor 2
  misc_feature (1)..(66): NCBI GI NO: 30697300 NR Description: actin depolymerizing factor 4 - like protein
  misc_feature (1)..(66): NCBI GI NO: 15231309 NR Description: actin depolymerizing factor 1
  misc_feature (1)..(66): NCBI GI NO: 17366765 NR Description: Actin-depolymerizing factor 2 (ADF 2)
  misc_feature (1)..(66): NCBI GI NO: 4185511 NR Description: actin depolymerizing factor 4
  misc_feature (1)..(66): NCBI GI NO: 17366768 NR Description: Actin-depolymerizing factor 1 (ADF 1)
  misc_feature (1)..(66): NCBI GI NO: 30697295 NR Description: actin depolymerizing factor 3 - like protein
  misc_feature (1)..(66): NCBI GI NO: 22857914 NR Description: pollen specific actin-depolymerizing factor 2
  misc_feature (1)..(66): NCBI GI NO: 18402587 NR Description: actin depolymerizing factor 6
MELKAKRTFRTIVYKIEDKQVIVEKLGEPEQSYDDFAASLPADDCRYCIYDFDFVTAENCQKSKIFLHGLRTLPK

SEQ ID NO: 3725 - DNA, 1607 bp, Arabidopsis thaliana
  misc_feature (1)..(1607): Ceres Seq. ID no. 12330922
agacaaacagagagtgatgcgatggaacaagaagaacgttatcagtctcgtctcaaagtctcatcatcttccggcgccgattacgccaccgttacctgagatttaccgaatacctaatcctccaccaaagcttccggagatctcaattcctccgacacttacgctctctccatctcccaaacactccaatttcgtcaatttcctcgagaacaatctccctcaccatcaaacactaacgccacaaactcttcttggattcctccgttccaagatccgtcaccatccgctctacgctcattatgacttcgccgtctttaattgggcagctacactcgacactttccgtcatgatcacgattctttcctctggatgtcgagatcactcgccgccacgcaccggtttgacgatctttatcgtcttctctcttttgtagctgcgaatccatgtccttgttcctcaggtatattctcttgtccagagcttgaacctatttttccgatccgccattgatgcgtattgtagagctaggaaaatggattatgctttgttagcgtttgatactatgaagagattgatcgatggtaaaccaaatgttggagtttataacactgttgtgaatggatatgtgaaatctggagatatggataaggctttaaggttttaccagaggatgggaaaggaaagagcaaagccagatgtatgcacgtttaacattctcatcaatggttattgtagaagctctaagtttgatttggcattggatttgttcagggagatgaaggagaaaggttgtgaaccgaatgtggttagcttcaacactcttattagagggtttttgagcagtggtaaaatcgaggaaggtgttaaaatggcttatgagatgattgagctaggttgtagattctcagaagctacttgtgagattcttgttgatgggttgtgtagagaaggtcgggttgacgatgcttgtggattggtgctcgatcttttgaacaagagggttttacctagtgagtttgattatggtagtttggttgagaaactctgcggagaaaacaaggcggttagagcaatggagatgatggaggagctgtggaagaaaggccaaaccccatgtttcattgcttgtactacactcgtcgaagggttgaggaaatcaggaagaacagagaaagcgtcagggtttatggagaagatgatgaatgcaggaattcttcccgatagtgtgacatttaacttgcttcttcgggatctctgcagttctgatcattctactgatgcaaacagattgagacttttggcatcaagcaaaggatatgaacccgatgagacaacgtaccatgttttggtttcggggttcacgaaagaagggagaagaaaggaaggagaagttctagtgaacgagatgttggataaagatatgttgcctgatatctttacatataatagattgatggatggcttgtcctgcactggaaaattctcaaggaaacaagtccggatgttgtaacctgtgtttgatctgtgtaaactagacccaagctatatctatgtatcaacaaattttattttgaacatatgaaatggaaaccaagttggttctttg

SEQ ID NO: 3726 - protein, 325 aa, Arabidopsis thaliana
  peptide (1)..(325): Ceres Seq. ID no. 12330923
  misc_feature (162)..(196): Pfam Name: Pfam Description:  PPR repeat
  misc_feature (1)..(325): NCBI GI NO: 15227609 NR Description: putative salt-inducible protein
  misc_feature (1)..(311): NCBI GI NO: 20804895 NR Description: P0497A05.20
  misc_feature (1)..(316): NCBI GI NO: 15218325 NR Description: hypothetical protein; protein id: At1g09900.1
  misc_feature (1)..(319): NCBI GI NO: 34896698 NR Description: putative pentatricopeptide repeat protein
  misc_feature (1)..(310): NCBI GI NO: 15218241 NR Description: hypothetical protein; protein id: At1g09680.1
  misc_feature (1)..(319): NCBI GI NO: 22329519 NR Description: hypothetical protein; protein id: At1g12700.1
  misc_feature (1)..(319): NCBI GI NO: 25402738 NR Description: protein T12C24.22
  misc_feature (1)..(310): NCBI GI NO: 34902570 NR Description: Putative indole-3-acetate beta-glucosyltransferase
  misc_feature (1)..(319): NCBI GI NO: 34015356 NR Description: putative fertility restorer
  misc_feature (1)..(325): NCBI GI NO: 15231863 NR Description: putative protein; protein id: At3g53700
MDYALLAFDTMKRLIDGKPNVGVYNTVVNGYVKSGDMDKALRFYQRMGKERAKPDVCTFNILINGYCRSSKFDLALDLFREMKEKGCEPNVVSFNTLIRGFLSSGKIEEGVKMAYEMIELGCRFSEATCEILVDGLCREGRVDDACGLVLDLLNKRVLPSEFDYGSLVEKLCGENKAVRAMEMMEELWKKGQTPCFIACTTLVEGLRKSGRTEKASGFMEKMMNAGILPDSVTFNLLLRDLCSSDHSTDANRLRLLASSKGYEPDETTYHVLVSGFTKEGRRKEGEVLVNEMLDKDMLPDIFTYNRLMDGLSCTGKFSRKQVRML

SEQ ID NO: 3727 - protein, 315 aa, Arabidopsis thaliana
  peptide (1)..(315): Ceres Seq. ID no. 12330924
  misc_feature (152)..(186): Pfam Name: Pfam Description:  PPR repeat
  misc_feature (1)..(315): NCBI GI NO: 15227609 NR Description: putative salt-inducible protein
  misc_feature (1)..(301): NCBI GI NO: 20804895 NR Description: P0497A05.20
  misc_feature (1)..(306): NCBI GI NO: 15218325 NR Description: hypothetical protein; protein id: At1g09900.1
  misc_feature (1)..(309): NCBI GI NO: 34896698 NR Description: putative pentatricopeptide repeat protein
  misc_feature (1)..(300): NCBI GI NO: 15218241 NR Description: hypothetical protein; protein id: At1g09680.1
  misc_feature (1)..(309): NCBI GI NO: 22329519 NR Description: hypothetical protein; protein id: At1g12700.1
  misc_feature (1)..(309): NCBI GI NO: 25402738 NR Description: protein T12C24.22
  misc_feature (1)..(300): NCBI GI NO: 34902570 NR Description: Putative indole-3-acetate beta-glucosyltransferase
  misc_feature (1)..(309): NCBI GI NO: 34015356 NR Description: putative fertility restorer
  misc_feature (1)..(315): NCBI GI NO: 15231863 NR Description: putative protein; protein id: At3g53700
MKRLIDGKPNVGVYNTVVNGYVKSGDMDKALRFYQRMGKERAKPDVCTFNILINGYCRSSKFDLALDLFREMKEKGCEPNVVSFNTLIRGFLSSGKIEEGVKMAYEMIELGCRFSEATCEILVDGLCREGRVDDACGLVLDLLNKRVLPSEFDYGSLVEKLCGENKAVRAMEMMEELWKKGQTPCFIACTTLVEGLRKSGRTEKASGFMEKMMNAGILPDSVTFNLLLRDLCSSDHSTDANRLRLLASSKGYEPDETTYHVLVSGFTKEGRRKEGEVLVNEMLDKDMLPDIFTYNRLMDGLSCTGKFSRKQVRML

SEQ ID NO: 3728 - protein, 289 aa, Arabidopsis thaliana
  peptide (1)..(289): Ceres Seq. ID no. 12330925
  misc_feature (126)..(160): Pfam Name: Pfam Description:  PPR repeat
  misc_feature (1)..(289): NCBI GI NO: 15227609 NR Description: putative salt-inducible protein
  misc_feature (1)..(275): NCBI GI NO: 20804895 NR Description: P0497A05.20
  misc_feature (1)..(280): NCBI GI NO: 15218325 NR Description: hypothetical protein; protein id: At1g09900.1
  misc_feature (1)..(283): NCBI GI NO: 34896698 NR Description: putative pentatricopeptide repeat protein
  misc_feature (1)..(274): NCBI GI NO: 15218241 NR Description: hypothetical protein; protein id: At1g09680.1
  misc_feature (1)..(283): NCBI GI NO: 22329519 NR Description: hypothetical protein; protein id: At1g12700.1
  misc_feature (1)..(283): NCBI GI NO: 25402738 NR Description: protein T12C24.22
  misc_feature (1)..(274): NCBI GI NO: 34902570 NR Description: Putative indole-3-acetate beta-glucosyltransferase
  misc_feature (1)..(283): NCBI GI NO: 34015356 NR Description: putative fertility restorer
  misc_feature (1)..(289): NCBI GI NO: 15231863 NR Description: putative protein; protein id: At3g53700
MDKALRFYQRMGKERAKPDVCTFNILINGYCRSSKFDLALDLFREMKEKGCEPNVVSFNTLIRGFLSSGKIEEGVKMAYEMIELGCRFSEATCEILVDGLCREGRVDDACGLVLDLLNKRVLPSEFDYGSLVEKLCGENKAVRAMEMMEELWKKGQTPCFIACTTLVEGLRKSGRTEKASGFMEKMMNAGILPDSVTFNLLLRDLCSSDHSTDANRLRLLASSKGYEPDETTYHVLVSGFTKEGRRKEGEVLVNEMLDKDMLPDIFTYNRLMDGLSCTGKFSRKQVRML

SEQ ID NO: 3729 - DNA, 1292 bp, Arabidopsis thaliana
  misc_feature (1)..(1292): Ceres Seq. ID no. 12371013
atttccagttggaactttaattaattagatatgaactaaagcgttacgccacggaagaatttaggatctgttcgcagcatccgtttcaacgctaaatccaaacaacaaaagaagattagcaaaatcggattatcttctttgtttcttttcccttgacaagtcttcgtttttgaattagggtttttggacaattcttctcttcttcggctgcaaaaggttttcgcaagatatggctggctctgttggtgaggaaactgagccagaatgtattaagagagtgaaattagagggagctgttccatgtcttaagccagacgacaactgcaaaaatggttggacgacgccatctcctgacacatttatggttagaggaccaaagtatttctctgacaaagttaagatacctgctggtgatttccttctaaagcctctgggttttgattggattaaaggtcctaaaaagctttctgagatcctgagttatccaagcagccgaatcaggaaagttatcgatgaggagtttcaaaaagatggaactaagccttttgtctgggcattcaatctccagcttcctcacaaagacaattacagtgctgtggcttactttgttaccacagagcctatccttgaaggctccctgatggatcggtttttgaaaggagatgatgggttcaagaaatcgaggcttaaactgattgcaaacattgtcaaaggcccttggattgttagaaaagctgttggagagcaagcgatctgtgtgattggacgtgcactctcttgcaaatatgtttcaggggaaaactttgtggagattgatgtcgatattggttcttcaatggtcgctagtgccattgttcatctcgcatttggctacgttactacattgacagttgatcttgcgttcctcattgagagtcagaccgaagcagagcttccagaaaagctactaggagctgtgagattctctgagctgcagaccgagtcagccacatctatcgaactgtcctcaagcaccagtaatgaccagtgggatcaaactacctcagagcggtcgagctggtggaaatcgattggaaatggattctctaatctgcttaatcaagatacggccaacatgaacaatacttctcatggggacatccagaaggatgaacatgtacagaagcagtaagtgttttgggagttattaacttcacaattctttgaatttgttcgatttcattaccaaaaaacagaaacaaaaacttgtcaattctttaaaaaaaccacagatgtatagattggtttttact

SEQ ID NO: 3730 - protein, 313 aa, Arabidopsis thaliana
  peptide (1)..(313): Ceres Seq. ID no. 12371014
  misc_feature (1)..(313): NCBI GI NO: 25406892 NR Description: hypothetical protein
  misc_feature (1)..(313): NCBI GI NO: 21618178 NR Description: unknown [Arabidopsis thaliana]
  misc_feature (1)..(313): NCBI GI NO: 18390605 NR Description: expressed protein; protein id: At1g06050
  misc_feature (4)..(257): NCBI GI NO: 15238248 NR Description: putative protein; protein id: At5g10750
  misc_feature (4)..(257): NCBI GI NO: 22655107 NR Description: putative protein [Arabidopsis thaliana]
  misc_feature (21)..(257): NCBI GI NO: 21592409 NR Description: unknown [Arabidopsis thaliana]
  misc_feature (9)..(257): NCBI GI NO: 15238672 NR Description: putative protein; protein id: At5g24990
  misc_feature (29)..(258): NCBI GI NO: 8978350 NR Description: emb|CAB77600
  misc_feature (29)..(257): NCBI GI NO: 18421431 NR Description: putative protein; protein id: At5g35180
  misc_feature (26)..(257): NCBI GI NO: 37535414 NR Description: unknown protein
MAGSVGEETEPECIKRVKLEGAVPCLKPDDNCKNGWTTPSPDTFMVRGPKYFSDKVKIPAGDFLLKPLGFDWIKGPKKLSEILSYPSSRIRKVIDEEFQKDGTKPFVWAFNLQLPHKDNYSAVAYFVTTEPILEGSLMDRFLKGDDGFKKSRLKLIANIVKGPWIVRKAVGEQAICVIGRALSCKYVSGENFVEIDVDIGSSMVASAIVHLAFGYVTTLTVDLAFLIESQTEAELPEKLLGAVRFSELQTESATSIELSSSTSNDQWDQTTSERSSWWKSIGNGFSNLLNQDTANMNNTSHGDIQKDEHVQKQ

SEQ ID NO: 3731 - protein, 269 aa, Arabidopsis thaliana
  peptide (1)..(269): Ceres Seq. ID no. 12371015
  misc_feature (1)..(269): NCBI GI NO: 25406892 NR Description: hypothetical protein
  misc_feature (1)..(269): NCBI GI NO: 21618178 NR Description: unknown [Arabidopsis thaliana]
  misc_feature (1)..(269): NCBI GI NO: 18390605 NR Description: expressed protein; protein id: At1g06050
  misc_feature (1)..(213): NCBI GI NO: 15238248 NR Description: putative protein; protein id: At5g10750
  misc_feature (1)..(213): NCBI GI NO: 22655107 NR Description: putative protein [Arabidopsis thaliana]
  misc_feature (1)..(213): NCBI GI NO: 21592409 NR Description: unknown [Arabidopsis thaliana]
  misc_feature (1)..(213): NCBI GI NO: 15238672 NR Description: putative protein; protein id: At5g24990
  misc_feature (1)..(214): NCBI GI NO: 8978350 NR Description: emb|CAB77600
  misc_feature (1)..(213): NCBI GI NO: 18421431 NR Description: putative protein; protein id: At5g35180
  misc_feature (1)..(213): NCBI GI NO: 37535414 NR Description: unknown protein
MVRGPKYFSDKVKIPAGDFLLKPLGFDWIKGPKKLSEILSYPSSRIRKVIDEEFQKDGTKPFVWAFNLQLPHKDNYSAVAYFVTTEPILEGSLMDRFLKGDDGFKKSRLKLIANIVKGPWIVRKAVGEQAICVIGRALSCKYVSGENFVEIDVDIGSSMVASAIVHLAFGYVTTLTVDLAFLIESQTEAELPEKLLGAVRFSELQTESATSIELSSSTSNDQWDQTTSERSSWWKSIGNGFSNLLNQDTANMNNTSHGDIQKDEHVQKQ

SEQ ID NO: 3732 - protein, 176 aa, Arabidopsis thaliana
  peptide (1)..(176): Ceres Seq. ID no. 12371016
  misc_feature (1)..(176): NCBI GI NO: 25406892 NR Description: hypothetical protein
  misc_feature (1)..(176): NCBI GI NO: 21618178 NR Description: unknown [Arabidopsis thaliana]
  misc_feature (1)..(176): NCBI GI NO: 18390605 NR Description: expressed protein; protein id: At1g06050
  misc_feature (1)..(120): NCBI GI NO: 15238248 NR Description: putative protein; protein id: At5g10750
  misc_feature (1)..(120): NCBI GI NO: 22655107 NR Description: putative protein [Arabidopsis thaliana]
  misc_feature (1)..(120): NCBI GI NO: 21592409 NR Description: unknown [Arabidopsis thaliana]
  misc_feature (1)..(120): NCBI GI NO: 15238672 NR Description: putative protein; protein id: At5g24990
  misc_feature (1)..(121): NCBI GI NO: 8978350 NR Description: emb|CAB77600
  misc_feature (1)..(120): NCBI GI NO: 18421431 NR Description: putative protein; protein id: At5g35180
  misc_feature (1)..(120): NCBI GI NO: 37535414 NR Description: unknown protein
MDRFLKGDDGFKKSRLKLIANIVKGPWIVRKAVGEQAICVIGRALSCKYVSGENFVEIDVDIGSSMVASAIVHLAFGYVTTLTVDLAFLIESQTEAELPEKLLGAVRFSELQTESATSIELSSSTSNDQWDQTTSERSSWWKSIGNGFSNLLNQDTANMNNTSHGDIQKDEHVQKQ

SEQ ID NO: 3733 - DNA, 1998 bp, Arabidopsis thaliana
  misc_feature (1)..(1998): Ceres Seq. ID no. 12329724
agggatcactgttctccggctccggcgaaaaaatccctcgaaatcgatcctaacctcaattgattgaaggaagttatgtattcgctttcgaggattctccaaaggagtcaaagatataactttgcaccttcttcgtttggtgcggtcagtaaattagaagtatcaagtggtggtgataaagaacgggtctttaaatcatttggattgatttatagcaaacctcaaggtttagtcagactttattccgcaagagatgtgttttcacggttctttggcatccacaagctttcttctatagctgatgctaaagataaaggagatgaggtagttagggaagaggagctgtctgaatcagaggaggcggttcctgtttctggggatgtaccagagggagttgttgatgatgattctttgttcgagcctgaacttggtagtgacaatgatgatcttgaaattgaagtgaagcattcgaaagatggtgggaaaccaactaagaaaagaggtcaatctgagctgtacgaatccattgttgcttataaatcagtgaaacatgttcttgaaaaatgggtcaaagaaggaaaagatttgagtcaagctgaggttactcttgctatacacaatctgcgtaaacgcaaatcctatgctatgtgtttgcagttgtgggagtggttgggagctaatacgcagtttgagttcacagaggcaaattatgcttctcagttggatttggtggccaaggtacatagtttacaaaaagctgaaatctttttgaaagatattccagaatcttctaggggagaagtagtatacagaaccctgctggcaaattgtgtacttaagcatcatgtaaataaagctgaagacattttcaacaaaatgaaagagctaaaatttccaacaagtgtgtttgcttgcaaccagctgcttctcctctacagtatgcatgatagaaagaagataagtgatgttttgttgctaatggagagagaaaacatcaagccgagtcgtgctacctatcattttttaatcaatagtaaaggtttagccggagacataactggaatggagaagatcgtggagacaatgaaggaagaaggcatcgaactagatcctgaactgcagtctattctggctaagtactacataagagcggggcttaaagaaagagcacaagaccttatgaaggagatagaagggaaaggtttgcaacaaacaccatgggtgtgccggtcattactcccactttatgcagacataggagacagtgacaatgtgagaagactgagtaggtttgttgatcaaaatccgagatacgataattgcatttctgccattaaagcatggggaaagctgaaggaagtcgaagaagcagaggcagtgtttgagagacttgtggagaaatacaaaattttccctatgatgccatattttgccctcatggagatatacacagagaacaagatgctagcaaaaggcagagatctggttaaaagaatgggaaatgcagggattgcgattgggccgtcgacatggcacgcgcttgtgaagctatacatcaaagcaggagaagttggaaaagctgagttgatattgaacagagctacaaaggataataagatgagacctatgttcactacttacatggcgattcttgaagaatatgcaaaaagaggcgatgttcataacacagagaaggtattcatgaaaatgaaaagggcaagctatgcagctcagcttatgcagtatgaaaccgtgctcctggcttatatcaacgccaaaactcctgcttacgggatgattgagaggatgaaggcagacaatgtgttcccgaacaagagtctagctgcgaaactggctcaggttaatccgtttaaaaagtgtccagtgtctgttttacttgacatataacgataatcatcttatgtattgagctgttaagtgtttgttctggttgcctccaagctaggaaataataaaaagaggattcgtttttcttcc

SEQ ID NO: 3734 - protein, 610 aa, Arabidopsis thaliana
  peptide (1)..(610): Ceres Seq. ID no. 12329725
  misc_feature (243)..(277): Pfam Name: Pfam Description:  PPR repeat
  misc_feature (1)..(609): NCBI GI NO: 15220095 NR Description: hypothetical protein; protein id: At1g80270
  misc_feature (25)..(609): NCBI GI NO: 15218196 NR Description: hypothetical protein; protein id: At1g15480.1
  misc_feature (75)..(609): NCBI GI NO: 34903362 NR Description: unnamed protein product
  misc_feature (75)..(609): NCBI GI NO: 6958202 NR Description: DNA-binding protein [Triticum aestivum]
  misc_feature (99)..(593): NCBI GI NO: 34900334 NR Description: P0592C06.16
  misc_feature (240)..(593): NCBI GI NO: 34394024 NR Description: putative DNA-binding protein
  misc_feature (144)..(600): NCBI GI NO: 34905294 NR Description: putative DNA-binding protein
  misc_feature (129)..(597): NCBI GI NO: 15219808 NR Description: hypothetical protein; protein id: At1g60770.1
  misc_feature (115)..(583): NCBI GI NO: 15235508 NR Description: hypothetical protein; protein id: At4g02820
  misc_feature (115)..(583): NCBI GI NO: 17064738 NR Description: Unknown protein [Arabidopsis thaliana]
MYSLSRILQRSQRYNFAPSSFGAVSKLEVSSGGDKERVFKSFGLIYSKPQGLVRLYSARDVFSRFFGIHKLSSIADAKDKGDEVVREEELSESEEAVPVSGDVPEGVVDDDSLFEPELGSDNDDLEIEVKHSKDGGKPTKKRGQSELYESIVAYKSVKHVLEKWVKEGKDLSQAEVTLAIHNLRKRKSYAMCLQLWEWLGANTQFEFTEANYASQLDLVAKVHSLQKAEIFLKDIPESSRGEVVYRTLLANCVLKHHVNKAEDIFNKMKELKFPTSVFACNQLLLLYSMHDRKKISDVLLLMERENIKPSRATYHFLINSKGLAGDITGMEKIVETMKEEGIELDPELQSILAKYYIRAGLKERAQDLMKEIEGKGLQQTPWVCRSLLPLYADIGDSDNVRRLSRFVDQNPRYDNCISAIKAWGKLKEVEEAEAVFERLVEKYKIFPMMPYFALMEIYTENKMLAKGRDLVKRMGNAGIAIGPSTWHALVKLYIKAGEVGKAELILNRATKDNKMRPMFTTYMAILEEYAKRGDVHNTEKVFMKMKRASYAAQLMQYETVLLAYINAKTPAYGMIERMKADNVFPNKSLAAKLAQVNPFKKCPVSVLLDI

SEQ ID NO: 3735 - protein, 420 aa, Arabidopsis thaliana
  peptide (1)..(420): Ceres Seq. ID no. 12329726
  misc_feature (53)..(87): Pfam Name: Pfam Description:  PPR repeat
  misc_feature (1)..(419): NCBI GI NO: 15220095 NR Description: hypothetical protein; protein id: At1g80270
  misc_feature (1)..(419): NCBI GI NO: 15218196 NR Description: hypothetical protein; protein id: At1g15480.1
  misc_feature (1)..(419): NCBI GI NO: 34903362 NR Description: unnamed protein product
  misc_feature (1)..(419): NCBI GI NO: 6958202 NR Description: DNA-binding protein [Triticum aestivum]
  misc_feature (1)..(403): NCBI GI NO: 34900334 NR Description: P0592C06.16
  misc_feature (50)..(403): NCBI GI NO: 34394024 NR Description: putative DNA-binding protein
  misc_feature (1)..(410): NCBI GI NO: 34905294 NR Description: putative DNA-binding protein
  misc_feature (1)..(407): NCBI GI NO: 15219808 NR Description: hypothetical protein; protein id: At1g60770.1
  misc_feature (1)..(393): NCBI GI NO: 15235508 NR Description: hypothetical protein; protein id: At4g02820
  misc_feature (1)..(393): NCBI GI NO: 17064738 NR Description: Unknown protein [Arabidopsis thaliana]
MCLQLWEWLGANTQFEFTEANYASQLDLVAKVHSLQKAEIFLKDIPESSRGEVVYRTLLANCVLKHHVNKAEDIFNKMKELKFPTSVFACNQLLLLYSMHDRKKISDVLLLMERENIKPSRATYHFLINSKGLAGDITGMEKIVETMKEEGIELDPELQSILAKYYIRAGLKERAQDLMKEIEGKGLQQTPWVCRSLLPLYADIGDSDNVRRLSRFVDQNPRYDNCISAIKAWGKLKEVEEAEAVFERLVEKYKIFPMMPYFALMEIYTENKMLAKGRDLVKRMGNAGIAIGPSTWHALVKLYIKAGEVGKAELILNRATKDNKMRPMFTTYMAILEEYAKRGDVHNTEKVFMKMKRASYAAQLMQYETVLLAYINAKTPAYGMIERMKADNVFPNKSLAAKLAQVNPFKKCPVSVLLDI

SEQ ID NO: 3736 - protein, 343 aa, Arabidopsis thaliana
  peptide (1)..(343): Ceres Seq. ID no. 12329727
  misc_feature (1)..(342): NCBI GI NO: 15220095 NR Description: hypothetical protein; protein id: At1g80270
  misc_feature (1)..(342): NCBI GI NO: 15218196 NR Description: hypothetical protein; protein id: At1g15480.1
  misc_feature (1)..(342): NCBI GI NO: 34903362 NR Description: unnamed protein product
  misc_feature (1)..(342): NCBI GI NO: 6958202 NR Description: DNA-binding protein [Triticum aestivum]
  misc_feature (1)..(326): NCBI GI NO: 34900334 NR Description: P0592C06.16
  misc_feature (1)..(326): NCBI GI NO: 34394024 NR Description: putative DNA-binding protein
  misc_feature (1)..(333): NCBI GI NO: 34905294 NR Description: putative DNA-binding protein
  misc_feature (1)..(330): NCBI GI NO: 15219808 NR Description: hypothetical protein; protein id: At1g60770.1
  misc_feature (1)..(316): NCBI GI NO: 15235508 NR Description: hypothetical protein; protein id: At4g02820
  misc_feature (1)..(316): NCBI GI NO: 17064738 NR Description: Unknown protein [Arabidopsis thaliana]
MKELKFPTSVFACNQLLLLYSMHDRKKISDVLLLMERENIKPSRATYHFLINSKGLAGDITGMEKIVETMKEEGIELDPELQSILAKYYIRAGLKERAQDLMKEIEGKGLQQTPWVCRSLLPLYADIGDSDNVRRLSRFVDQNPRYDNCISAIKAWGKLKEVEEAEAVFERLVEKYKIFPMMPYFALMEIYTENKMLAKGRDLVKRMGNAGIAIGPSTWHALVKLYIKAGEVGKAELILNRATKDNKMRPMFTTYMAILEEYAKRGDVHNTEKVFMKMKRASYAAQLMQYETVLLAYINAKTPAYGMIERMKADNVFPNKSLAAKLAQVNPFKKCPVSVLLDI

SEQ ID NO: 3737 - DNA, 1371 bp, Arabidopsis thaliana
  misc_feature (1)..(1371): Ceres Seq. ID no. 12328756
ataaaatggcgcaaagtgtgaaagttgaaacatatcctcatatttagcatcactcctctaatattattttttcaaacaagaacaatggcaaaccatctccaagtccccttaaccaaaccggatcgagttaaagaagaacaagaggttgaagaagaggcaagattgctagcgagaaggctcgcgaatgcagccgcattacctatggttctcaaagccgccttggagctcggcgtgatcgacaccatcaccacagtaggaggtggcgatttgtggctctcaccttctgaaatagcactaagactcccaaccaaaccatgcaacctggaagctccggttttgctagaccgtatgcttcgatttctcgtcagccattcggtcttaaaatgccgtactgtaatagaagagaacggtcaaaccggaaaagttgagagggtatatgcagctgaaccggtctgcaaatatctcttgaacaaaagtgacgacgtctcgggttcttttgcatcgctctttatgcttgacctcagcgacgtatttatcaagacatggacacatctcaaagatgtgatattagcaggaagagatgcatttagttctgcccatgggatgaaactattcgaatacatccaagccgatgagcgatttggtaaagtgtttaaccgggctatgttggaatcttccaccatggttacggagaaggttcttaaattttatgaaggattcaaagatgtgaagactttggtggatgtagggggaggacttggcaacacactaggtctcatcacttccaagtatcctcatcttattggtatcaatttcgatttagctccggtgttagccaatgctcattcttatcccggtgtgaaccatgtggctggtgatatgttcatcaagattccaaagggggatgccattttcatgaagtggatactacatgattggacggacgaacaatgcgtagcaattcttaaaaactgttggaaaagtctcgaagaaaatggaaaactgataatagtggaaatggttacaccggtggaagcaaagagcggagatatatgttctaacattgtgtttggtatggacatgacaatgttaacacaatgttcaggtggtaaagagagatctctctatgagtttgaaaatttagcatatgcatcgggtttttctcgttgtgcaatcgtatgcgctgtttatccattttccgtcatcgaaatctacaaatagattcattcaacatatgccattttacgatatttacacaacccgtttcttcttctatttgggatgtaatgtttgtgattatcatttgtgtgtggtcgatcttttgtaatgttttcgtgtgatgttcttaccgttgtaatgatatatgtgtct

SEQ ID NO: 3738 - protein, 378 aa, Arabidopsis thaliana
  peptide (1)..(378): Ceres Seq. ID no. 12328757
  misc_feature (111)..(355): Pfam Name: Pfam Description:  O-methyltransferase
  misc_feature (1)..(378): NCBI GI NO: 21618183 NR Description: caffeic acid 3-O-methyltransferase-like protein
  misc_feature (1)..(378): NCBI GI NO: 15238847 NR Description: O-methyltransferase 1, putative
  misc_feature (1)..(378): NCBI GI NO: 15223977 NR Description: O-methyltransferase, family 2 family
  misc_feature (1)..(378): NCBI GI NO: 27808586 NR Description: At1g77520 [Arabidopsis thaliana]
  misc_feature (1)..(378): NCBI GI NO: 15223976 NR Description: O-methyltransferase, family 2 family
  misc_feature (40)..(378): NCBI GI NO: 21593350 NR Description: putative caffeic acid 3-O-methyltransferase
  misc_feature (1)..(378): NCBI GI NO: 25315953 NR Description: hypothetical protein F16M19.12
  misc_feature (22)..(378): NCBI GI NO: 21618219 NR Description: O-methyltransferase, putative
  misc_feature (22)..(378): NCBI GI NO: 15218133 NR Description: O-methyltransferase 1, putative
  misc_feature (22)..(378): NCBI GI NO: 15218138 NR Description: O-methyltransferase 1, putative
MANHLQVPLTKPDRVKEEQEVEEEARLLARRLANAAALPMVLKAALELGVIDTITTVGGGDLWLSPSEIALRLPTKPCNLEAPVLLDRMLRFLVSHSVLKCRTVIEENGQTGKVERVYAAEPVCKYLLNKSDDVSGSFASLFMLDLSDVFIKTWTHLKDVILAGRDAFSSAHGMKLFEYIQADERFGKVFNRAMLESSTMVTEKVLKFYEGFKDVKTLVDVGGGLGNTLGLITSKYPHLIGINFDLAPVLANAHSYPGVNHVAGDMFIKIPKGDAIFMKWILHDWTDEQCVAILKNCWKSLEENGKLIIVEMVTPVEAKSGDICSNIVFGMDMTMLTQCSGGKERSLYEFENLAYASGFSRCAIVCAVYPFSVIEIYK

SEQ ID NO: 3739 - protein, 339 aa, Arabidopsis thaliana
  peptide (1)..(339): Ceres Seq. ID no. 12328758
  misc_feature (72)..(316): Pfam Name: Pfam Description:  O-methyltransferase
  misc_feature (1)..(339): NCBI GI NO: 21618183 NR Description: caffeic acid 3-O-methyltransferase-like protein
  misc_feature (1)..(339): NCBI GI NO: 15238847 NR Description: O-methyltransferase 1, putative
  misc_feature (1)..(339): NCBI GI NO: 15223977 NR Description: O-methyltransferase, family 2 family
  misc_feature (1)..(339): NCBI GI NO: 27808586 NR Description: At1g77520 [Arabidopsis thaliana]
  misc_feature (1)..(339): NCBI GI NO: 15223976 NR Description: O-methyltransferase, family 2 family
  misc_feature (1)..(339): NCBI GI NO: 21593350 NR Description: putative caffeic acid 3-O-methyltransferase
  misc_feature (1)..(339): NCBI GI NO: 25315953 NR Description: hypothetical protein F16M19.12
  misc_feature (1)..(339): NCBI GI NO: 21618219 NR Description: O-methyltransferase, putative
  misc_feature (1)..(339): NCBI GI NO: 15218133 NR Description: O-methyltransferase 1, putative
  misc_feature (1)..(339): NCBI GI NO: 15218138 NR Description: O-methyltransferase 1, putative
MVLKAALELGVIDTITTVGGGDLWLSPSEIALRLPTKPCNLEAPVLLDRMLRFLVSHSVLKCRTVIEENGQTGKVERVYAAEPVCKYLLNKSDDVSGSFASLFMLDLSDVFIKTWTHLKDVILAGRDAFSSAHGMKLFEYIQADERFGKVFNRAMLESSTMVTEKVLKFYEGFKDVKTLVDVGGGLGNTLGLITSKYPHLIGINFDLAPVLANAHSYPGVNHVAGDMFIKIPKGDAIFMKWILHDWTDEQCVAILKNCWKSLEENGKLIIVEMVTPVEAKSGDICSNIVFGMDMTMLTQCSGGKERSLYEFENLAYASGFSRCAIVCAVYPFSVIEIYK

SEQ ID NO: 3740 - protein, 290 aa, Arabidopsis thaliana
  peptide (1)..(290): Ceres Seq. ID no. 12328759
  misc_feature (23)..(267): Pfam Name: Pfam Description:  O-methyltransferase
  misc_feature (1)..(290): NCBI GI NO: 21618183 NR Description: caffeic acid 3-O-methyltransferase-like protein
  misc_feature (1)..(290): NCBI GI NO: 15238847 NR Description: O-methyltransferase 1, putative
  misc_feature (1)..(290): NCBI GI NO: 15223977 NR Description: O-methyltransferase, family 2 family
  misc_feature (1)..(290): NCBI GI NO: 27808586 NR Description: At1g77520 [Arabidopsis thaliana]
  misc_feature (1)..(290): NCBI GI NO: 15223976 NR Description: O-methyltransferase, family 2 family
  misc_feature (1)..(290): NCBI GI NO: 21593350 NR Description: putative caffeic acid 3-O-methyltransferase
  misc_feature (1)..(290): NCBI GI NO: 25315953 NR Description: hypothetical protein F16M19.12
  misc_feature (1)..(290): NCBI GI NO: 21618219 NR Description: O-methyltransferase, putative
  misc_feature (1)..(290): NCBI GI NO: 15218133 NR Description: O-methyltransferase 1, putative
  misc_feature (1)..(290): NCBI GI NO: 15218138 NR Description: O-methyltransferase 1, putative
MLRFLVSHSVLKCRTVIEENGQTGKVERVYAAEPVCKYLLNKSDDVSGSFASLFMLDLSDVFIKTWTHLKDVILAGRDAFSSAHGMKLFEYIQADERFGKVFNRAMLESSTMVTEKVLKFYEGFKDVKTLVDVGGGLGNTLGLITSKYPHLIGINFDLAPVLANAHSYPGVNHVAGDMFIKIPKGDAIFMKWILHDWTDEQCVAILKNCWKSLEENGKLIIVEMVTPVEAKSGDICSNIVFGMDMTMLTQCSGGKERSLYEFENLAYASGFSRCAIVCAVYPFSVIEIYK

SEQ ID NO: 3741 - DNA, 1524 bp, Arabidopsis thaliana
  misc_feature (1)..(1524): Ceres Seq. ID no. 12331033
aatcataggcatagcaaaactcttccaaaatgtctgatttctcgagctccgtgaagcttaaatatgttaaactcggttaccaataccttatcaacaacttccttactcttcttttgattccagtcatagcaaccgtcgccatcgagcttctccgaatgggtccggaagagattctcagtgtcttgaactcactccacttcgagcttcttcatatcctttgttcctctttccttattatctttgtttcaaccgtttacttcatgtccaagccacgtaccgtctaccttgtggactactcttgctacaaacctcctgtcacgtgccgtgtcccgttctcttcgttcatggaacactctcgtctcatcctcaaagacaatcccaagagtgtcgaattccaaatgagaatcctcgagcgatcaggtctaggagaagagacttgtctccctccagctattcattacatccctccaactccaaccatggaatccgcaagaaacgaggcccaaatggttatcttcaccgccatggaagatctcttcaagaatacaggtcttaaacctaaagacatcgacatcctcattgttaattgctctctgttctcaccaacgccgtctctctccgctatgattatcaacaagtacaagcttaggagtaacatcaaaagctataacctttccgggatgggatgcagcgctagtcttatctcagttgatgtagcacgtaatttgttacaagtccatcctaactccaacgcaatcataattagcactgagatcattactcctaattactataagggtaatgagagagccatgttgctcccaaactgcctcttccgtatgggaggcgccgccattctcctctctaaccgcagatccgacaggtggcgagctaagtacaagttatgccaccttgttaggacccatcgcggtgcggatgacaaatcctacaactgtgttatggaacaggaagacaaaaatggtaacgtgggaatcaacttgtctaaagatctcatgaccattgccggagaagccttgaaagctaatatcactaccataggtcctttggtccttccggcatccggagcagcttctcttcctctcatcccttatcggacgtaaaatcttcaatccaaagtggaagccgtacataccagatttcaagcaggccttcgagcatttctgcatccacgcaggaggaagagcggtgattgatgagctgcaaaagaatctacagctgtcgggagaacacgtggaagcttcaagaatgacactacataggtttggtaatacatcgtcgtcatcattatggtatgagcttagctacatagaggctcaagggaggatgaagagaaacgatagggtttggcagatcgctttcggaagtggattcaagtgtaactccgccgtttggaaatgtaaccgtacgatcaagacaccaacggatggagcgtggtcggattgtatcgaacgataccctgtctttatccctgaagttgttaaactatgaaaatacttttttttt

SEQ ID NO: 3742 - protein, 363 aa, Arabidopsis thaliana
  peptide (1)..(363): Ceres Seq. ID no. 12331034
  misc_feature (106)..(277): Pfam Name: Pfam Description:  Chalcone and stilbene synthases
  misc_feature (1)..(351): NCBI GI NO: 21618184 NR Description: fatty acid condensing enzyme CUT1, putative
  misc_feature (1)..(351): NCBI GI NO: 15222592 NR Description: fatty acid condensing enzyme CUT1, putative
  misc_feature (1)..(351): NCBI GI NO: 28393607 NR Description: putative fatty acid condensing enzyme CUT1
  misc_feature (1)..(351): NCBI GI NO: 17979464 NR Description: At1g68530/T26J14_10 [Arabidopsis thaliana]
  misc_feature (1)..(351): NCBI GI NO: 15221431 NR Description: very-long-chain fatty acid condensing enzyme
  misc_feature (1)..(351): NCBI GI NO: 21593111 NR Description: very-long-chain fatty acid condensing enzyme CUT1
  misc_feature (1)..(351): NCBI GI NO: 15226724 NR Description: putative beta-ketoacyl-CoA synthase
  misc_feature (1)..(351): NCBI GI NO: 15223556 NR Description: very-long-chain fatty acid condensing enzyme CUT1
  misc_feature (1)..(344): NCBI GI NO: 30697701 NR Description: very-long-chain fatty acid condensing enzyme
  misc_feature (1)..(351): NCBI GI NO: 29417540 NR Description: beta-ketoacyl-CoA-synthase [Marchantia polymorpha]
MSDFSSSVKLKYVKLGYQYLINNFLTLLLIPVIATVAIELLRMGPEEILSVLNSLHFELLHILCSSFLIIFVSTVYFMSKPRTVYLVDYSCYKPPVTCRVPFSSFMEHSRLILKDNPKSVEFQMRILERSGLGEETCLPPAIHYIPPTPTMESARNEAQMVIFTAMEDLFKNTGLKPKDIDILIVNCSLFSPTPSLSAMIINKYKLRSNIKSYNLSGMGCSASLISVDVARNLLQVHPNSNAIIISTEIITPNYYKGNERAMLLPNCLFRMGGAAILLSNRRSDRWRAKYKLCHLVRTHRGADDKSYNCVMEQEDKNGNVGINLSKDLMTIAGEALKANITTIGPLVLPASGAASLPLIPYRT

SEQ ID NO: 3743 - protein, 321 aa, Arabidopsis thaliana
  peptide (1)..(321): Ceres Seq. ID no. 12331035
  misc_feature (64)..(235): Pfam Name: Pfam Description:  Chalcone and stilbene synthases
  misc_feature (1)..(309): NCBI GI NO: 21618184 NR Description: fatty acid condensing enzyme CUT1, putative
  misc_feature (1)..(309): NCBI GI NO: 15222592 NR Description: fatty acid condensing enzyme CUT1, putative
  misc_feature (1)..(309): NCBI GI NO: 28393607 NR Description: putative fatty acid condensing enzyme CUT1
  misc_feature (1)..(309): NCBI GI NO: 17979464 NR Description: At1g68530/T26J14_10 [Arabidopsis thaliana]
  misc_feature (1)..(309): NCBI GI NO: 15221431 NR Description: very-long-chain fatty acid condensing enzyme
  misc_feature (1)..(309): NCBI GI NO: 21593111 NR Description: very-long-chain fatty acid condensing enzyme CUT1
  misc_feature (1)..(309): NCBI GI NO: 15226724 NR Description: putative beta-ketoacyl-CoA synthase
  misc_feature (1)..(309): NCBI GI NO: 15223556 NR Description: very-long-chain fatty acid condensing enzyme CUT1
  misc_feature (1)..(302): NCBI GI NO: 30697701 NR Description: very-long-chain fatty acid condensing enzyme
  misc_feature (1)..(309): NCBI GI NO: 29417540 NR Description: beta-ketoacyl-CoA-synthase [Marchantia polymorpha]
MGPEEILSVLNSLHFELLHILCSSFLIIFVSTVYFMSKPRTVYLVDYSCYKPPVTCRVPFSSFMEHSRLILKDNPKSVEFQMRILERSGLGEETCLPPAIHYIPPTPTMESARNEAQMVIFTAMEDLFKNTGLKPKDIDILIVNCSLFSPTPSLSAMIINKYKLRSNIKSYNLSGMGCSASLISVDVARNLLQVHPNSNAIIISTEIITPNYYKGNERAMLLPNCLFRMGGAAILLSNRRSDRWRAKYKLCHLVRTHRGADDKSYNCVMEQEDKNGNVGINLSKDLMTIAGEALKANITTIGPLVLPASGAASLPLIPYRT

SEQ ID NO: 3744 - protein, 286 aa, Arabidopsis thaliana
  peptide (1)..(286): Ceres Seq. ID no. 12331036
  misc_feature (29)..(200): Pfam Name: Pfam Description:  Chalcone and stilbene synthases
  misc_feature (1)..(274): NCBI GI NO: 21618184 NR Description: fatty acid condensing enzyme CUT1, putative
  misc_feature (1)..(274): NCBI GI NO: 15222592 NR Description: fatty acid condensing enzyme CUT1, putative
  misc_feature (1)..(274): NCBI GI NO: 28393607 NR Description: putative fatty acid condensing enzyme CUT1
  misc_feature (1)..(274): NCBI GI NO: 17979464 NR Description: At1g68530/T26J14_10 [Arabidopsis thaliana]
  misc_feature (1)..(274): NCBI GI NO: 15221431 NR Description: very-long-chain fatty acid condensing enzyme
  misc_feature (1)..(274): NCBI GI NO: 21593111 NR Description: very-long-chain fatty acid condensing enzyme CUT1
  misc_feature (1)..(274): NCBI GI NO: 15226724 NR Description: putative beta-ketoacyl-CoA synthase
  misc_feature (1)..(274): NCBI GI NO: 15223556 NR Description: very-long-chain fatty acid condensing enzyme CUT1
  misc_feature (1)..(267): NCBI GI NO: 30697701 NR Description: very-long-chain fatty acid condensing enzyme
  misc_feature (1)..(274): NCBI GI NO: 29417540 NR Description: beta-ketoacyl-CoA-synthase [Marchantia polymorpha]
MSKPRTVYLVDYSCYKPPVTCRVPFSSFMEHSRLILKDNPKSVEFQMRILERSGLGEETCLPPAIHYIPPTPTMESARNEAQMVIFTAMEDLFKNTGLKPKDIDILIVNCSLFSPTPSLSAMIINKYKLRSNIKSYNLSGMGCSASLISVDVARNLLQVHPNSNAIIISTEIITPNYYKGNERAMLLPNCLFRMGGAAILLSNRRSDRWRAKYKLCHLVRTHRGADDKSYNCVMEQEDKNGNVGINLSKDLMTIAGEALKANITTIGPLVLPASGAASLPLIPYRT

SEQ ID NO: 3745 - DNA, 972 bp, Arabidopsis thaliana
  misc_feature (1)..(972): Ceres Seq. ID no. 12422442
acacaaatagaaataacttgtaatcaaccaaagtcgaaaaacagagttattttgtcggatcaatggtgaagattgagataggaagtgtgggtgactcctttagtgtagcatctcttaaggcttacttgtctgaatttatcgcaactcttctctttgtgtttgctggcgttggctctgctcttgcttttgccaagctcacatccgatgcagccttggaccccgctggtcttgtcgctgtcgctgtggctcacgcctttgcccttttcgttggtgtttccatagccgccaacatctccggcggacaccttaaccccgccgtgacactcggtctcgccgtcggtggcaacatcacagtaataaccggtttcttttactggattgctcaatgccttggctccatcgtcgcgtgtctcctcctcgtcttcgttaccaatggcgagagcgtaccgactcatggagtagcggccggtttaggagctattgaaggagtagtgatggagattgtggtgacctttgctctggtctacacagtctacgccacagcggctgatccaaagaaaggttcactcgggaccattgctccaattgctatcggtttcatcgttggtgccaacatcctcgcagcgggtccctttagcggtggttccatgaacccggccaggtcatttggaccagctgttgtcagtggtgacttctctcagatatggatctactgggtgggtccactagtcggtggtgcacttgctggactcatctacggagacgtcttcatcggatcctacgctccagctcccaccacagaaagctacccttgatcaatcctatagcgttttaatttgcttggcttgctttttgttgtatgaaaatgtttggtcctcgtttcttccaaaaatgaatgattgaatgtggagaaaaagatcaaagttgtactttgtgttggttataaataagaattgtatattttcaaatttt

SEQ ID NO: 3746 - protein, 250 aa, Arabidopsis thaliana
  peptide (1)..(250): Ceres Seq. ID no. 12422443
  misc_feature (1)..(250): NCBI GI NO: 15236043 NR Description: membrane channel like protein
  misc_feature (1)..(247): NCBI GI NO: 15238100 NR Description: membrane channel protein-like; aquaporin
  misc_feature (1)..(249): NCBI GI NO: 461929 NR Description: PROBABLE TONOPLAST INTRINSIC PROTEIN DIP
  misc_feature (1)..(249): NCBI GI NO: 126959 NR Description: Tonoplast intrinsic protein, root-specific RB7-5A
  misc_feature (1)..(249): NCBI GI NO: 267135 NR Description: TONOPLAST INTRINSIC PROTEIN
  misc_feature (1)..(249): NCBI GI NO: 11276918 NR Description: membrane channel protein
  misc_feature (1)..(249): NCBI GI NO: 2058706 NR Description: Rb7 [Lycopersicon esculentum]
  misc_feature (1)..(242): NCBI GI NO: 7441268 NR Description: probable membrane protein - carrot
  misc_feature (1)..(249): NCBI GI NO: 7441272 NR Description: aquaporin TIP7 - common sunflower
  misc_feature (7)..(233): NCBI GI NO: 1076687 NR Description: integral membrane protein - garden snapdragon
MVKIEIGSVGDSFSVASLKAYLSEFIATLLFVFAGVGSALAFAKLTSDAALDPAGLVAVAVAHAFALFVGVSIAANISGGHLNPAVTLGLAVGGNITVITGFFYWIAQCLGSIVACLLLVFVTNGESVPTHGVAAGLGAIEGVVMEIVVTFALVYTVYATAADPKKGSLGTIAPIAIGFIVGANILAAGPFSGGSMNPARSFGPAVVSGDFSQIWIYWVGPLVGGALAGLIYGDVFIGSYAPAPTTESYP

SEQ ID NO: 3747 - DNA, 864 bp, Arabidopsis thaliana
  misc_feature (1)..(864): Ceres Seq. ID no. 12385261
aaattagttcgtcgaagcatcgagaaaatgatcgtactttctgttggttccgcttcttcatctccgatcgtcgtcgtcttttccgtcgctcttcttctgttctacttctctgaaacttctctaggagctccttgtcacatcaatggcttgccaatcgtgaggaatattagtgaccttcctcaggataactatggaagaccaggtctttcccacatgactgttgctggctccgtattgcatggaatgaaagaggttgaaatatggcttcagacatttgctccaggttcagagacaccaattcacaggcactcctgtgaagaggtttttgttgtcctaaagggcagtggtactctgtatctcgctgaaacacatggaaatttccctgggaaaccaatcgaatttccaatctttgccaacagtacaattcatattccgatcaatgatgctcatcaggtcaaaaacaccggtcatgaggacctgcaggtgttggttatcatatctcggccgcctattaaaatcttcatctacgaagactggtttatgccacacactgctgcaaggctgaagttcccttactattgggatgagcaatgcattcaagaatcacaaaaagacgagctttaaagcaaagtccgaggctaaaagcaagcacaacctttagatagtaaaatcatagttgaggttttgtgacactacgtagatactggtaaattggcaaggattttacatgaatgttgttgttaccagaaagtaaataaatgttcaatctttgatgttcttaagtaagtgagtcctattggtcatgaaaatatgtaagtgtgcacatcttgattgcatttgcgataaatttatagagtttcactc

SEQ ID NO: 3748 - protein, 207 aa, Arabidopsis thaliana
  peptide (1)..(207): Ceres Seq. ID no. 12385262
  misc_feature (42)..(207): Pfam Name: Pfam Description:  Auxin binding protein
  misc_feature (10)..(207): NCBI GI NO: 15236229 NR Description: auxin-binding protein 1 precursor
  misc_feature (10)..(207): NCBI GI NO: 21592915 NR Description: auxin-binding protein 1 precursor
  misc_feature (10)..(207): NCBI GI NO: 22122218 NR Description: resistant endoplasmic reticulum auxin-binding protein 1
  misc_feature (10)..(207): NCBI GI NO: 22122222 NR Description: susceptible endoplasmic reticulum auxin-binding protein 1b
  misc_feature (10)..(207): NCBI GI NO: 22122220 NR Description: susceptible endoplasmic reticulum auxin-binding protein 1a
  misc_feature (10)..(207): NCBI GI NO: 22122216 NR Description: resistant endoplasmic reticulum auxin-binding protein 2
  misc_feature (10)..(207): NCBI GI NO: 22122224 NR Description: susceptible endoplasmic reticulum auxin-binding protein 2
  misc_feature (10)..(207): NCBI GI NO: 7442015 NR Description: auxin-binding protein precursor - radish
  misc_feature (21)..(207): NCBI GI NO: 1843533 NR Description: auxin binding protein [Malus x domestica]
  misc_feature (25)..(207): NCBI GI NO: 461449 NR Description: AUXIN-BINDING PROTEIN T85 PRECURSOR (ABP)
KLVRRSIEKMIVLSVGSASSSPIVVVFSVALLLFYFSETSLGAPCHINGLPIVRNISDLPQDNYGRPGLSHMTVAGSVLHGMKEVEIWLQTFAPGSETPIHRHSCEEVFVVLKGSGTLYLAETHGNFPGKPIEFPIFANSTIHIPINDAHQVKNTGHEDLQVLVIISRPPIKIFIYEDWFMPHTAARLKFPYYWDEQCIQESQKDEL

SEQ ID NO: 3749 - protein, 198 aa, Arabidopsis thaliana
  peptide (1)..(198): Ceres Seq. ID no. 12385263
  misc_feature (33)..(198): Pfam Name: Pfam Description:  Auxin binding protein
  misc_feature (1)..(198): NCBI GI NO: 15236229 NR Description: auxin-binding protein 1 precursor
  misc_feature (1)..(198): NCBI GI NO: 21592915 NR Description: auxin-binding protein 1 precursor
  misc_feature (1)..(198): NCBI GI NO: 22122218 NR Description: resistant endoplasmic reticulum auxin-binding protein 1
  misc_feature (1)..(198): NCBI GI NO: 22122222 NR Description: susceptible endoplasmic reticulum auxin-binding protein 1b
  misc_feature (1)..(198): NCBI GI NO: 22122220 NR Description: susceptible endoplasmic reticulum auxin-binding protein 1a
  misc_feature (1)..(198): NCBI GI NO: 22122216 NR Description: resistant endoplasmic reticulum auxin-binding protein 2
  misc_feature (1)..(198): NCBI GI NO: 22122224 NR Description: susceptible endoplasmic reticulum auxin-binding protein 2
  misc_feature (1)..(198): NCBI GI NO: 7442015 NR Description: auxin-binding protein precursor - radish
  misc_feature (12)..(198): NCBI GI NO: 1843533 NR Description: auxin binding protein [Malus x domestica]
  misc_feature (16)..(198): NCBI GI NO: 461449 NR Description: AUXIN-BINDING PROTEIN T85 PRECURSOR (ABP)
MIVLSVGSASSSPIVVVFSVALLLFYFSETSLGAPCHINGLPIVRNISDLPQDNYGRPGLSHMTVAGSVLHGMKEVEIWLQTFAPGSETPIHRHSCEEVFVVLKGSGTLYLAETHGNFPGKPIEFPIFANSTIHIPINDAHQVKNTGHEDLQVLVIISRPPIKIFIYEDWFMPHTAARLKFPYYWDEQCIQESQKDEL

SEQ ID NO: 3750 - protein, 136 aa, Arabidopsis thaliana
  peptide (1)..(136): Ceres Seq. ID no. 12385264
  misc_feature (1)..(136): Pfam Name: Pfam Description:  Auxin binding protein
  misc_feature (1)..(136): NCBI GI NO: 15236229 NR Description: auxin-binding protein 1 precursor
  misc_feature (1)..(136): NCBI GI NO: 21592915 NR Description: auxin-binding protein 1 precursor
  misc_feature (1)..(136): NCBI GI NO: 22122218 NR Description: resistant endoplasmic reticulum auxin-binding protein 1
  misc_feature (1)..(136): NCBI GI NO: 22122222 NR Description: susceptible endoplasmic reticulum auxin-binding protein 1b
  misc_feature (1)..(136): NCBI GI NO: 22122220 NR Description: susceptible endoplasmic reticulum auxin-binding protein 1a
  misc_feature (1)..(136): NCBI GI NO: 22122216 NR Description: resistant endoplasmic reticulum auxin-binding protein 2
  misc_feature (1)..(136): NCBI GI NO: 22122224 NR Description: susceptible endoplasmic reticulum auxin-binding protein 2
  misc_feature (1)..(136): NCBI GI NO: 7442015 NR Description: auxin-binding protein precursor - radish
  misc_feature (1)..(136): NCBI GI NO: 1843533 NR Description: auxin binding protein [Malus x domestica]
  misc_feature (1)..(136): NCBI GI NO: 461449 NR Description: AUXIN-BINDING PROTEIN T85 PRECURSOR (ABP)
MTVAGSVLHGMKEVEIWLQTFAPGSETPIHRHSCEEVFVVLKGSGTLYLAETHGNFPGKPIEFPIFANSTIHIPINDAHQVKNTGHEDLQVLVIISRPPIKIFIYEDWFMPHTAARLKFPYYWDEQCIQESQKDEL

SEQ ID NO: 3751 - DNA, 3238 bp, Arabidopsis thaliana
  misc_feature (1)..(3238): Ceres Seq. ID no. 12328934
aaaacagaggaagtgataagaggttctttttgggtttgaagatgagttcaagaactggagcctctttgctcctgatcttgtttttcttccaaatttgttctgtttcggcactcacgaatggtttagacgcttctgctttaaatgctctgaagagtgaatggaccactcctcctgatggttgggaaggctctgatccttgtggaaccaattgggttggaattacatgtcaaaatgaccgcgtcgtttcaatatcactaggtaaccttgacttggaaggaaagcttcctgccgatatatcgttcttgtccgagttgcggatcttggatttgtcatacaatcctaaattgtccggaccgcttccaccaaacatcggtaaccttgggaagttaaggaacttgatccttgtgggatgtagtttcagtggtcaaatccctgagtccattggaactctaaaagaacttatatatctctccctaaatttaaataaatttagtggaacaattccgccttcaattggcctgttatcaaaactatattggtttgatatagctgacaatcagattgaaggagagcttccagtttctaatgggacttctgcacctggacttgacatgcttcttcaaactaagcattttcattttggaaaaaacaagctttcaggcaatatcccaaaagaacttttcagctcaaacatgagtttaatacatgtcctcttcgatggaaaccaattcacgggcgaaattccagagaccctcagtctcgttaaaacgttgacggtgttacgccttgataggaacaaactcattggagatattccttcatatcttaacaatctcacaaatcttaacgaactgtacttggccaacaacagatttactggtactcttccaaatttaaccagcttgaccagtctctacacattggatgtgagcaataacactttggatttctcacccattccatcatggatctcttcattaccctccctatcaacattaaggatggaagggatccaacttaatggtccaataccaatctcatttttcagccctcctcagttgcagactgttatcttaaagcgaaatagtatagtggaaagcttagactttggtacagacgttagcagccagttggagtttgtggatttacaatacaatgaaataactgattataaaccatcagctaataaagtcctccaagtaatattggcaaataatccagtgtgtctagaggcgggaaacgggccgagttactgttcagcaatccaacacaatacctcattttctacactcccaacaaactgttctccatgcgaaccgggcatggaagcgagtcccacgtgccgctgtgcgtatccattcatgggaacactctacttccggtctccttctttctcagggttgttcaactccaccaacttctcaattctacagaaggcaatcgcggatttctttaagaagttcaattatcctgtagactccgttggtgttcggaacataagagagaatccaactgatcatcagcttctaatagatctattggtctttccattgggaagagagagttttaatcagacaggaatgtcacttgttggttttgcatttagcaaccagacttataagcctcctccgatatttggcccttatattttcaaagctgatttgtacaaacagttctctggtatgatgaacccttgtcacacacacaatcaaactagaactaaaggttgttattgataactcatttgctctgcctttctttttgtcacagatgtagaagtttcatcaaagtcatcaaacaaaagcattctcattggagcagtagttggtgttgttgttcttctactattgttaacaatagctgggatttacgctcttaggcagaagaagagagctgaaagagcaactggtcaaaataatccttttgctaaatgggatacaagtaagagtagtattgatgctccgcagctaatgggagcaaaagcgtttacttttgaggagctgaagaaatgcactgacaacttttcagaggcaaatgatgttggcggtggaggttacggcaaggtttatagagggattcttcctaatgggcaactcatagcaatcaaaagggctcaacaaggatctttgcaaggagggttggagttcaaaactgagattgagcttctctcaagggtccatcataagaatgttgtcagactcttgggcttctgctttgaccggaatgaacaaatgctcgtatacgagtacatttcaaatgggtcacttaaagacagtctgtccgggaagagtgggattcgattggattggacaagaagacttaaaatagcacttggttcaggcaagggcttggcttatcttcatgaacttgctgatcctccaattatacatagagacatcaaatcaaataacatattacttgatgaaaatctaaccgcaaaggttgccgacttcggtctctccaaacttgtgggagaccctgagaaaactcatgtcacaacacaagtcaaaggaaccatgggctacttggatccagagtactacatgacgaatcaattaacggagaagagcgatgtgtatgggtttggtgtggttttactcgagctattaaccggtagaagtccgatagagagaggcaaatatgtggtgagagaggtgaagacaaagatgaataaatctcggagtttgtatgacctgcaggagttgttggacacaacgatcatagcaagcagtgggaatctaaaagggttcgagaagtatgtagacttggctttgagatgtgtggaggaggaaggagttaataggccatcaatgggtgaggttgtgaaagagattgagaacataatgcagcttgcgggattaaatcctaactcagattcagcaacgagttcaagaacgtatgaggacgcaatcaaaggatctggtgatccttatggcagtgaatcgtttcagtacagtgggaattttccagcttcaaagcttgagccccaatgattgattatgtttctttttgttattttgttatttcgtaagtgacttcatacttgaaatgccttgtgaatgtggagtagcatgattctgtttgatatgtggtcgctgattataaagcagatgaatggagagccaaacgcagaatcaaaaaccaccagatctttggcaatgtcgacaccagtttcaaacataagaaaagtaatcaagctcaatgtatgatgaataattgaatatattaattcttgttg

SEQ ID NO: 3752 - protein, 577 aa, Arabidopsis thaliana
  peptide (1)..(577): Ceres Seq. ID no. 12328935
  misc_feature (6)..(473): NCBI GI NO: 15240549 NR Description: leucine-rich repeat transmembrane protein kinase
  misc_feature (105)..(566): NCBI GI NO: 15240549 NR Description: leucine-rich repeat transmembrane protein kinase
  misc_feature (133)..(371): NCBI GI NO: 34909240 NR Description: putative receptor protein kinase
  misc_feature (102)..(577): NCBI GI NO: 7715608 NR Description: F20B17.5 [Arabidopsis thaliana]
  misc_feature (205)..(555): NCBI GI NO: 34909240 NR Description: putative receptor protein kinase
  misc_feature (102)..(577): NCBI GI NO: 30699436 NR Description: leucine-rich repeat transmembrane protein kinase
  misc_feature (78)..(326): NCBI GI NO: 34909240 NR Description: putative receptor protein kinase
  misc_feature (18)..(555): NCBI GI NO: 30699436 NR Description: leucine-rich repeat transmembrane protein kinase
  misc_feature (109)..(548): NCBI GI NO: 30679474 NR Description: leucine-rich repeat transmembrane protein kinase
  misc_feature (45)..(387): NCBI GI NO: 15222211 NR Description: leucine-rich repeat transmembrane protein kinase
NRGSDKRFFLGLKMSSRTGASLLLILFFFQICSVSALTNGLDASALNALKSEWTTPPDGWEGSDPCGTNWVGITCQNDRVVSISLGNLDLEGKLPADISFLSELRILDLSYNPKLSGPLPPNIGNLGKLRNLILVGCSFSGQIPESIGTLKELIYLSLNLNKFSGTIPPSIGLLSKLYWFDIADNQIEGELPVSNGTSAPGLDMLLQTKHFHFGKNKLSGNIPKELFSSNMSLIHVLFDGNQFTGEIPETLSLVKTLTVLRLDRNKLIGDIPSYLNNLTNLNELYLANNRFTGTLPNLTSLTSLYTLDVSNNTLDFSPIPSWISSLPSLSTLRMEGIQLNGPIPISFFSPPQLQTVILKRNSIVESLDFGTDVSSQLEFVDLQYNEITDYKPSANKVLQVILANNPVCLEAGNGPSYCSAIQHNTSFSTLPTNCSPCEPGMEASPTCRCAYPFMGTLYFRSPSFSGLFNSTNFSILQKAIADFFKKFNYPVDSVGVRNIRENPTDHQLLIDLLVFPLGRESFNQTGMSLVGFAFSNQTYKPPPIFGPYIFKADLYKQFSGMMNPCHTHNQTRTKGCY

SEQ ID NO: 3753 - protein, 564 aa, Arabidopsis thaliana
  peptide (1)..(564): Ceres Seq. ID no. 12328936
  misc_feature (1)..(460): NCBI GI NO: 15240549 NR Description: leucine-rich repeat transmembrane protein kinase
  misc_feature (92)..(553): NCBI GI NO: 15240549 NR Description: leucine-rich repeat transmembrane protein kinase
  misc_feature (120)..(358): NCBI GI NO: 34909240 NR Description: putative receptor protein kinase
  misc_feature (89)..(564): NCBI GI NO: 7715608 NR Description: F20B17.5 [Arabidopsis thaliana]
  misc_feature (192)..(542): NCBI GI NO: 34909240 NR Description: putative receptor protein kinase
  misc_feature (89)..(564): NCBI GI NO: 30699436 NR Description: leucine-rich repeat transmembrane protein kinase
  misc_feature (65)..(313): NCBI GI NO: 34909240 NR Description: putative receptor protein kinase
  misc_feature (5)..(542): NCBI GI NO: 30699436 NR Description: leucine-rich repeat transmembrane protein kinase
  misc_feature (96)..(535): NCBI GI NO: 30679474 NR Description: leucine-rich repeat transmembrane protein kinase
  misc_feature (32)..(374): NCBI GI NO: 15222211 NR Description: leucine-rich repeat transmembrane protein kinase
MSSRTGASLLLILFFFQICSVSALTNGLDASALNALKSEWTTPPDGWEGSDPCGTNWVGITCQNDRVVSISLGNLDLEGKLPADISFLSELRILDLSYNPKLSGPLPPNIGNLGKLRNLILVGCSFSGQIPESIGTLKELIYLSLNLNKFSGTIPPSIGLLSKLYWFDIADNQIEGELPVSNGTSAPGLDMLLQTKHFHFGKNKLSGNIPKELFSSNMSLIHVLFDGNQFTGEIPETLSLVKTLTVLRLDRNKLIGDIPSYLNNLTNLNELYLANNRFTGTLPNLTSLTSLYTLDVSNNTLDFSPIPSWISSLPSLSTLRMEGIQLNGPIPISFFSPPQLQTVILKRNSIVESLDFGTDVSSQLEFVDLQYNEITDYKPSANKVLQVILANNPVCLEAGNGPSYCSAIQHNTSFSTLPTNCSPCEPGMEASPTCRCAYPFMGTLYFRSPSFSGLFNSTNFSILQKAIADFFKKFNYPVDSVGVRNIRENPTDHQLLIDLLVFPLGRESFNQTGMSLVGFAFSNQTYKPPPIFGPYIFKADLYKQFSGMMNPCHTHNQTRTKGCY

SEQ ID NO: 3754 - protein, 374 aa, Arabidopsis thaliana
  peptide (1)..(374): Ceres Seq. ID no. 12328937
  misc_feature (1)..(270): NCBI GI NO: 15240549 NR Description: leucine-rich repeat transmembrane protein kinase
  misc_feature (1)..(363): NCBI GI NO: 15240549 NR Description: leucine-rich repeat transmembrane protein kinase
  misc_feature (1)..(168): NCBI GI NO: 34909240 NR Description: putative receptor protein kinase
  misc_feature (1)..(374): NCBI GI NO: 7715608 NR Description: F20B17.5 [Arabidopsis thaliana]
  misc_feature (2)..(352): NCBI GI NO: 34909240 NR Description: putative receptor protein kinase
  misc_feature (1)..(374): NCBI GI NO: 30699436 NR Description: leucine-rich repeat transmembrane protein kinase
  misc_feature (1)..(123): NCBI GI NO: 34909240 NR Description: putative receptor protein kinase
  misc_feature (1)..(352): NCBI GI NO: 30699436 NR Description: leucine-rich repeat transmembrane protein kinase
  misc_feature (1)..(345): NCBI GI NO: 30679474 NR Description: leucine-rich repeat transmembrane protein kinase
  misc_feature (1)..(184): NCBI GI NO: 15222211 NR Description: leucine-rich repeat transmembrane protein kinase
MLLQTKHFHFGKNKLSGNIPKELFSSNMSLIHVLFDGNQFTGEIPETLSLVKTLTVLRLDRNKLIGDIPSYLNNLTNLNELYLANNRFTGTLPNLTSLTSLYTLDVSNNTLDFSPIPSWISSLPSLSTLRMEGIQLNGPIPISFFSPPQLQTVILKRNSIVESLDFGTDVSSQLEFVDLQYNEITDYKPSANKVLQVILANNPVCLEAGNGPSYCSAIQHNTSFSTLPTNCSPCEPGMEASPTCRCAYPFMGTLYFRSPSFSGLFNSTNFSILQKAIADFFKKFNYPVDSVGVRNIRENPTDHQLLIDLLVFPLGRESFNQTGMSLVGFAFSNQTYKPPPIFGPYIFKADLYKQFSGMMNPCHTHNQTRTKGCY

SEQ ID NO: 3755 - DNA, 1391 bp, Arabidopsis thaliana
  misc_feature (1)..(1391): Ceres Seq. ID no. 12330746
aagattcagtagaaaaaattgaccacaagacaaaatatagatacaactatacagaaagagaagataggatgaacaagtgagtctcttctctctctcaaatccactccgtaataagttcataatctatcatccaccatggagaaaacatcaatgttctccattcacgaaggaaagccgattcgatgcaaagcagcagtatctagaaaaccaggagaagcattggtgatagaagagatccatgtggatccacctcaagcttatgaagttaggataaagatcatatgtacatctttatgtcataccgatgtttctttctcgaaaatagacagtggaccgcttgcaaggtttcctaggattctaggacacgaagcagtcggtgtgatcgagagcattggtgaacatgtgaatggatttcaacaaggtgatatcgttttgccagtgtttcaccctcactgtgaagaatgtagagattgcaaatcctcaaagagcaactggtgcgcaagatttgccgacgatttcttatcaaacacgagacgatatggaatgacttcaagattcaaagactcctttggagaagatatttatcattttctctttgtctcgagtttttctgaatatacggtcgtcgacatcgcacatcttgtcaaaatctctcctgatattccggttgataaagcagcattgctcagctgcggtgtttccacaggaattggagcagcttggaaagtggctaacgtggaaaaaggctccaccgttgcagtttttggccttggtgctgttggacttgcggttggagaaggagccaggctgcgtggagccggcaagatcattggtgttgatctcaatccagaaaaattcgagctaggcaagaaatttggtttcacgagtttcatcaatcctaccttgtgtggagaaaagaagattagcgaggtgattaaagaaatgactggaggaggagttgactatagtttcgaatgcgttggtttaccttctttattgaccgaagctttctccagcactcgcacgggttcaggaaaaacggtagtgttggggatagataagcatctaacgccagtaagtttgggtagctttgatcttctcagaggcagacatgtttgtggaagcttgtttggtggtcttaaacccaaactagatattccgattctggttgatcattacttaaaaaaggagcttaatttggatagttttattacacatgaattgaaatttgaggaaatcaacaaagctttcgatttattagtgcaaggaaagtctctccgctgcattctttggatgaacaagtgaagtgattaattatgttgaaactatatatgttgaaaaattgattaaatttctttatcaaaaagaaaagaattaattattactctttc

SEQ ID NO: 3756 - protein, 389 aa, Arabidopsis thaliana
  peptide (1)..(389): Ceres Seq. ID no. 12330747
  misc_feature (1)..(389): NCBI GI NO: 18415840 NR Description: alcohol dehydrogenase like protein
  misc_feature (6)..(389): NCBI GI NO: 21618210 NR Description: alcohol dehydrogenase like protein
  misc_feature (1)..(389): NCBI GI NO: 11250327 NR Description: probable alcohol dehydrogenase (EC 1
  misc_feature (1)..(389): NCBI GI NO: 15219882 NR Description: alcohol dehydrogenase ADH, putative
  misc_feature (8)..(389): NCBI GI NO: 15219884 NR Description: alcohol dehydrogenase ADH, putative
  misc_feature (1)..(389): NCBI GI NO: 7705214 NR Description: alcohol dehydrogenase ADH
  misc_feature (1)..(389): NCBI GI NO: 1076579 NR Description: probable alcohol dehydrogenase (EC 1
  misc_feature (13)..(387): NCBI GI NO: 15238330 NR Description: alcohol dehydrogenase; protein id: At5g42250
  misc_feature (13)..(388): NCBI GI NO: 34906828 NR Description: contains EST C99136
  misc_feature (1)..(389): NCBI GI NO: 7705215 NR Description: alcohol dehydrogenase  ADH
MEKTSMFSIHEGKPIRCKAAVSRKPGEALVIEEIHVDPPQAYEVRIKIICTSLCHTDVSFSKIDSGPLARFPRILGHEAVGVIESIGEHVNGFQQGDIVLPVFHPHCEECRDCKSSKSNWCARFADDFLSNTRRYGMTSRFKDSFGEDIYHFLFVSSFSEYTVVDIAHLVKISPDIPVDKAALLSCGVSTGIGAAWKVANVEKGSTVAVFGLGAVGLAVGEGARLRGAGKIIGVDLNPEKFELGKKFGFTSFINPTLCGEKKISEVIKEMTGGGVDYSFECVGLPSLLTEAFSSTRTGSGKTVVLGIDKHLTPVSLGSFDLLRGRHVCGSLFGGLKPKLDIPILVDHYLKKELNLDSFITHELKFEEINKAFDLLVQGKSLRCILWMNK

SEQ ID NO: 3757 - protein, 384 aa, Arabidopsis thaliana
  peptide (1)..(384): Ceres Seq. ID no. 12330748
  misc_feature (1)..(384): NCBI GI NO: 18415840 NR Description: alcohol dehydrogenase like protein
  misc_feature (1)..(384): NCBI GI NO: 21618210 NR Description: alcohol dehydrogenase like protein
  misc_feature (1)..(384): NCBI GI NO: 11250327 NR Description: probable alcohol dehydrogenase (EC 1
  misc_feature (1)..(384): NCBI GI NO: 15219882 NR Description: alcohol dehydrogenase ADH, putative
  misc_feature (3)..(384): NCBI GI NO: 15219884 NR Description: alcohol dehydrogenase ADH, putative
  misc_feature (1)..(384): NCBI GI NO: 7705214 NR Description: alcohol dehydrogenase ADH
  misc_feature (1)..(384): NCBI GI NO: 1076579 NR Description: probable alcohol dehydrogenase (EC 1
  misc_feature (8)..(382): NCBI GI NO: 15238330 NR Description: alcohol dehydrogenase; protein id: At5g42250
  misc_feature (8)..(383): NCBI GI NO: 34906828 NR Description: contains EST C99136
  misc_feature (1)..(384): NCBI GI NO: 7705215 NR Description: alcohol dehydrogenase  ADH
MFSIHEGKPIRCKAAVSRKPGEALVIEEIHVDPPQAYEVRIKIICTSLCHTDVSFSKIDSGPLARFPRILGHEAVGVIESIGEHVNGFQQGDIVLPVFHPHCEECRDCKSSKSNWCARFADDFLSNTRRYGMTSRFKDSFGEDIYHFLFVSSFSEYTVVDIAHLVKISPDIPVDKAALLSCGVSTGIGAAWKVANVEKGSTVAVFGLGAVGLAVGEGARLRGAGKIIGVDLNPEKFELGKKFGFTSFINPTLCGEKKISEVIKEMTGGGVDYSFECVGLPSLLTEAFSSTRTGSGKTVVLGIDKHLTPVSLGSFDLLRGRHVCGSLFGGLKPKLDIPILVDHYLKKELNLDSFITHELKFEEINKAFDLLVQGKSLRCILWMNK

SEQ ID NO: 3758 - protein, 253 aa, Arabidopsis thaliana
  peptide (1)..(253): Ceres Seq. ID no. 12330749
  misc_feature (1)..(253): NCBI GI NO: 18415840 NR Description: alcohol dehydrogenase like protein
  misc_feature (1)..(253): NCBI GI NO: 21618210 NR Description: alcohol dehydrogenase like protein
  misc_feature (1)..(253): NCBI GI NO: 11250327 NR Description: probable alcohol dehydrogenase (EC 1
  misc_feature (1)..(253): NCBI GI NO: 15219882 NR Description: alcohol dehydrogenase ADH, putative
  misc_feature (1)..(253): NCBI GI NO: 15219884 NR Description: alcohol dehydrogenase ADH, putative
  misc_feature (1)..(253): NCBI GI NO: 7705214 NR Description: alcohol dehydrogenase ADH
  misc_feature (1)..(253): NCBI GI NO: 1076579 NR Description: probable alcohol dehydrogenase (EC 1
  misc_feature (1)..(251): NCBI GI NO: 15238330 NR Description: alcohol dehydrogenase; protein id: At5g42250
  misc_feature (1)..(252): NCBI GI NO: 34906828 NR Description: contains EST C99136
  misc_feature (1)..(253): NCBI GI NO: 7705215 NR Description: alcohol dehydrogenase  ADH
MTSRFKDSFGEDIYHFLFVSSFSEYTVVDIAHLVKISPDIPVDKAALLSCGVSTGIGAAWKVANVEKGSTVAVFGLGAVGLAVGEGARLRGAGKIIGVDLNPEKFELGKKFGFTSFINPTLCGEKKISEVIKEMTGGGVDYSFECVGLPSLLTEAFSSTRTGSGKTVVLGIDKHLTPVSLGSFDLLRGRHVCGSLFGGLKPKLDIPILVDHYLKKELNLDSFITHELKFEEINKAFDLLVQGKSLRCILWMNK

SEQ ID NO: 3759 - DNA, 1550 bp, Arabidopsis thaliana
  misc_feature (1)..(1550): Ceres Seq. ID no. 13492477
actttcttcttcgattagccacttttttttcttttgtaattttcctttcttttttttttcttttgaattttcgggaagcagcatttccactggagctgcaaaatcttcctatcaaaattatagatcgatccaagttttagattcgagaatcattttctccaaattagatttatatatcaaaaggaatcgaaaatagacagcaatttttgttttgtcggatcgtattgaatcagctgtgaattttagcgccaatttaaccactgaatcgtttgattagaagctaagatttggtcttacgatcgatctaagtagggttcttcttcttaagtgtgtgttttgttaaaattagtaaagagagatggagaagaagaaagtcgcgactccgctagtgtgccatggccattcgagacctgttgtggatttgttctacagtccaatcactcctgatggtttcttcctcatcagcgcaagtaaagattctcaaccaatgttgagaaatggggaaactggagattggattggtacatttgaaggtcataaaggtgctgtgtggagttcttgtcttgataacaatgctttacgtgcagcttctgcatctgctgatttttcagcgaagctttgggatgctttgactggggatgtcttgcattcttttgagcacaagcatattgttcgagcatgcgccttctctcaggatacgaaatatctaatcacaggaggatttgagaaaattcttcgtgttttcgacttgaatcgcttggatgcacctcctacagaaattgataaatctcctggttctatcagaacactaacatggcttcacggtgatcaaacaatattaagttcttgcactgatattggtggtgtgaggttatgggatgtgaggagtggcaaaatagtgcaaactctagaaaccaagtctcctgtcaccagtgctgaagtgagtcaagatggacggtatataacaactgccgatgggtcaactgttaaattttgggatgcaaatcattttggactagtgaaaagttacgacatgccctgcaatatcgaatctgcatcgcttgagccaaaatctggcaacaaattcgttgctggtggagaagatatgtgggttcgactctttgatttccacaccggaaaggagattggatgcaacaagggacatcatggtccggttcactgtgtgagatttgcaccaacaggtgagtcttatgcttcagggtctgaagatggtacaatcagaatttggcaaactggaccggtgaatcctgaagagatcagcgagtcaaagccgaagcagagtgtggatgaggttgctcgtaagattgaaggctttcacattaacaaggaaggaaaaaccgcagagaaaccatctgatgcttaaaccaagaaaagaaccaagaaaaatggctgcttctctttgtcttcttactgtgtttttacttccagactgaatatacggaaattcaaaacaagtgtttgaaaaacagtcgttgtcaatcttcattcgagtcaagtttatggatgtggctgaaaatttacgaattaat

SEQ ID NO: 3760 - protein, 341 aa, Arabidopsis thaliana
  peptide (1)..(341): Ceres Seq. ID no. 13492478
  misc_feature (1)..(341): NCBI GI NO: 18400838 NR Description: transducin / WD-40 repeat protein family
  misc_feature (1)..(340): NCBI GI NO: 30695318 NR Description: transducin / WD-40 repeat protein family
  misc_feature (6)..(336): NCBI GI NO: 18394249 NR Description: transducin / WD-40 repeat protein family
  misc_feature (1)..(263): NCBI GI NO: 15219076 NR Description: unknown protein; protein id: At1g52730.1
  misc_feature (8)..(299): NCBI GI NO: 29437263 NR Description: Similar to serine/threonine kinase receptor associatedprotein
  misc_feature (8)..(299): NCBI GI NO: 12667270 NR Description: serine-threonine kinase receptor-associated
  misc_feature (8)..(337): NCBI GI NO: 6755682 NR Description: serine/threonine kinase receptor associated
  misc_feature (8)..(340): NCBI GI NO: 4519417 NR Description: WD-40 repeat protein [Homo sapiens]
  misc_feature (8)..(340): NCBI GI NO: 12643951 NR Description: UNR-interacting protein
  misc_feature (8)..(340): NCBI GI NO: 20149592 NR Description: unr-interacting protein [Homo sapiens]
MEKKKVATPLVCHGHSRPVVDLFYSPITPDGFFLISASKDSQPMLRNGETGDWIGTFEGHKGAVWSSCLDNNALRAASASADFSAKLWDALTGDVLHSFEHKHIVRACAFSQDTKYLITGGFEKILRVFDLNRLDAPPTEIDKSPGSIRTLTWLHGDQTILSSCTDIGGVRLWDVRSGKIVQTLETKSPVTSAEVSQDGRYITTADGSTVKFWDANHFGLVKSYDMPCNIESASLEPKSGNKFVAGGEDMWVRLFDFHTGKEIGCNKGHHGPVHCVRFAPTGESYASGSEDGTIRIWQTGPVNPEEISESKPKQSVDEVARKIEGFHINKEGKTAEKPSDA

SEQ ID NO: 3761 - protein, 298 aa, Arabidopsis thaliana
  peptide (1)..(298): Ceres Seq. ID no. 13492479
  misc_feature (1)..(298): NCBI GI NO: 18400838 NR Description: transducin / WD-40 repeat protein family
  misc_feature (1)..(297): NCBI GI NO: 30695318 NR Description: transducin / WD-40 repeat protein family
  misc_feature (1)..(293): NCBI GI NO: 18394249 NR Description: transducin / WD-40 repeat protein family
  misc_feature (1)..(220): NCBI GI NO: 15219076 NR Description: unknown protein; protein id: At1g52730.1
  misc_feature (1)..(256): NCBI GI NO: 29437263 NR Description: Similar to serine/threonine kinase receptor associatedprotein
  misc_feature (1)..(256): NCBI GI NO: 12667270 NR Description: serine-threonine kinase receptor-associated
  misc_feature (1)..(294): NCBI GI NO: 6755682 NR Description: serine/threonine kinase receptor associated
  misc_feature (1)..(297): NCBI GI NO: 4519417 NR Description: WD-40 repeat protein [Homo sapiens]
  misc_feature (1)..(297): NCBI GI NO: 12643951 NR Description: UNR-interacting protein
  misc_feature (1)..(297): NCBI GI NO: 20149592 NR Description: unr-interacting protein [Homo sapiens]
MLRNGETGDWIGTFEGHKGAVWSSCLDNNALRAASASADFSAKLWDALTGDVLHSFEHKHIVRACAFSQDTKYLITGGFEKILRVFDLNRLDAPPTEIDKSPGSIRTLTWLHGDQTILSSCTDIGGVRLWDVRSGKIVQTLETKSPVTSAEVSQDGRYITTADGSTVKFWDANHFGLVKSYDMPCNIESASLEPKSGNKFVAGGEDMWVRLFDFHTGKEIGCNKGHHGPVHCVRFAPTGESYASGSEDGTIRIWQTGPVNPEEISESKPKQSVDEVARKIEGFHINKEGKTAEKPSDA

SEQ ID NO: 3762 - DNA, 1028 bp, Arabidopsis thaliana; identical to SEQ ID NO: 3588
  misc_feature (1)..(1028): Ceres Seq. ID no. 12325605

SEQ ID NO: 3763 - protein, 258 aa, Arabidopsis thaliana; identical to SEQ ID NO: 3589
  peptide (1)..(258): Ceres Seq. ID no. 12325606
  misc_feature (1)..(258): NCBI GI NO: 15237199 NR Description: putative protein; protein id: At5g23040.1
  misc_feature (145)..(258): NCBI GI NO: 37573058 NR Description: unknown protein
  misc_feature (12)..(258): NCBI GI NO: 11357625 NR Description: hypothetical protein F24M12
  misc_feature (25)..(258): NCBI GI NO: 18409276 NR Description: putative protein; protein id: At3g51140
  misc_feature (69)..(258): NCBI GI NO: 17230751 NR Description: hypothetical protein [Nostoc sp. PCC 7120]
  misc_feature (68)..(258): NCBI GI NO: 23129945 NR Description: hypothetical protein [Nostoc punctiforme]
  misc_feature (70)..(258): NCBI GI NO: 23039527 NR Description: hypothetical protein
  misc_feature (69)..(258): NCBI GI NO: 16329734 NR Description: unknown protein [Synechocystis sp. PCC 6803]

SEQ ID NO: 3764 - protein, 145 aa, Arabidopsis thaliana; identical to SEQ ID NO: 3590
  peptide (1)..(145): Ceres Seq. ID no. 12325607
  misc_feature (1)..(145): NCBI GI NO: 15237199 NR Description: putative protein; protein id: At5g23040.1
  misc_feature (32)..(145): NCBI GI NO: 37573058 NR Description: unknown protein
  misc_feature (1)..(145): NCBI GI NO: 11357625 NR Description: hypothetical protein F24M12
  misc_feature (1)..(145): NCBI GI NO: 18409276 NR Description: putative protein; protein id: At3g51140
  misc_feature (1)..(145): NCBI GI NO: 17230751 NR Description: hypothetical protein [Nostoc sp. PCC 7120]
  misc_feature (1)..(145): NCBI GI NO: 23129945 NR Description: hypothetical protein [Nostoc punctiforme]
  misc_feature (1)..(145): NCBI GI NO: 23039527 NR Description: hypothetical protein
  misc_feature (1)..(145): NCBI GI NO: 16329734 NR Description: unknown protein [Synechocystis sp. PCC 6803]

SEQ ID NO: 3765 - DNA, 1516 bp, Arabidopsis thaliana
  misc_feature (1)..(1516): Ceres Seq. ID no. 12395354
actgaactttcttttcctttcaagtttcacctctaatgcgacgaacacagccacgggaactggccgtcactggtttatcggagaatctccaaggatgtgttttccgcacggtgaaacgagcagttctgatcggaaacggctgcgccggcgcggagaatcaatgcatcggtctccttcgatccttaggcctcttcgatcgccacctctattatagagtagctaaaccaagaggtggaatccttcaatggcttcctatctctctctacaaacgaattcatcgttttatcagcactatctgtgccggattatccattaacgctactggaatcacgaatgtgtttgaagtagatgatgcgaagcagattgctgctatggctcgtaaaacgtttgaaaagaatggcccgttgttagtcgtggcgtctggtagtgatactatttccgtcgcaagctcaataagacgactggctatggaaaatgtttttgttgttcaggtgcaacatccaaggtcgcatcttgagagatttgatctagtgatcacacctcaacacgattatttttctttaacacctgaagggaagaggcaaattcctttctttctcagaccatgggtaactccacgtgaacatccaggtagaaatgtgtttctcactactggagctcttcattacgccgacgcttctactctaagaaatgctacatcggaatggaaaaacgagtttgcttcgctgccaaagcctttggttgtagttaatattggaggacctacaaggaactgtttgtatggtgttgatcttgctaaacagttgtgtggtatgcttcagagtatcctctggagctgtggaagcctaagaatatctttctcaagaagaacaccaaagaaggttgtagaagtcataactggagaattgagctctaactctaaggtctacatttgggatggaaaagaccctaatccgcatttgggacatctagctttagccaatacttttatcataactgctgactctataagtatgttgagcgaggcatgtagtaccgggaaacccgtttatgttgtgggtgctgaacggtgtacatggaaattttctgacttccagaagactctccatggtagaggagctgttcgacctttgaccggcaaagaagatatgtgtgagaagtggagttactctcctcttaacgataatgtagaagctgcgaggcgtgtgattcaagatctggccaagcgtggctgggaaatcgaggcatgaccgttctttccctccacaagttttccagagtactactctcttttccctatatagtctacagttattattttcgtactgggaattatcctccatagaagttaaatgctctagtcgaactcagggtcatatacttagctcatcgtttgaactattagtctattaacgattggtttttgttagttctttggttttttccatttggtttgtagtctcatgtatcaagcatcatctgtaaaggaacgaataaaagctgcgtgctctgacct

SEQ ID NO: 3766 - protein, 404 aa, Arabidopsis thaliana
  peptide (1)..(404): Ceres Seq. ID no. 12395355
  misc_feature (32)..(397): Pfam Name: DUF1022 Pfam Description: Protein of unknown function
  misc_feature (1)..(404): NCBI GI NO: 18415120 NR Description: putative protein; protein id: At5g06180
  misc_feature (1)..(372): NCBI GI NO: 9759316 NR Description: gene_id:MBL20
  misc_feature (82)..(404): NCBI GI NO: 18420465 NR Description: putative protein; protein id: At5g22350
  misc_feature (6)..(80): NCBI GI NO: 18420465 NR Description: putative protein; protein id: At5g22350
  misc_feature (82)..(404): NCBI GI NO: 9757815 NR Description: gene_id:MWD9
  misc_feature (6)..(59): NCBI GI NO: 9757815 NR Description: gene_id:MWD9
  misc_feature (202)..(404): NCBI GI NO: 38346329 NR Description: OJ000126_13.11
  misc_feature (86)..(167): NCBI GI NO: 38346329 NR Description: OJ000126_13.11
  misc_feature (25)..(84): NCBI GI NO: 38346329 NR Description: OJ000126_13.11
  misc_feature (184)..(398): NCBI GI NO: 22968024 NR Description: hypothetical protein [Rhodospirillum rubrum]
MRRTQPRELAVTGLSENLQGCVFRTVKRAVLIGNGCAGAENQCIGLLRSLGLFDRHLYYRVAKPRGGILQWLPISLYKRIHRFISTICAGLSINATGITNVFEVDDAKQIAAMARKTFEKNGPLLVVASGSDTISVASSIRRLAMENVFVVQVQHPRSHLERFDLVITPQHDYFSLTPEGKRQIPFFLRPWVTPREHPGRNVFLTTGALHYADASTLRNATSEWKNEFASLPKPLVVVNIGGPTRNCLYGVDLAKQLCGMLQSILWSCGSLRISFSRRTPKKVVEVITGELSSNSKVYIWDGKDPNPHLGHLALANTFIITADSISMLSEACSTGKPVYVVGAERCTWKFSDFQKTLHGRGAVRPLTGKEDMCEKWSYSPLNDNVEAARRVIQDLAKRGWEIEA

SEQ ID NO: 3767 - protein, 292 aa, Arabidopsis thaliana
  peptide (1)..(292): Ceres Seq. ID no. 12395356
  misc_feature (1)..(285): Pfam Name: DUF1022 Pfam Description: Protein of unknown function
  misc_feature (1)..(292): NCBI GI NO: 18415120 NR Description: putative protein; protein id: At5g06180
  misc_feature (1)..(260): NCBI GI NO: 9759316 NR Description: gene_id:MBL20
  misc_feature (1)..(292): NCBI GI NO: 18420465 NR Description: putative protein; protein id: At5g22350
  misc_feature (1)..(292): NCBI GI NO: 9757815 NR Description: gene_id:MWD9
  misc_feature (90)..(292): NCBI GI NO: 38346329 NR Description: OJ000126_13.11
  misc_feature (1)..(55): NCBI GI NO: 38346329 NR Description: OJ000126_13.11
  misc_feature (72)..(286): NCBI GI NO: 22968024 NR Description: hypothetical protein [Rhodospirillum rubrum]
  misc_feature (1)..(60): NCBI GI NO: 22968024 NR Description: hypothetical protein [Rhodospirillum rubrum]
  misc_feature (71)..(290): NCBI GI NO: 16127081 NR Description: conserved hypothetical protein
  misc_feature (7)..(288): NCBI GI NO: 15892085 NR Description: unknown [Rickettsia conorii]
MARKTFEKNGPLLVVASGSDTISVASSIRRLAMENVFVVQVQHPRSHLERFDLVITPQHDYFSLTPEGKRQIPFFLRPWVTPREHPGRNVFLTTGALHYADASTLRNATSEWKNEFASLPKPLVVVNIGGPTRNCLYGVDLAKQLCGMLQSILWSCGSLRISFSRRTPKKVVEVITGELSSNSKVYIWDGKDPNPHLGHLALANTFIITADSISMLSEACSTGKPVYVVGAERCTWKFSDFQKTLHGRGAVRPLTGKEDMCEKWSYSPLNDNVEAARRVIQDLAKRGWEIEA

SEQ ID NO: 3768 - protein, 260 aa, Arabidopsis thaliana
  peptide (1)..(260): Ceres Seq. ID no. 12395357
  misc_feature (1)..(253): Pfam Name: DUF1022 Pfam Description: Protein of unknown function
  misc_feature (1)..(260): NCBI GI NO: 18415120 NR Description: putative protein; protein id: At5g06180
  misc_feature (1)..(228): NCBI GI NO: 9759316 NR Description: gene_id:MBL20
  misc_feature (1)..(260): NCBI GI NO: 18420465 NR Description: putative protein; protein id: At5g22350
  misc_feature (1)..(260): NCBI GI NO: 9757815 NR Description: gene_id:MWD9
  misc_feature (58)..(260): NCBI GI NO: 38346329 NR Description: OJ000126_13.11
  misc_feature (1)..(23): NCBI GI NO: 38346329 NR Description: OJ000126_13.11
  misc_feature (40)..(254): NCBI GI NO: 22968024 NR Description: hypothetical protein [Rhodospirillum rubrum]
  misc_feature (1)..(28): NCBI GI NO: 22968024 NR Description: hypothetical protein [Rhodospirillum rubrum]
  misc_feature (39)..(258): NCBI GI NO: 16127081 NR Description: conserved hypothetical protein
  misc_feature (1)..(256): NCBI GI NO: 15892085 NR Description: unknown [Rickettsia conorii]
MENVFVVQVQHPRSHLERFDLVITPQHDYFSLTPEGKRQIPFFLRPWVTPREHPGRNVFLTTGALHYADASTLRNATSEWKNEFASLPKPLVVVNIGGPTRNCLYGVDLAKQLCGMLQSILWSCGSLRISFSRRTPKKVVEVITGELSSNSKVYIWDGKDPNPHLGHLALANTFIITADSISMLSEACSTGKPVYVVGAERCTWKFSDFQKTLHGRGAVRPLTGKEDMCEKWSYSPLNDNVEAARRVIQDLAKRGWEIEA

SEQ ID NO: 3769 - DNA, 1164 bp, Arabidopsis thaliana
  misc_feature (1)..(1164): Ceres Seq. ID no. 12559029
atcaaaaaatctctatccatccacaacaacaacaaaaactcaagaacaatatctccacttgatcactaccacattgtccaatcactctacaaagcctgtacgtacacaacaacattaccatggtgaaacaagaacgcaagatccaaaccagcagcacaaaaaaggaaatgcctttgtcatcatcaccatcttcttcttcttcttcatcttcttcctcgtcttcgtcttcgtgtaagaacaagaacaagaagagtaagattaagaagtacaaaggagtgaggatgagaagttggggatcatgggtctctgagattagggcaccaaatcaaaagacaaggatttggttaggttcttactcaacagctgaagcagctgctagagcttacgatgttgcactcttatgtctcaaaggccctcaagccaatctcaacttccctacttcttcttcttctcatcatcttcttgataatctcttagatgaaaatacccttttgtcccccaaatccatccaaagagtagctgctcaagctgccaactcatttaaccattttgcccctacttcatcagccgtctcgtcaccgtccgatcatgatcatcaccatgatgatgggatgcaatctttgatgggatcttttgtggacaatcatgtgtctttgatggattcaacatcttcatggtatgatgatcataatgggatgttcttgtttgataatggagctccattcaattactctcctcaactaaactcgacgacgatgctcgatgaatacttctacgaagatgctgacattccgctttggagtttcaattaatccgacggtccataatacatactttaattagttttctaaatcattttttaaattcttttttatatatgtaacatatatttaccctcgtcgtaattattcatttccaagttgtttgttgcttggagagaattgacgacggatacgattatataatataattgtaagtttttatatgtagcaaactcggtacaattcggatttaatagggatctaggaagttcacatgaacaagcgactcttttttttgtcacttctttgactttttcatgtgaggtttcttttcatcaattttttttaacaatgtgtgaaaatatttctgtattgtaatgatatatttcgcacaatagttttg

SEQ ID NO: 3770 - protein, 230 aa, Arabidopsis thaliana
  peptide (1)..(230): Ceres Seq. ID no. 12559030
  misc_feature (47)..(111): Pfam Name: Pfam Description:  AP2 domain
  misc_feature (1)..(230): NCBI GI NO: 15219139 NR Description: TINY-like protein; protein id: At1g21910
  misc_feature (1)..(230): NCBI GI NO: 21554056 NR Description: TINY-like protein [Arabidopsis thaliana]
  misc_feature (1)..(191): NCBI GI NO: 15224024 NR Description: hypothetical protein; protein id: At1g77640.1
  misc_feature (13)..(229): NCBI GI NO: 15219452 NR Description: transcription factor, putative
  misc_feature (47)..(142): NCBI GI NO: 34902130 NR Description: hypothetical protein
  misc_feature (10)..(163): NCBI GI NO: 14140163 NR Description: putative AP2 domain containing protein
  misc_feature (1)..(197): NCBI GI NO: 15232340 NR Description: transcription factor - like protein
  misc_feature (20)..(152): NCBI GI NO: 38605848 NR Description: OSJNBb0034G17.6
  misc_feature (13)..(155): NCBI GI NO: 15239113 NR Description: transcription factor TINY, putative
  misc_feature (20)..(158): NCBI GI NO: 38605845 NR Description: OSJNBb0034G17.3
MVKQERKIQTSSTKKEMPLSSSPSSSSSSSSSSSSSSCKNKNKKSKIKKYKGVRMRSWGSWVSEIRAPNQKTRIWLGSYSTAEAAARAYDVALLCLKGPQANLNFPTSSSSHHLLDNLLDENTLLSPKSIQRVAAQAANSFNHFAPTSSAVSSPSDHDHHHDDGMQSLMGSFVDNHVSLMDSTSSWYDDHNGMFLFDNGAPFNYSPQLNSTTMLDEYFYEDADIPLWSFN

SEQ ID NO: 3771 - protein, 214 aa, Arabidopsis thaliana
  peptide (1)..(214): Ceres Seq. ID no. 12559031
  misc_feature (31)..(95): Pfam Name: Pfam Description:  AP2 domain
  misc_feature (1)..(214): NCBI GI NO: 15219139 NR Description: TINY-like protein; protein id: At1g21910
  misc_feature (1)..(214): NCBI GI NO: 21554056 NR Description: TINY-like protein [Arabidopsis thaliana]
  misc_feature (1)..(175): NCBI GI NO: 15224024 NR Description: hypothetical protein; protein id: At1g77640.1
  misc_feature (1)..(213): NCBI GI NO: 15219452 NR Description: transcription factor, putative
  misc_feature (31)..(126): NCBI GI NO: 34902130 NR Description: hypothetical protein
  misc_feature (1)..(147): NCBI GI NO: 14140163 NR Description: putative AP2 domain containing protein
  misc_feature (1)..(181): NCBI GI NO: 15232340 NR Description: transcription factor - like protein
  misc_feature (4)..(136): NCBI GI NO: 38605848 NR Description: OSJNBb0034G17.6
  misc_feature (1)..(139): NCBI GI NO: 15239113 NR Description: transcription factor TINY, putative
  misc_feature (4)..(142): NCBI GI NO: 38605845 NR Description: OSJNBb0034G17.3
MPLSSSPSSSSSSSSSSSSSSCKNKNKKSKIKKYKGVRMRSWGSWVSEIRAPNQKTRIWLGSYSTAEAAARAYDVALLCLKGPQANLNFPTSSSSHHLLDNLLDENTLLSPKSIQRVAAQAANSFNHFAPTSSAVSSPSDHDHHHDDGMQSLMGSFVDNHVSLMDSTSSWYDDHNGMFLFDNGAPFNYSPQLNSTTMLDEYFYEDADIPLWSFN

SEQ ID NO: 3772 - protein, 176 aa, Arabidopsis thaliana
  peptide (1)..(176): Ceres Seq. ID no. 12559032
  misc_feature (1)..(57): Pfam Name: Pfam Description:  AP2 domain
  misc_feature (1)..(176): NCBI GI NO: 15219139 NR Description: TINY-like protein; protein id: At1g21910
  misc_feature (1)..(176): NCBI GI NO: 21554056 NR Description: TINY-like protein [Arabidopsis thaliana]
  misc_feature (1)..(137): NCBI GI NO: 15224024 NR Description: hypothetical protein; protein id: At1g77640.1
  misc_feature (1)..(175): NCBI GI NO: 15219452 NR Description: transcription factor, putative
  misc_feature (1)..(88): NCBI GI NO: 34902130 NR Description: hypothetical protein
  misc_feature (1)..(109): NCBI GI NO: 14140163 NR Description: putative AP2 domain containing protein
  misc_feature (1)..(143): NCBI GI NO: 15232340 NR Description: transcription factor - like protein
  misc_feature (1)..(98): NCBI GI NO: 38605848 NR Description: OSJNBb0034G17.6
  misc_feature (1)..(101): NCBI GI NO: 15239113 NR Description: transcription factor TINY, putative
  misc_feature (1)..(104): NCBI GI NO: 38605845 NR Description: OSJNBb0034G17.3
MRSWGSWVSEIRAPNQKTRIWLGSYSTAEAAARAYDVALLCLKGPQANLNFPTSSSSHHLLDNLLDENTLLSPKSIQRVAAQAANSFNHFAPTSSAVSSPSDHDHHHDDGMQSLMGSFVDNHVSLMDSTSSWYDDHNGMFLFDNGAPFNYSPQLNSTTMLDEYFYEDADIPLWSFN

SEQ ID NO: 3773 - DNA, 1889 bp, Arabidopsis thaliana
  misc_feature (1)..(1889): Ceres Seq. ID no. 13488816
atacaaaaacaaacccacaaagtctagctctctctctatatcggtgattcgaattttcagaaccgaaactccggcgaaaagattatggcgggacagtcacgaaaatggatgatactggtggcgacgatatggattcaagctttcaccgggacgaatttcgatttctcagcttactcgtcagatttgaaatcggttctagggatttcacaggtgcagctaaactacctcgccgtggcttcggatctcggaaaagtattcggatggtcgtcgggactagcgcttatgtatttcccgctttggacggtgcttttcgcggcggcgtttatgggattcgtcggttatggagttcagtggcttgtcatcactcatttcatctctttgccttatatcatggtgtttctctgttgcttacttgctggtttaagtatctgttggttcaacactgtctgctttgtgctctgcattagtaacttccctgcaaacagatcacttgctctttccctcacagtgagtttcaatggtgtaagcgctgctttatatactcttgcttacaacgcaatcaatccaacttctccagagctatatcttcttttgaacgctcttataccgctcattgtctctttcactgctatcatcccgattcttcgtcaaccgccttttgagcctcttccaccagatggagttcgtcgtgactctctcatgtttctattgctcaacatactcgctgctttaaacggtgtttatctccttctctttggatcaaactcctctgatttaacctctgctcgtctactctttggtggagcaatcctcctcttggtattccctttatgtattcccggtttagtcatcgcccggaattggtataaccgcacaatccacactagtttccgtctagaaggttctggtttcattcttgttgatcctgatgagcttgagttgcataaagggatgcttgcacatgaagcaaaccgtgaaggttatcaattgctgagtgacgatgtggtgcaaaacccggttaagtccgtagctgttgaggaagaggatagtgatgagtcatgttgcaagaaacttatcacaagagatcagcttgaaggtttggggattgaacattctttgtcgctgctcttaaccagatcagatttttggttatactatatcacgtacttctgcggtggaaccattggacttgtgtacagcaacaaccttggacagattgctcaatctttaggacaaagctcaaataccacaactcttgtcacactttattctgctttctcattctttggaagattgctttctgcaacaccagattatatccgagcgaaggtttattttgccagaaccgggtggttagcaatcgcgctattaccaacccccttcgcacttttcttgcttgcatcatcaggaactgcatcagcattacaagctggaacagcgctgatgggtttaagctccgggtttatctttgcagcagcggtttccatcacatcagagctttttggaccaaacagtgttggagttaaccacaatatcttaatcacaaacataccgataggatcattgatctatggattcttggctgcattggtctatgactcacatggtttcaccgggaccaaatcaatgacctcggagtcggtggtgtgtatgggacgagattgttattacttgacctttgtgtggtggggttgcttgtctcttcttgggctaggttcgagtcttgtgttgtttattagaactagacgagcttatcaacggtttgaacaagctcgtataagttcgaacatcaacgactcttagaaatttgcatcaaccccaacggtttgtgtatatgtaggatctaagttataacagacggattaatggtattttagtggattttggcc

SEQ ID NO: 3774 - protein, 572 aa, Arabidopsis thaliana
  peptide (1)..(572): Ceres Seq. ID no. 13488817
  misc_feature (344)..(508): Pfam Name: and other Pfam Description: Sugar
  misc_feature (1)..(572): NCBI GI NO: 18415316 NR Description: expressed protein [Arabidopsis thaliana]
  misc_feature (1)..(572): NCBI GI NO: 21536488 NR Description: unknown [Arabidopsis thaliana]
  misc_feature (142)..(572): NCBI GI NO: 7487718 NR Description: hypothetical protein T5K18
  misc_feature (1)..(313): NCBI GI NO: 15222361 NR Description: expressed protein [Arabidopsis thaliana]
  misc_feature (291)..(566): NCBI GI NO: 15222361 NR Description: expressed protein [Arabidopsis thaliana]
  misc_feature (277)..(567): NCBI GI NO: 34907888 NR Description: P0031D02.33
  misc_feature (5)..(256): NCBI GI NO: 34907888 NR Description: P0031D02.33
  misc_feature (174)..(565): NCBI GI NO: 15232155 NR Description: expressed protein [Arabidopsis thaliana]
  misc_feature (6)..(298): NCBI GI NO: 15232155 NR Description: expressed protein [Arabidopsis thaliana]
  misc_feature (6)..(298): NCBI GI NO: 28393720 NR Description: unknown protein [Arabidopsis thaliana]
MAGQSRKWMILVATIWIQAFTGTNFDFSAYSSDLKSVLGISQVQLNYLAVASDLGKVFGWSSGLALMYFPLWTVLFAAAFMGFVGYGVQWLVITHFISLPYIMVFLCCLLAGLSICWFNTVCFVLCISNFPANRSLALSLTVSFNGVSAALYTLAYNAINPTSPELYLLLNALIPLIVSFTAIIPILRQPPFEPLPPDGVRRDSLMFLLLNILAALNGVYLLLFGSNSSDLTSARLLFGGAILLLVFPLCIPGLVIARNWYNRTIHTSFRLEGSGFILVDPDELELHKGMLAHEANREGYQLLSDDVVQNPVKSVAVEEEDSDESCCKKLITRDQLEGLGIEHSLSLLLTRSDFWLYYITYFCGGTIGLVYSNNLGQIAQSLGQSSNTTTLVTLYSAFSFFGRLLSATPDYIRAKVYFARTGWLAIALLPTPFALFLLASSGTASALQAGTALMGLSSGFIFAAAVSITSELFGPNSVGVNHNILITNIPIGSLIYGFLAALVYDSHGFTGTKSMTSESVVCMGRDCYYLTFVWWGCLSLLGLGSSLVLFIRTRRAYQRFEQARISSNINDS

SEQ ID NO: 3775 - protein, 564 aa, Arabidopsis thaliana
  peptide (1)..(564): Ceres Seq. ID no. 13488818
  misc_feature (336)..(500): Pfam Name: and other Pfam Description: Sugar
  misc_feature (1)..(564): NCBI GI NO: 18415316 NR Description: expressed protein [Arabidopsis thaliana]
  misc_feature (1)..(564): NCBI GI NO: 21536488 NR Description: unknown [Arabidopsis thaliana]
  misc_feature (134)..(564): NCBI GI NO: 7487718 NR Description: hypothetical protein T5K18
  misc_feature (1)..(305): NCBI GI NO: 15222361 NR Description: expressed protein [Arabidopsis thaliana]
  misc_feature (283)..(558): NCBI GI NO: 15222361 NR Description: expressed protein [Arabidopsis thaliana]
  misc_feature (269)..(559): NCBI GI NO: 34907888 NR Description: P0031D02.33
  misc_feature (1)..(248): NCBI GI NO: 34907888 NR Description: P0031D02.33
  misc_feature (166)..(557): NCBI GI NO: 15232155 NR Description: expressed protein [Arabidopsis thaliana]
  misc_feature (1)..(290): NCBI GI NO: 15232155 NR Description: expressed protein [Arabidopsis thaliana]
  misc_feature (1)..(290): NCBI GI NO: 28393720 NR Description: unknown protein [Arabidopsis thaliana]
MILVATIWIQAFTGTNFDFSAYSSDLKSVLGISQVQLNYLAVASDLGKVFGWSSGLALMYFPLWTVLFAAAFMGFVGYGVQWLVITHFISLPYIMVFLCCLLAGLSICWFNTVCFVLCISNFPANRSLALSLTVSFNGVSAALYTLAYNAINPTSPELYLLLNALIPLIVSFTAIIPILRQPPFEPLPPDGVRRDSLMFLLLNILAALNGVYLLLFGSNSSDLTSARLLFGGAILLLVFPLCIPGLVIARNWYNRTIHTSFRLEGSGFILVDPDELELHKGMLAHEANREGYQLLSDDVVQNPVKSVAVEEEDSDESCCKKLITRDQLEGLGIEHSLSLLLTRSDFWLYYITYFCGGTIGLVYSNNLGQIAQSLGQSSNTTTLVTLYSAFSFFGRLLSATPDYIRAKVYFARTGWLAIALLPTPFALFLLASSGTASALQAGTALMGLSSGFIFAAAVSITSELFGPNSVGVNHNILITNIPIGSLIYGFLAALVYDSHGFTGTKSMTSESVVCMGRDCYYLTFVWWGCLSLLGLGSSLVLFIRTRRAYQRFEQARISSNINDS

SEQ ID NO: 3776 - protein, 506 aa, Arabidopsis thaliana
  peptide (1)..(506): Ceres Seq. ID no. 13488819
  misc_feature (278)..(442): Pfam Name: and other Pfam Description: Sugar
  misc_feature (1)..(506): NCBI GI NO: 18415316 NR Description: expressed protein [Arabidopsis thaliana]
  misc_feature (1)..(506): NCBI GI NO: 21536488 NR Description: unknown [Arabidopsis thaliana]
  misc_feature (76)..(506): NCBI GI NO: 7487718 NR Description: hypothetical protein T5K18
  misc_feature (1)..(247): NCBI GI NO: 15222361 NR Description: expressed protein [Arabidopsis thaliana]
  misc_feature (225)..(500): NCBI GI NO: 15222361 NR Description: expressed protein [Arabidopsis thaliana]
  misc_feature (211)..(501): NCBI GI NO: 34907888 NR Description: P0031D02.33
  misc_feature (1)..(190): NCBI GI NO: 34907888 NR Description: P0031D02.33
  misc_feature (108)..(499): NCBI GI NO: 15232155 NR Description: expressed protein [Arabidopsis thaliana]
  misc_feature (1)..(232): NCBI GI NO: 15232155 NR Description: expressed protein [Arabidopsis thaliana]
  misc_feature (1)..(232): NCBI GI NO: 28393720 NR Description: unknown protein [Arabidopsis thaliana]
MYFPLWTVLFAAAFMGFVGYGVQWLVITHFISLPYIMVFLCCLLAGLSICWFNTVCFVLCISNFPANRSLALSLTVSFNGVSAALYTLAYNAINPTSPELYLLLNALIPLIVSFTAIIPILRQPPFEPLPPDGVRRDSLMFLLLNILAALNGVYLLLFGSNSSDLTSARLLFGGAILLLVFPLCIPGLVIARNWYNRTIHTSFRLEGSGFILVDPDELELHKGMLAHEANREGYQLLSDDVVQNPVKSVAVEEEDSDESCCKKLITRDQLEGLGIEHSLSLLLTRSDFWLYYITYFCGGTIGLVYSNNLGQIAQSLGQSSNTTTLVTLYSAFSFFGRLLSATPDYIRAKVYFARTGWLAIALLPTPFALFLLASSGTASALQAGTALMGLSSGFIFAAAVSITSELFGPNSVGVNHNILITNIPIGSLIYGFLAALVYDSHGFTGTKSMTSESVVCMGRDCYYLTFVWWGCLSLLGLGSSLVLFIRTRRAYQRFEQARISSNINDS

SEQ ID NO: 3777 - DNA, 1751 bp, Arabidopsis thaliana
  misc_feature (1)..(1751): Ceres Seq. ID no. 12727312
gagtttgtttaggcaggggagattcttcttcattctcatcattatttctctattaatttcaccccaaaaaagaaaaaagaaaaattccaacaagaaaaaaaaaagaaaaagaaagttgattcttcgcttaggcttgaaatctctccaatccaaatctcaaattaaccttccatcgtcatctctttccctttttttttcccactttctttgcgaatcgcgagatctcggaatcgcatccttgattttgggatactgttttttttttttttaatcttgtttcattttcacgtgaaattcttagctgctagaactggacttgaatttcaacgagaattttggagattttttttttgtttgggtttttcctttctgttttgtgtgtttggaattagggttgtcgagcgagaatggacaagtacgagctggtgaaagacataggtgctgggaattttggagttgccaggctcatgaaggtcaaaaactctaaggaacttgttgccatgaagtacatcgagcgtggtcctaagattgatgagaatgtggcaagagagatcattaatcacagatcacttcgccatccgaatataatccggttcaaggaggtggtgttgactccaacccatcttgccattgccatggaatatgctgctggtggtgaactattcgagcgtatatgcagtgctggaagatttagtgaggatgaggcgagatatttcttccagcagcttatatcaggtgttagctattgccatgctatgcaaatatgccatagagatctgaagctcgagaatacgctcttggatggaagtcctgctccacgtctgaaaatctgtgattttggttattccaagtcctctctgctgcactctaggcccaaatcaacagttggaactccagcatatattgcacctgaggtcctttctcgaagagaatatgatggcaagatggctgatgtatggtcttgtggtgtgactctttatgtcatgctggttggagcatacccatttgaagaccaggaagaccccaagaacttcaggaaaacaatacaaaaaataatggctgtccagtacaagatcccggactacgtccatatctcacaggattgtaaaaatctcctttcccgtatatttgtcgccaattcactcaagaggatcaccattgcagaaatcaagaaacattcatggttcctaaagaatttgccaagggaactcacagagacagctcaagctgcatatttcaagaaagagaacccaaccttctcccttcagaccgttgaagagatcatgaagatagtggctgacgccaaaacaccgcctcctgtttcccgatccatcggaggttttggctggggaggaaatggggatgcagatggaaaagaggaagatgcagaagacgtggaggaggaagaggaggaggtggaagaagaggaagacgatgaggatgaatacgataagactgtaaaggaagtacacgcaagtggagaagtgagaataagttgatattttggtttttggtctgtgtaagaaagaagtcgtcgttggtttgttgaaactgaaaagtctctgttctcgtgtttgcctttacaatgctttggctaaggttttggttctggttttggagatttgtaaaatttgcagtataagatgaacaaacagagaggttgatgatgagaatgagtcctttgctacgcatggtactatgaacattgtgacctccaataaatatttttgtaaattagattttattttccg

SEQ ID NO: 3778 - protein, 363 aa, Arabidopsis thaliana
  peptide (1)..(363): Ceres Seq. ID no. 12727313
  misc_feature (4)..(260): Pfam Name: Pfam Description:  Protein kinase domain
  misc_feature (1)..(363): NCBI GI NO: 15220251 NR Description: Ser/Thr kinase; protein id: At1g10940
  misc_feature (1)..(363): NCBI GI NO: 1362026 NR Description: probable serine/threonine-specific protein kinase
  misc_feature (1)..(360): NCBI GI NO: 2129803 NR Description: probable serine/threonine-specific protein kinase
  misc_feature (1)..(363): NCBI GI NO: 21618062 NR Description: putative serine/threonine-protein kinase
  misc_feature (1)..(363): NCBI GI NO: 15219836 NR Description: putative serine/threonine-protein kinase
  misc_feature (1)..(363): NCBI GI NO: 19568098 NR Description: osmotic stress-activated protein kinase
  misc_feature (1)..(363): NCBI GI NO: 1362051 NR Description: protein kinase SPK-3 (EC 2.7.1.-) - soybean
  misc_feature (1)..(363): NCBI GI NO: 1161254 NR Description: protein kinase [Glycine max]
  misc_feature (1)..(360): NCBI GI NO: 7434329 NR Description: protein kinase PK1 (EC 2
  misc_feature (1)..(359): NCBI GI NO: 15242858 NR Description: serine/threonine-protein kinase
MDKYELVKDIGAGNFGVARLMKVKNSKELVAMKYIERGPKIDENVAREIINHRSLRHPNIIRFKEVVLTPTHLAIAMEYAAGGELFERICSAGRFSEDEARYFFQQLISGVSYCHAMQICHRDLKLENTLLDGSPAPRLKICDFGYSKSSLLHSRPKSTVGTPAYIAPEVLSRREYDGKMADVWSCGVTLYVMLVGAYPFEDQEDPKNFRKTIQKIMAVQYKIPDYVHISQDCKNLLSRIFVANSLKRITIAEIKKHSWFLKNLPRELTETAQAAYFKKENPTFSLQTVEEIMKIVADAKTPPPVSRSIGGFGWGGNGDADGKEEDAEDVEEEEEEVEEEEDDEDEYDKTVKEVHASGEVRIS

SEQ ID NO: 3779 - protein, 343 aa, Arabidopsis thaliana
  peptide (1)..(343): Ceres Seq. ID no. 12727314
  misc_feature (1)..(240): Pfam Name: Pfam Description:  Protein kinase domain
  misc_feature (1)..(343): NCBI GI NO: 15220251 NR Description: Ser/Thr kinase; protein id: At1g10940
  misc_feature (1)..(343): NCBI GI NO: 1362026 NR Description: probable serine/threonine-specific protein kinase
  misc_feature (1)..(340): NCBI GI NO: 2129803 NR Description: probable serine/threonine-specific protein kinase
  misc_feature (1)..(343): NCBI GI NO: 21618062 NR Description: putative serine/threonine-protein kinase
  misc_feature (1)..(343): NCBI GI NO: 15219836 NR Description: putative serine/threonine-protein kinase
  misc_feature (1)..(343): NCBI GI NO: 19568098 NR Description: osmotic stress-activated protein kinase
  misc_feature (1)..(343): NCBI GI NO: 1362051 NR Description: protein kinase SPK-3 (EC 2.7.1.-) - soybean
  misc_feature (1)..(343): NCBI GI NO: 1161254 NR Description: protein kinase [Glycine max]
  misc_feature (1)..(340): NCBI GI NO: 7434329 NR Description: protein kinase PK1 (EC 2
  misc_feature (1)..(339): NCBI GI NO: 15242858 NR Description: serine/threonine-protein kinase
MKVKNSKELVAMKYIERGPKIDENVAREIINHRSLRHPNIIRFKEVVLTPTHLAIAMEYAAGGELFERICSAGRFSEDEARYFFQQLISGVSYCHAMQICHRDLKLENTLLDGSPAPRLKICDFGYSKSSLLHSRPKSTVGTPAYIAPEVLSRREYDGKMADVWSCGVTLYVMLVGAYPFEDQEDPKNFRKTIQKIMAVQYKIPDYVHISQDCKNLLSRIFVANSLKRITIAEIKKHSWFLKNLPRELTETAQAAYFKKENPTFSLQTVEEIMKIVADAKTPPPVSRSIGGFGWGGNGDADGKEEDAEDVEEEEEEVEEEEDDEDEYDKTVKEVHASGEVRIS

SEQ ID NO: 3780 - protein, 332 aa, Arabidopsis thaliana
  peptide (1)..(332): Ceres Seq. ID no. 12727315
  misc_feature (1)..(229): Pfam Name: Pfam Description:  Protein kinase domain
  misc_feature (1)..(332): NCBI GI NO: 15220251 NR Description: Ser/Thr kinase; protein id: At1g10940
  misc_feature (1)..(332): NCBI GI NO: 1362026 NR Description: probable serine/threonine-specific protein kinase
  misc_feature (1)..(329): NCBI GI NO: 2129803 NR Description: probable serine/threonine-specific protein kinase
  misc_feature (1)..(332): NCBI GI NO: 21618062 NR Description: putative serine/threonine-protein kinase
  misc_feature (1)..(332): NCBI GI NO: 15219836 NR Description: putative serine/threonine-protein kinase
  misc_feature (1)..(332): NCBI GI NO: 19568098 NR Description: osmotic stress-activated protein kinase
  misc_feature (1)..(332): NCBI GI NO: 1362051 NR Description: protein kinase SPK-3 (EC 2.7.1.-) - soybean
  misc_feature (1)..(332): NCBI GI NO: 1161254 NR Description: protein kinase [Glycine max]
  misc_feature (1)..(329): NCBI GI NO: 7434329 NR Description: protein kinase PK1 (EC 2
  misc_feature (1)..(328): NCBI GI NO: 15242858 NR Description: serine/threonine-protein kinase
MKYIERGPKIDENVAREIINHRSLRHPNIIRFKEVVLTPTHLAIAMEYAAGGELFERICSAGRFSEDEARYFFQQLISGVSYCHAMQICHRDLKLENTLLDGSPAPRLKICDFGYSKSSLLHSRPKSTVGTPAYIAPEVLSRREYDGKMADVWSCGVTLYVMLVGAYPFEDQEDPKNFRKTIQKIMAVQYKIPDYVHISQDCKNLLSRIFVANSLKRITIAEIKKHSWFLKNLPRELTETAQAAYFKKENPTFSLQTVEEIMKIVADAKTPPPVSRSIGGFGWGGNGDADGKEEDAEDVEEEEEEVEEEEDDEDEYDKTVKEVHASGEVRIS

SEQ ID NO: 3781 - DNA, 1643 bp, Arabidopsis thaliana
  misc_feature (1)..(1643): Ceres Seq. ID no. 12328994
ggttcagtctcttcgaagctcgtcgtctctctcttcaaaactccggtgaaaatggcgtcgcttactctccggtgcgattcgacgcatcttttgccttcccgtgatgttgtcaagggaacaaaaccatttggaacgagcttggtgtatcctaggatcatatcgaagaagtttaatgttagaatgagagtgatacctgaggaaggagatgtgttctcttcttctaagagtaatggatcatcaatggggattgagttacagccagatttggtttcgtttggaacattagcagctgaaatgattcctacaacaatggattctcctgaagttgaggatgaagagtttgatttagatcgacctactgatggatttgcgtctattcctcaagctattgaagatattcgacatggcaagatggtagttgttgtagatgatgaagatagagaaaacgaaggagatttgataatggcggcatctttggctacacctgaagctatggcttttgttgtaaagcatgggactggaatcgtgtgtgtgagcatgaaaggcgaagacttggagaggttagagcttcctttaatggtaacgcgtaaggataacgaggaaaaactccgcacggccttcacggtttcagtggacgcaaaaaagggaacatccacaggtgtctcagctcgtgatagggcgcaaacaatattaacccttgcatcaaaagattcaaaacctgaagatttcaatcgtcctggtcatatttttcctttgagatacagagaaggtggtgttcttaaaagagcagggcatacagaagcctctgttgacttgactgtgttgtccggtttagaaccagtatctgttttatgtgagattgtagatgatgatggttccatggctagattaccaagactccgccaattcgctcaagagaacaacttgaaattaatttcaatcgctgatttaatcagataccgaaggaaaagagagagactggttgagtttactgcggttgcgcctataccgacaatgtggggaccattcaaagcacattgctttaagtcattacttgatggagttgagcacattgcaatggtcaagggagaaatcggagatgggaaggatattctcgtgagagtacacgcggagtgtatcacagatgatatattcggaaatagctctggtggaaaacagttagcgattgcaatgagactgattgaagaaaatgggagaggtgtttttgtctacttacgtggtcctgaaagtaaaggcattgatctaagccacaagcctcgtacttacaacaccaattcagatcaagccgagggtgtttcatttcccgttgcttcacgggaatacggcattggagcacaaattctaagggatcttggagttagagagatgaaggtgatgacgaataatccagcacattacgttggtcttaaaggctatggtttatcaatttctggtaaggttccactcattactactccttaagtgttgttttgaccgttgtttgattacgttaagagacgacacgtgtcggcttcttgagtgacttagtttgttgtttagttgtggttttggcgcctaaatcatgtgatctgatattgtgttttttgacctccataattatcattagaattattttaaatggc

SEQ ID NO: 3782 - protein, 493 aa, Arabidopsis thaliana
  peptide (1)..(493): Ceres Seq. ID no. 12328995
  misc_feature (126)..(323): Pfam Name: Pfam Description:  3,4-dihydroxy-2-butanone 4-phosphate synthase
  misc_feature (18)..(493): NCBI GI NO: 30681714 NR Description: GTP cyclohydrolase -related [Arabidopsis thaliana]
  misc_feature (61)..(493): NCBI GI NO: 25290324 NR Description: probable GTP cyclohydrolase
  misc_feature (2)..(491): NCBI GI NO: 27735197 NR Description: Riboflavin biosynthesis protein ribA
  misc_feature (53)..(491): NCBI GI NO: 7436011 NR Description: GTP cyclohydrolase II (EC 3
  misc_feature (155)..(491): NCBI GI NO: 30697989 NR Description: GTP cyclohydrolase II
  misc_feature (91)..(491): NCBI GI NO: 29367375 NR Description: GTP cyclohydrolase II/3
  misc_feature (88)..(491): NCBI GI NO: 18424277 NR Description: GTP cyclohydrolase II / 3
  misc_feature (124)..(489): NCBI GI NO: 23053279 NR Description: hypothetical protein [Geobacter metallireducens]
  misc_feature (123)..(493): NCBI GI NO: 15605862 NR Description: GTP cyclohydrolase II [Aquifex aeolicus]
  misc_feature (112)..(489): NCBI GI NO: 23018011 NR Description: hypothetical protein [Thermobifida fusca]
GSVSSKLVVSLFKTPVKMASLTLRCDSTHLLPSRDVVKGTKPFGTSLVYPRIISKKFNVRMRVIPEEGDVFSSSKSNGSSMGIELQPDLVSFGTLAAEMIPTTMDSPEVEDEEFDLDRPTDGFASIPQAIEDIRHGKMVVVVDDEDRENEGDLIMAASLATPEAMAFVVKHGTGIVCVSMKGEDLERLELPLMVTRKDNEEKLRTAFTVSVDAKKGTSTGVSARDRAQTILTLASKDSKPEDFNRPGHIFPLRYREGGVLKRAGHTEASVDLTVLSGLEPVSVLCEIVDDDGSMARLPRLRQFAQENNLKLISIADLIRYRRKRERLVEFTAVAPIPTMWGPFKAHCFKSLLDGVEHIAMVKGEIGDGKDILVRVHAECITDDIFGNSSGGKQLAIAMRLIEENGRGVFVYLRGPESKGIDLSHKPRTYNTNSDQAEGVSFPVASREYGIGAQILRDLGVREMKVMTNNPAHYVGLKGYGLSISGKVPLITTP

SEQ ID NO: 3783 - protein, 476 aa, Arabidopsis thaliana
  peptide (1)..(476): Ceres Seq. ID no. 12328996
  misc_feature (109)..(306): Pfam Name: Pfam Description:  3,4-dihydroxy-2-butanone 4-phosphate synthase
  misc_feature (1)..(476): NCBI GI NO: 30681714 NR Description: GTP cyclohydrolase -related [Arabidopsis thaliana]
  misc_feature (44)..(476): NCBI GI NO: 25290324 NR Description: probable GTP cyclohydrolase
  misc_feature (1)..(474): NCBI GI NO: 27735197 NR Description: Riboflavin biosynthesis protein ribA
  misc_feature (36)..(474): NCBI GI NO: 7436011 NR Description: GTP cyclohydrolase II (EC 3
  misc_feature (138)..(474): NCBI GI NO: 30697989 NR Description: GTP cyclohydrolase II
  misc_feature (74)..(474): NCBI GI NO: 29367375 NR Description: GTP cyclohydrolase II/3
  misc_feature (71)..(474): NCBI GI NO: 18424277 NR Description: GTP cyclohydrolase II / 3
  misc_feature (107)..(472): NCBI GI NO: 23053279 NR Description: hypothetical protein [Geobacter metallireducens]
  misc_feature (106)..(476): NCBI GI NO: 15605862 NR Description: GTP cyclohydrolase II [Aquifex aeolicus]
  misc_feature (95)..(472): NCBI GI NO: 23018011 NR Description: hypothetical protein [Thermobifida fusca]
MASLTLRCDSTHLLPSRDVVKGTKPFGTSLVYPRIISKKFNVRMRVIPEEGDVFSSSKSNGSSMGIELQPDLVSFGTLAAEMIPTTMDSPEVEDEEFDLDRPTDGFASIPQAIEDIRHGKMVVVVDDEDRENEGDLIMAASLATPEAMAFVVKHGTGIVCVSMKGEDLERLELPLMVTRKDNEEKLRTAFTVSVDAKKGTSTGVSARDRAQTILTLASKDSKPEDFNRPGHIFPLRYREGGVLKRAGHTEASVDLTVLSGLEPVSVLCEIVDDDGSMARLPRLRQFAQENNLKLISIADLIRYRRKRERLVEFTAVAPIPTMWGPFKAHCFKSLLDGVEHIAMVKGEIGDGKDILVRVHAECITDDIFGNSSGGKQLAIAMRLIEENGRGVFVYLRGPESKGIDLSHKPRTYNTNSDQAEGVSFPVASREYGIGAQILRDLGVREMKVMTNNPAHYVGLKGYGLSISGKVPLITTP

SEQ ID NO: 3784 - protein, 433 aa, Arabidopsis thaliana
  peptide (1)..(433): Ceres Seq. ID no. 12328997
  misc_feature (66)..(263): Pfam Name: Pfam Description:  3,4-dihydroxy-2-butanone 4-phosphate synthase
  misc_feature (1)..(433): NCBI GI NO: 30681714 NR Description: GTP cyclohydrolase -related [Arabidopsis thaliana]
  misc_feature (1)..(433): NCBI GI NO: 25290324 NR Description: probable GTP cyclohydrolase
  misc_feature (1)..(431): NCBI GI NO: 27735197 NR Description: Riboflavin biosynthesis protein ribA
  misc_feature (1)..(431): NCBI GI NO: 7436011 NR Description: GTP cyclohydrolase II (EC 3
  misc_feature (95)..(431): NCBI GI NO: 30697989 NR Description: GTP cyclohydrolase II
  misc_feature (31)..(431): NCBI GI NO: 29367375 NR Description: GTP cyclohydrolase II/3
  misc_feature (28)..(431): NCBI GI NO: 18424277 NR Description: GTP cyclohydrolase II / 3
  misc_feature (64)..(429): NCBI GI NO: 23053279 NR Description: hypothetical protein [Geobacter metallireducens]
  misc_feature (63)..(433): NCBI GI NO: 15605862 NR Description: GTP cyclohydrolase II [Aquifex aeolicus]
  misc_feature (52)..(429): NCBI GI NO: 23018011 NR Description: hypothetical protein [Thermobifida fusca]
MRVIPEEGDVFSSSKSNGSSMGIELQPDLVSFGTLAAEMIPTTMDSPEVEDEEFDLDRPTDGFASIPQAIEDIRHGKMVVVVDDEDRENEGDLIMAASLATPEAMAFVVKHGTGIVCVSMKGEDLERLELPLMVTRKDNEEKLRTAFTVSVDAKKGTSTGVSARDRAQTILTLASKDSKPEDFNRPGHIFPLRYREGGVLKRAGHTEASVDLTVLSGLEPVSVLCEIVDDDGSMARLPRLRQFAQENNLKLISIADLIRYRRKRERLVEFTAVAPIPTMWGPFKAHCFKSLLDGVEHIAMVKGEIGDGKDILVRVHAECITDDIFGNSSGGKQLAIAMRLIEENGRGVFVYLRGPESKGIDLSHKPRTYNTNSDQAEGVSFPVASREYGIGAQILRDLGVREMKVMTNNPAHYVGLKGYGLSISGKVPLITTP

SEQ ID NO: 3785 - DNA, 1066 bp, Arabidopsis thaliana
  misc_feature (1)..(1066): Ceres Seq. ID no. 13497453
aacgtctgatctctgatcttccgttttaaaacgacatcaaggtgttactgtccaatttcagattgggttagaacatcttgtaatatctacaaacttgagggtgttttacacgaatatttcttaattaagaggcttaacgttggcgtttttgacgaaaatggagcaaccaatgtcgccgggaacgaagtcggtggatctccgagaatgcatggaatcacttctccgttttagtctgagatctcatttaaacgaatctgttccaagtttcgatcttgacctgaccagagatttttgtcttcatctccttggggaagctacagattcaacagaaaaatctgcggtgtacaagcttctagcaacggctttgtctgaatgtctagcttccgagggtgataaaaattctaacttggaaaaatacagcaaactgattcatggcttgggatatgacttaataaatatgttgaaggaggtgaactttgagcttcatgtccaagagccttacttcacccaattgaaagatggtttgaaaactgttgaaggaagatgcgcagtgggagactacatgagaattagttcaggagattttcttttgttcaataaatgcttgctgcttgaagttcaggacgttcaccgttatacttcattctcagaaatgctgaaagtggagggtcttgccaaagttcttcctggagttgaaagtatagaagaaggtgttcaagtttaccgaaacttttattctgaagagaaggaaagaatgaacggtgttgtagctattcgtgttgcaaaaccagctaatcagccttctgcagctttggcaggagtattgtctgaactgaagtccagtgggatcaaaagcctgttggatgaatacacagctggggttacctcgtagctgcatctgaaaacctttgtgcgcagagaaactactcaatttgaagggttttgatttctctacactcggatgatgttaaatttgtgtttgtttgtgtgtacgagtagctaaatcacagaagatcacatcttttcttacttattgagcacctcacaaggcaacaaaacatttttc

SEQ ID NO: 3786 - protein, 244 aa, Arabidopsis thaliana
  peptide (1)..(244): Ceres Seq. ID no. 13497454
  misc_feature (1)..(244): NCBI GI NO: 18396513 NR Description: expressed protein [Arabidopsis thaliana]
  misc_feature (1)..(244): NCBI GI NO: 21536491 NR Description: unknown [Arabidopsis thaliana]
  misc_feature (111)..(208): NCBI GI NO: 20093930 NR Description: Archaea-specific enzyme related to ProFAR isomerase
  misc_feature (105)..(208): NCBI GI NO: 14590265 NR Description: hypothetical protein [Pyrococcus horikoshii]
  misc_feature (105)..(208): NCBI GI NO: 14521811 NR Description: hypothetical protein [Pyrococcus abyssi]
  misc_feature (105)..(208): NCBI GI NO: 18976827 NR Description: hypothetical protein
  misc_feature (154)..(241): NCBI GI NO: 25408874 NR Description: hypothetical protein At2g43470
  misc_feature (154)..(241): NCBI GI NO: 30689388 NR Description: expressed protein [Arabidopsis thaliana]
  misc_feature (107)..(207): NCBI GI NO: 14521785 NR Description: hypothetical protein [Pyrococcus abyssi]
  misc_feature (107)..(207): NCBI GI NO: 18976842 NR Description: hypothetical protein
MEQPMSPGTKSVDLRECMESLLRFSLRSHLNESVPSFDLDLTRDFCLHLLGEATDSTEKSAVYKLLATALSECLASEGDKNSNLEKYSKLIHGLGYDLINMLKEVNFELHVQEPYFTQLKDGLKTVEGRCAVGDYMRISSGDFLLFNKCLLLEVQDVHRYTSFSEMLKVEGLAKVLPGVESIEEGVQVYRNFYSEEKERMNGVVAIRVAKPANQPSAALAGVLSELKSSGIKSLLDEYTAGVTS

SEQ ID NO: 3787 - protein, 240 aa, Arabidopsis thaliana
  peptide (1)..(240): Ceres Seq. ID no. 13497455
  misc_feature (1)..(240): NCBI GI NO: 18396513 NR Description: expressed protein [Arabidopsis thaliana]
  misc_feature (1)..(240): NCBI GI NO: 21536491 NR Description: unknown [Arabidopsis thaliana]
  misc_feature (107)..(204): NCBI GI NO: 20093930 NR Description: Archaea-specific enzyme related to ProFAR isomerase
  misc_feature (101)..(204): NCBI GI NO: 14590265 NR Description: hypothetical protein [Pyrococcus horikoshii]
  misc_feature (101)..(204): NCBI GI NO: 14521811 NR Description: hypothetical protein [Pyrococcus abyssi]
  misc_feature (101)..(204): NCBI GI NO: 18976827 NR Description: hypothetical protein
  misc_feature (150)..(237): NCBI GI NO: 25408874 NR Description: hypothetical protein At2g43470
  misc_feature (150)..(237): NCBI GI NO: 30689388 NR Description: expressed protein [Arabidopsis thaliana]
  misc_feature (103)..(203): NCBI GI NO: 14521785 NR Description: hypothetical protein [Pyrococcus abyssi]
  misc_feature (103)..(203): NCBI GI NO: 18976842 NR Description: hypothetical protein
MSPGTKSVDLRECMESLLRFSLRSHLNESVPSFDLDLTRDFCLHLLGEATDSTEKSAVYKLLATALSECLASEGDKNSNLEKYSKLIHGLGYDLINMLKEVNFELHVQEPYFTQLKDGLKTVEGRCAVGDYMRISSGDFLLFNKCLLLEVQDVHRYTSFSEMLKVEGLAKVLPGVESIEEGVQVYRNFYSEEKERMNGVVAIRVAKPANQPSAALAGVLSELKSSGIKSLLDEYTAGVTS

SEQ ID NO: 3788 - protein, 227 aa, Arabidopsis thaliana
  peptide (1)..(227): Ceres Seq. ID no. 13497456
  misc_feature (1)..(227): NCBI GI NO: 18396513 NR Description: expressed protein [Arabidopsis thaliana]
  misc_feature (1)..(227): NCBI GI NO: 21536491 NR Description: unknown [Arabidopsis thaliana]
  misc_feature (94)..(191): NCBI GI NO: 20093930 NR Description: Archaea-specific enzyme related to ProFAR isomerase
  misc_feature (88)..(191): NCBI GI NO: 14590265 NR Description: hypothetical protein [Pyrococcus horikoshii]
  misc_feature (88)..(191): NCBI GI NO: 14521811 NR Description: hypothetical protein [Pyrococcus abyssi]
  misc_feature (88)..(191): NCBI GI NO: 18976827 NR Description: hypothetical protein
  misc_feature (137)..(224): NCBI GI NO: 25408874 NR Description: hypothetical protein At2g43470
  misc_feature (137)..(224): NCBI GI NO: 30689388 NR Description: expressed protein [Arabidopsis thaliana]
  misc_feature (90)..(190): NCBI GI NO: 14521785 NR Description: hypothetical protein [Pyrococcus abyssi]
  misc_feature (90)..(190): NCBI GI NO: 18976842 NR Description: hypothetical protein
MESLLRFSLRSHLNESVPSFDLDLTRDFCLHLLGEATDSTEKSAVYKLLATALSECLASEGDKNSNLEKYSKLIHGLGYDLINMLKEVNFELHVQEPYFTQLKDGLKTVEGRCAVGDYMRISSGDFLLFNKCLLLEVQDVHRYTSFSEMLKVEGLAKVLPGVESIEEGVQVYRNFYSEEKERMNGVVAIRVAKPANQPSAALAGVLSELKSSGIKSLLDEYTAGVTS

SEQ ID NO: 3789 - DNA, 1636 bp, Arabidopsis thaliana
  misc_feature (1)..(1636): Ceres Seq. ID no. 12371490
aagggatgcaatagagccaagaggaggagaaagatgggatctggtaaacaaaacacgtcaaagtcaaattacaaatttatattttataaaacagataacaacaacaaattaaacttttattaatctctctctgcctctactcactggatcatcatagctccaaacttgtaccagtcgcatcaaagcaagttttggtgaagaagaagagacgaggtcttcctcttactgtggtggtgacattttctctaaaaagaaagtctccgatatgtcgcagagatggagtagaaagaagagtagacttccattagcgggtctcctctttattctcgttgtcacctttatgattctcttcaacgagcgtagcattcagcagatccatcaccacgccgcgagtcacactcaaaatctccgagaaccttccacgttcgatttcgtcaagcctaatgttcctcggattaactacttgggagctcatgaggttttggatagattcagcaaatgcaactcgacgaaagagtacagtgggaagaaaatcggatgggttgacccgtttgaagaccacccgggtcaagtaacaaaggaggagcagaaatgtgatgtcttttctgggaaatgggtctttgataattcatcatcataccctttacacaaggaatctcagtgtccttacatgtccgaccagttggcttgtcagaagcatggtaggaaggatttggagtatcagcattggagatggcaacctcatgcctgcaacttgaagagatggaatgcgatagaaatgtgggagaagctgagaggaaagagattgatgtttgttggagactcgttaaacagaggccaatggatttcaatggtttgtctcttacagtctgtcattccacgtgacaagcagtctatgtctcctaacgctcacctcaccattttcagggctgaggactacaatgccacagtggagtttctctgggcaccgttgctcgtggagtcgaattctgatgaccctgttaatcacagattgagcgagcggattatccgacccgattctgttcttaaacatgcatcaaagtggcaacatgctgatattctaatcttcaacacctacttatggtggagacaagactctgtcaagctccgatggagcagtgaagaaaaagggtcatgcgaggaggtgaagagcgccgagggaatggagatggcaatggatagttggggtgattgggttgctaacaatgtcgatccaaacaaaaagcgagttttcttcgttacaatgtctcctacacatcaatggagccgagaatggaacccgggaagcgaaggaaactgctacggggagaagaaaccaatagaggaagagagttattggggaagtgggtcggacattccgacaatgaggatggtgaagagagttttggagagattgggaccaaaggtctcagttataaacatcactcagttgtctgagtatcgaaaagatggtcatccatcggtgtaccggaaattctgggaacctctaaatgaagaccggttgaaaaacccggcatcgtattctgactgtactcattggtgtgtacctggagttcctgatgtctggaatcaattgcttttccattttttgtgaaaatgaaatgaatataacctt

SEQ ID NO: 3790 - protein, 449 aa, Arabidopsis thaliana
  peptide (1)..(449): Ceres Seq. ID no. 12371491
  misc_feature (280)..(449): Pfam Name: Pfam Description:  Arabidopsis proteins of unknown function
  misc_feature (1)..(449): NCBI GI NO: 18413698 NR Description: putative protein; protein id: At5g01620
  misc_feature (1)..(449): NCBI GI NO: 11291876 NR Description: hypothetical protein F7A7
  misc_feature (1)..(449): NCBI GI NO: 21536676 NR Description: unknown [Arabidopsis thaliana]
  misc_feature (108)..(449): NCBI GI NO: 7487161 NR Description: hypothetical protein At2g38320
  misc_feature (108)..(449): NCBI GI NO: 18404712 NR Description: expressed protein; protein id: At2g38320
  misc_feature (110)..(446): NCBI GI NO: 28876013 NR Description: unknown protein
  misc_feature (103)..(446): NCBI GI NO: 28393743 NR Description: unknown protein [Arabidopsis thaliana]
  misc_feature (103)..(446): NCBI GI NO: 15226647 NR Description: hypothetical protein; protein id: At2g40320.1
  misc_feature (103)..(446): NCBI GI NO: 15228429 NR Description: unknown protein; protein id: At3g11030.1
  misc_feature (103)..(449): NCBI GI NO: 15219382 NR Description: hypothetical protein; protein id: At1g73140.1
MSQRWSRKKSRLPLAGLLFILVVTFMILFNERSIQQIHHHAASHTQNLREPSTFDFVKPNVPRINYLGAHEVLDRFSKCNSTKEYSGKKIGWVDPFEDHPGQVTKEEQKCDVFSGKWVFDNSSSYPLHKESQCPYMSDQLACQKHGRKDLEYQHWRWQPHACNLKRWNAIEMWEKLRGKRLMFVGDSLNRGQWISMVCLLQSVIPRDKQSMSPNAHLTIFRAEDYNATVEFLWAPLLVESNSDDPVNHRLSERIIRPDSVLKHASKWQHADILIFNTYLWWRQDSVKLRWSSEEKGSCEEVKSAEGMEMAMDSWGDWVANNVDPNKKRVFFVTMSPTHQWSREWNPGSEGNCYGEKKPIEEESYWGSGSDIPTMRMVKRVLERLGPKVSVINITQLSEYRKDGHPSVYRKFWEPLNEDRLKNPASYSDCTHWCVPGVPDVWNQLLFHFL

SEQ ID NO: 3791 - protein, 424 aa, Arabidopsis thaliana
  peptide (1)..(424): Ceres Seq. ID no. 12371492
  misc_feature (255)..(424): Pfam Name: Pfam Description:  Arabidopsis proteins of unknown function
  misc_feature (1)..(424): NCBI GI NO: 18413698 NR Description: putative protein; protein id: At5g01620
  misc_feature (1)..(424): NCBI GI NO: 11291876 NR Description: hypothetical protein F7A7
  misc_feature (1)..(424): NCBI GI NO: 21536676 NR Description: unknown [Arabidopsis thaliana]
  misc_feature (83)..(424): NCBI GI NO: 7487161 NR Description: hypothetical protein At2g38320
  misc_feature (83)..(424): NCBI GI NO: 18404712 NR Description: expressed protein; protein id: At2g38320
  misc_feature (85)..(421): NCBI GI NO: 28876013 NR Description: unknown protein
  misc_feature (78)..(421): NCBI GI NO: 28393743 NR Description: unknown protein [Arabidopsis thaliana]
  misc_feature (78)..(421): NCBI GI NO: 15226647 NR Description: hypothetical protein; protein id: At2g40320.1
  misc_feature (78)..(421): NCBI GI NO: 15228429 NR Description: unknown protein; protein id: At3g11030.1
  misc_feature (78)..(424): NCBI GI NO: 15219382 NR Description: hypothetical protein; protein id: At1g73140.1
MILFNERSIQQIHHHAASHTQNLREPSTFDFVKPNVPRINYLGAHEVLDRFSKCNSTKEYSGKKIGWVDPFEDHPGQVTKEEQKCDVFSGKWVFDNSSSYPLHKESQCPYMSDQLACQKHGRKDLEYQHWRWQPHACNLKRWNAIEMWEKLRGKRLMFVGDSLNRGQWISMVCLLQSVIPRDKQSMSPNAHLTIFRAEDYNATVEFLWAPLLVESNSDDPVNHRLSERIIRPDSVLKHASKWQHADILIFNTYLWWRQDSVKLRWSSEEKGSCEEVKSAEGMEMAMDSWGDWVANNVDPNKKRVFFVTMSPTHQWSREWNPGSEGNCYGEKKPIEEESYWGSGSDIPTMRMVKRVLERLGPKVSVINITQLSEYRKDGHPSVYRKFWEPLNEDRLKNPASYSDCTHWCVPGVPDVWNQLLFHFL

SEQ ID NO: 3792 - protein, 314 aa, Arabidopsis thaliana
  peptide (1)..(314): Ceres Seq. ID no. 12371493
  misc_feature (145)..(314): Pfam Name: Pfam Description:  Arabidopsis proteins of unknown function
  misc_feature (1)..(314): NCBI GI NO: 18413698 NR Description: putative protein; protein id: At5g01620
  misc_feature (1)..(314): NCBI GI NO: 11291876 NR Description: hypothetical protein F7A7
  misc_feature (1)..(314): NCBI GI NO: 21536676 NR Description: unknown [Arabidopsis thaliana]
  misc_feature (1)..(314): NCBI GI NO: 7487161 NR Description: hypothetical protein At2g38320
  misc_feature (1)..(314): NCBI GI NO: 18404712 NR Description: expressed protein; protein id: At2g38320
  misc_feature (1)..(311): NCBI GI NO: 28876013 NR Description: unknown protein
  misc_feature (1)..(311): NCBI GI NO: 28393743 NR Description: unknown protein [Arabidopsis thaliana]
  misc_feature (1)..(311): NCBI GI NO: 15226647 NR Description: hypothetical protein; protein id: At2g40320.1
  misc_feature (1)..(311): NCBI GI NO: 15228429 NR Description: unknown protein; protein id: At3g11030.1
  misc_feature (1)..(314): NCBI GI NO: 15219382 NR Description: hypothetical protein; protein id: At1g73140.1
MSDQLACQKHGRKDLEYQHWRWQPHACNLKRWNAIEMWEKLRGKRLMFVGDSLNRGQWISMVCLLQSVIPRDKQSMSPNAHLTIFRAEDYNATVEFLWAPLLVESNSDDPVNHRLSERIIRPDSVLKHASKWQHADILIFNTYLWWRQDSVKLRWSSEEKGSCEEVKSAEGMEMAMDSWGDWVANNVDPNKKRVFFVTMSPTHQWSREWNPGSEGNCYGEKKPIEEESYWGSGSDIPTMRMVKRVLERLGPKVSVINITQLSEYRKDGHPSVYRKFWEPLNEDRLKNPASYSDCTHWCVPGVPDVWNQLLFHFL

SEQ ID NO: 3793 - DNA, 1885 bp, Arabidopsis thaliana
  misc_feature (1)..(1885): Ceres Seq. ID no. 12482192
ggtgatctctgtgctccggcgcataaacccctgtaaagccaataacttgttgttccccaaagtttggttcttcatgttggaaaccgaaagcagtgtctgcgacaacatcgccggcaatgagaaatggcgagcggaagctgaaattggtggcaacgagagagctctgcaagcgcttcgagaactcattatcttcccttttcgttaccctctcgaagctcgaactcttggtctcaaatggcctagaggattgcttctctacggtcctcctggaaccggcaagacaagcttggtccgtgctgttgtccaggaatgtgatgcacatttgattgttttaagccctcattctgtacatcgagcacatgctggagaaagcgagaaagtcttaagggaagctttcgctgaggcttcttctcacgctgtttcagacaagccttctgtgatttttattgatgaaatcgatgttctttgtcctcgtcgtgatgctagacgagaacaagatgttcgtattgcttctcaactgtttacacttatggactcaaacaagccttcatcatctgcaccaagagttgttgttgtagcatccacaaatagggtggatgcgattgacccagcgctaagaagagcgggacgatttgatgctttagttgaagtgagcacaccaaatgaggaggatcgtttaaaaatcctgcagctgtacacaaagaaagtcaatttagatcctagtgtcgatcttcaagccattgcaatatcttgcaacggttatgttggagcagatttggaagctttatgtcgtgaagcgacaatatctgcaagtaaaagatcttcagattctcttattctaacatctcaagacttcaagattgcaaaatctgtggttggtccaagtataaacagaggcatcacagttgaaatccctaaagtgacatgggacgatgttggtggtcttaaagacttaaagaaaaagctccagcaagctgttgaatggccaatcaaacattcagctgcatttgtaaaaatgggcatatcgccaatgcgtgggatacttctacatggtcctccaggttgctcaaagacaactcttgctaaagccgctgcaaatgctgctcaagcctccttcttttccttaagctgtgcggagctattttctatgtatgttggagaaggtgaagcattattgcggaatacatttcaaagagctcgacttgcttctccaagtataatattctttgatgaagctgatgtcgttgcctgtaaaagaggtgatgagagctcaagcaatagttctacagttggagaaaggcttctatctacactgttaaccgaaatggacggtcttgaagaagcaaagggaatcctcgtcttggctgccacaaaccgcccgtatgcaattgatgctgctctaatgcgacctggtcgatttgatctcgtgctatacgtgccaccgcctgatctagaagcccggtttgaaatactgcaagtgcatacacgcaacatgacactaggagacgacgttgatctcagaaaaatcgctgaagaaaccgatctcttcacaggtgccgagctcgagggtctatgcagagaaagcggaactgtctcacttagagaaaacatcgcagcaaccgctgtcttcaatcgccatttccaaaccgcaaaaagctcgcttaaaccagcgttaacaatcgaagaagtcgaaacttattcatcattcaggaaggcggcgaaaagatctgattcgaaaccgattccgattaacaaaaagaaggcgacttccaccgtcttcggattctcatggcaattaggtgttttgagcttattgttgcttgctactggaaactattacttcaaccacactaaacatgaattactagtagcttctgctacatga

SEQ ID NO: 3794 - protein, 627 aa, Arabidopsis thaliana
  peptide (1)..(627): Ceres Seq. ID no. 12482193
  misc_feature (82)..(272): Pfam Name: AAA Pfam Description: ATPase family associated with various cellular activities
  misc_feature (25)..(627): NCBI GI NO: 15227690 NR Description: putative AAA-type ATPase; protein id: At2g03670
  misc_feature (41)..(568): NCBI GI NO: 38345020 NR Description: OSJNBa0029H02.4
  misc_feature (47)..(575): NCBI GI NO: 14602090 NR Description: transitional endoplasmic reticulum ATPase
  misc_feature (2)..(558): NCBI GI NO: 10946660 NR Description: spermatogenesis associated factor [Mus musculus]
  misc_feature (2)..(558): NCBI GI NO: 12847023 NR Description: unnamed protein product [Mus musculus]
  misc_feature (47)..(566): NCBI GI NO: 11498895 NR Description: cell division control protein 48, AAA family
  misc_feature (244)..(571): NCBI GI NO: 11499681 NR Description: cell division control protein 48, AAA family
  misc_feature (47)..(239): NCBI GI NO: 11499681 NR Description: cell division control protein 48, AAA family
  misc_feature (48)..(558): NCBI GI NO: 21624654 NR Description: spermatogenesis associated factor SPAF
  misc_feature (47)..(566): NCBI GI NO: 15679634 NR Description: cell division control protein Cdc48
VISVLRRINPCKANNLLFPKVWFFMLETESSVCDNIAGNEKWRAEAEIGGNERALQALRELIIFPFRYPLEARTLGLKWPRGLLLYGPPGTGKTSLVRAVVQECDAHLIVLSPHSVHRAHAGESEKVLREAFAEASSHAVSDKPSVIFIDEIDVLCPRRDARREQDVRIASQLFTLMDSNKPSSSAPRVVVVASTNRVDAIDPALRRAGRFDALVEVSTPNEEDRLKILQLYTKKVNLDPSVDLQAIAISCNGYVGADLEALCREATISASKRSSDSLILTSQDFKIAKSVVGPSINRGITVEIPKVTWDDVGGLKDLKKKLQQAVEWPIKHSAAFVKMGISPMRGILLHGPPGCSKTTLAKAAANAAQASFFSLSCAELFSMYVGEGEALLRNTFQRARLASPSIIFFDEADVVACKRGDESSSNSSTVGERLLSTLLTEMDGLEEAKGILVLAATNRPYAIDAALMRPGRFDLVLYVPPPDLEARFEILQVHTRNMTLGDDVDLRKIAEETDLFTGAELEGLCRESGTVSLRENIAATAVFNRHFQTAKSSLKPALTIEEVETYSSFRKAAKRSDSKPIPINKKKATSTVFGFSWQLGVLSLLLLATGNYYFNHTKHELLVASAT

SEQ ID NO: 3795 - protein, 603 aa, Arabidopsis thaliana
  peptide (1)..(603): Ceres Seq. ID no. 12482194
  misc_feature (58)..(248): Pfam Name: AAA Pfam Description: ATPase family associated with various cellular activities
  misc_feature (1)..(603): NCBI GI NO: 15227690 NR Description: putative AAA-type ATPase; protein id: At2g03670
  misc_feature (17)..(544): NCBI GI NO: 38345020 NR Description: OSJNBa0029H02.4
  misc_feature (23)..(551): NCBI GI NO: 14602090 NR Description: transitional endoplasmic reticulum ATPase
  misc_feature (1)..(534): NCBI GI NO: 10946660 NR Description: spermatogenesis associated factor [Mus musculus]
  misc_feature (1)..(534): NCBI GI NO: 12847023 NR Description: unnamed protein product [Mus musculus]
  misc_feature (23)..(542): NCBI GI NO: 11498895 NR Description: cell division control protein 48, AAA family
  misc_feature (220)..(547): NCBI GI NO: 11499681 NR Description: cell division control protein 48, AAA family
  misc_feature (23)..(215): NCBI GI NO: 11499681 NR Description: cell division control protein 48, AAA family
  misc_feature (24)..(534): NCBI GI NO: 21624654 NR Description: spermatogenesis associated factor SPAF
  misc_feature (23)..(542): NCBI GI NO: 15679634 NR Description: cell division control protein Cdc48
MLETESSVCDNIAGNEKWRAEAEIGGNERALQALRELIIFPFRYPLEARTLGLKWPRGLLLYGPPGTGKTSLVRAVVQECDAHLIVLSPHSVHRAHAGESEKVLREAFAEASSHAVSDKPSVIFIDEIDVLCPRRDARREQDVRIASQLFTLMDSNKPSSSAPRVVVVASTNRVDAIDPALRRAGRFDALVEVSTPNEEDRLKILQLYTKKVNLDPSVDLQAIAISCNGYVGADLEALCREATISASKRSSDSLILTSQDFKIAKSVVGPSINRGITVEIPKVTWDDVGGLKDLKKKLQQAVEWPIKHSAAFVKMGISPMRGILLHGPPGCSKTTLAKAAANAAQASFFSLSCAELFSMYVGEGEALLRNTFQRARLASPSIIFFDEADVVACKRGDESSSNSSTVGERLLSTLLTEMDGLEEAKGILVLAATNRPYAIDAALMRPGRFDLVLYVPPPDLEARFEILQVHTRNMTLGDDVDLRKIAEETDLFTGAELEGLCRESGTVSLRENIAATAVFNRHFQTAKSSLKPALTIEEVETYSSFRKAAKRSDSKPIPINKKKATSTVFGFSWQLGVLSLLLLATGNYYFNHTKHELLVASAT

SEQ ID NO: 3796 - protein, 451 aa, Arabidopsis thaliana
  peptide (1)..(451): Ceres Seq. ID no. 12482195
  misc_feature (1)..(96): Pfam Name: AAA Pfam Description: ATPase family associated with various cellular activities
  misc_feature (1)..(451): NCBI GI NO: 15227690 NR Description: putative AAA-type ATPase; protein id: At2g03670
  misc_feature (1)..(392): NCBI GI NO: 38345020 NR Description: OSJNBa0029H02.4
  misc_feature (1)..(399): NCBI GI NO: 14602090 NR Description: transitional endoplasmic reticulum ATPase
  misc_feature (1)..(382): NCBI GI NO: 10946660 NR Description: spermatogenesis associated factor [Mus musculus]
  misc_feature (1)..(382): NCBI GI NO: 12847023 NR Description: unnamed protein product [Mus musculus]
  misc_feature (1)..(390): NCBI GI NO: 11498895 NR Description: cell division control protein 48, AAA family
  misc_feature (68)..(395): NCBI GI NO: 11499681 NR Description: cell division control protein 48, AAA family
  misc_feature (1)..(63): NCBI GI NO: 11499681 NR Description: cell division control protein 48, AAA family
  misc_feature (1)..(382): NCBI GI NO: 21624654 NR Description: spermatogenesis associated factor SPAF
  misc_feature (1)..(390): NCBI GI NO: 15679634 NR Description: cell division control protein Cdc48
MDSNKPSSSAPRVVVVASTNRVDAIDPALRRAGRFDALVEVSTPNEEDRLKILQLYTKKVNLDPSVDLQAIAISCNGYVGADLEALCREATISASKRSSDSLILTSQDFKIAKSVVGPSINRGITVEIPKVTWDDVGGLKDLKKKLQQAVEWPIKHSAAFVKMGISPMRGILLHGPPGCSKTTLAKAAANAAQASFFSLSCAELFSMYVGEGEALLRNTFQRARLASPSIIFFDEADVVACKRGDESSSNSSTVGERLLSTLLTEMDGLEEAKGILVLAATNRPYAIDAALMRPGRFDLVLYVPPPDLEARFEILQVHTRNMTLGDDVDLRKIAEETDLFTGAELEGLCRESGTVSLRENIAATAVFNRHFQTAKSSLKPALTIEEVETYSSFRKAAKRSDSKPIPINKKKATSTVFGFSWQLGVLSLLLLATGNYYFNHTKHELLVASAT

SEQ ID NO: 3797 - DNA, 1208 bp, Arabidopsis thaliana
  misc_feature (1)..(1208): Ceres Seq. ID no. 12422009
aaaaatcgaatcaagcatcttcttctttcacgtacgaaacaaaaagctcagagcagagtcgaatcgcgatgaagcatcgagttcggtgttcatgaaggtcagagagttaagtattagcagaactggttaggtcttagtgacaaacaaggtattcatgttatccatccctgatactagaatgtggaatctagcatcgagttatcttacgggaaacattggaccgaaaaacgatatcagaagaccggtccatgctcatgcggagtgttcagatgacgatgtatcttctgtaggtagtaaagacgaaggtctcgagtgtcctatatgctgggaatcatttaatatagttgaaaacgttccgtatgtgttatggtgtggacatacgatgtgtaaaaactgcattttgggacttcaatgggctattgtgaaattgcctactcacccggttcagcttcctctcttcatttcatgcccctggtgcaaccttttgtctttccgtctggtcttcagaggaacactcagattccctcacaagaactactttgtgctttggatggtcgagaggatgaatggagagagacgtaactcacctggtggagctcaaacagatggaaacaatgatcatacaagggaaactccatctccatgtctccacaatcgccatcatcgcagtcaacctgaaccatcacgttctgttaatgatcatcgcattccaagggacaacatacaaacttcactgaggaagtctctggttttctttgtccagttgacagcaaagttcccattagttgtcatatttctgctgataatactctatgcaataccgaccagtgcagccatattggcgatgtacattctagtcactctcttgctggctctaccgtcgtttctcatcctctacttcgcttatccttgtctcgactggcttgttcgagagattgtcacatgaactttctaaggatgcgttcagaaacttcccattcctaatttgacgacttttcttcaacaactgagacccaagatcggtcagtccttcatgtaagtataacaatttcataattaccgtcttctttatctatatatggatgtagttttggattgcattgttgctctacgaagctggacgtatgtgttgtaagggctcttgcagaaacttattagtatttgtggatttgtttgtgagtgtttgagtgtctcaataagatttatgt

SEQ ID NO: 3798 - protein, 263 aa, Arabidopsis thaliana
  peptide (1)..(263): Ceres Seq. ID no. 12422010
  misc_feature (54)..(108): Pfam Name: RING finger Pfam Description: Zinc finger, C3HC4 type
  misc_feature (1)..(263): NCBI GI NO: 15228658 NR Description: unknown protein; protein id: At3g29270.1
  misc_feature (9)..(263): NCBI GI NO: 11994767 NR Description: RING zinc finger protein-like
  misc_feature (9)..(263): NCBI GI NO: 18409246 NR Description: expressed protein; protein id: At1g69330
  misc_feature (9)..(263): NCBI GI NO: 21594048 NR Description: unknown [Arabidopsis thaliana]
  misc_feature (9)..(263): NCBI GI NO: 15221223 NR Description: putative RING zinc finger protein
  misc_feature (9)..(263): NCBI GI NO: 21592563 NR Description: putative RING zinc finger protein
MLSIPDTRMWNLASSYLTGNIGPKNDIRRPVHAHAECSDDDVSSVGSKDEGLECPICWESFNIVENVPYVLWCGHTMCKNCILGLQWAIVKLPTHPVQLPLFISCPWCNLLSFRLVFRGTLRFPHKNYFVLWMVERMNGERRNSPGGAQTDGNNDHTRETPSPCLHNRHHRSQPEPSRSVNDHRIPRDNIQTSLRKSLVFFVQLTAKFPLVVIFLLIILYAIPTSAAILAMYILVTLLLALPSFLILYFAYPCLDWLVREIVT

SEQ ID NO: 3799 - protein, 255 aa, Arabidopsis thaliana
  peptide (1)..(255): Ceres Seq. ID no. 12422011
  misc_feature (46)..(100): Pfam Name: RING finger Pfam Description: Zinc finger, C3HC4 type
  misc_feature (1)..(255): NCBI GI NO: 15228658 NR Description: unknown protein; protein id: At3g29270.1
  misc_feature (1)..(255): NCBI GI NO: 11994767 NR Description: RING zinc finger protein-like
  misc_feature (1)..(255): NCBI GI NO: 18409246 NR Description: expressed protein; protein id: At1g69330
  misc_feature (1)..(255): NCBI GI NO: 21594048 NR Description: unknown [Arabidopsis thaliana]
  misc_feature (1)..(255): NCBI GI NO: 15221223 NR Description: putative RING zinc finger protein
  misc_feature (1)..(255): NCBI GI NO: 21592563 NR Description: putative RING zinc finger protein
MWNLASSYLTGNIGPKNDIRRPVHAHAECSDDDVSSVGSKDEGLECPICWESFNIVENVPYVLWCGHTMCKNCILGLQWAIVKLPTHPVQLPLFISCPWCNLLSFRLVFRGTLRFPHKNYFVLWMVERMNGERRNSPGGAQTDGNNDHTRETPSPCLHNRHHRSQPEPSRSVNDHRIPRDNIQTSLRKSLVFFVQLTAKFPLVVIFLLIILYAIPTSAAILAMYILVTLLLALPSFLILYFAYPCLDWLVREIVT

SEQ ID NO: 3800 - protein, 187 aa, Arabidopsis thaliana
  peptide (1)..(187): Ceres Seq. ID no. 12422012
  misc_feature (1)..(187): NCBI GI NO: 15228658 NR Description: unknown protein; protein id: At3g29270.1
  misc_feature (1)..(187): NCBI GI NO: 11994767 NR Description: RING zinc finger protein-like
  misc_feature (1)..(187): NCBI GI NO: 18409246 NR Description: expressed protein; protein id: At1g69330
  misc_feature (1)..(187): NCBI GI NO: 21594048 NR Description: unknown [Arabidopsis thaliana]
  misc_feature (1)..(187): NCBI GI NO: 15221223 NR Description: putative RING zinc finger protein
  misc_feature (1)..(187): NCBI GI NO: 21592563 NR Description: putative RING zinc finger protein
MCKNCILGLQWAIVKLPTHPVQLPLFISCPWCNLLSFRLVFRGTLRFPHKNYFVLWMVERMNGERRNSPGGAQTDGNNDHTRETPSPCLHNRHHRSQPEPSRSVNDHRIPRDNIQTSLRKSLVFFVQLTAKFPLVVIFLLIILYAIPTSAAILAMYILVTLLLALPSFLILYFAYPCLDWLVREIVT

SEQ ID NO: 3801 - DNA, 1563 bp, Arabidopsis thaliana
  misc_feature (1)..(1563): Ceres Seq. ID no. 12329827
aatcatcatccaaaaacattcttctcacaagaatcagattcaagatagaagtttttcaaacaatgtctagtcctcttggtcactttcagattcttgtttttcttcatgctttgcttatcttctcagctgagtcccgcaaaacccaattgctgaacgataatgatgttgaatctagcgacaagagtgcaaaaggcacacgatgggctgttttagttgctggatcaaatgaatattataactacaggcatcaggctgacatatgccacgcgtatcagatactccgaaaaggcggtttaaaagatgaaaacatcattgtgtttatgtatgatgatatcgcgttttcctcggagaatcctaggcctggagttatcattaataaaccagatggagaagatgtttataaaggagttcctaaggactacactaaagaagctgttaatgttcaaaacttctacaatgtgttacttggaaatgaaagtggcgtcacaggaggaaatggcaaagttgtgaaaagtggtcctaatgataatatcttcatctattatgctgaccatggagctcctggcttaatagcgatgcccactggtgatgaagttatggcaaaagatttcaatgaagtcttggagaagatgcataagagaaaaaaatacaacaagatggtgatctatgttgaagcatgtgaatcaggaagtatgtttgaagggattttaaagaaaaatctcaacatatacgcagtgactgctgctaattctaaagagagcagctggggagtttactgtcctgagtcatatcctcctcctccttctgagattggaacttgtctcggcgatacatttagcatctcttggcttgaggacagtgaccttcatgacatgagcaaagagactttggagcaacaataccacgttgtaaagagaagagtaggatctgatgtaccagagacttctcatgtatgccgtttcggaacagagaagatgcttaaagattatctttcctcttacattggaagaaatcctgaaaacgataacttcactttcacggaatccttttcctcaccaatctctaattctggcttggtcaatccgcgcgatattcctctgctatacctccagagaaagattcaaaaagctccaatgggatcacttgaaagcaaagaagctcagaagaaattgcttgacgaaaagaatcataggaaacaaatcgatcagagcattacagacattctgcggctttcagttaaacaaaccaatgtcttaaatctcttaacttccacaagaacaacaggacagcctcttgtagacgattgggattgcttcaagactctagttaatagcttcaagaatcactgcggtgcaacggtgcattacggattgaagtatacaggagcgcttgccaatatctgcaatatgggagtggatgtgaagcaaactgtttcagccattgaacaagcttgttcgatgtaatgatttgcaaaacaatgtgatattcgactttaaaaatatcaaagttaatttcaataaaactcgatgtagagatggttggttcatgatactacttttacat

SEQ ID NO: 3802 - protein, 486 aa, Arabidopsis thaliana
  peptide (1)..(486): Ceres Seq. ID no. 12329828
  misc_feature (31)..(382): Pfam Name: Pfam Description:  Peptidase C13 family
  misc_feature (21)..(486): NCBI GI NO: 15231080 NR Description: vacuolar processing enzyme/ asparaginyl endopeptidase
  misc_feature (21)..(486): NCBI GI NO: 21536495 NR Description: vacuolar processing enzyme/ asparaginyl endopeptidase
  misc_feature (56)..(484): NCBI GI NO: 27544006 NR Description: vacuolar processing enzyme-1a [Nicotiana tabacum]
  misc_feature (51)..(484): NCBI GI NO: 27544008 NR Description: vacuolar processing enzyme-1b [Nicotiana tabacum]
  misc_feature (57)..(484): NCBI GI NO: 4589396 NR Description: asparaginyl endopeptidase (VmPE-1) [Vigna mungo]
  misc_feature (58)..(485): NCBI GI NO: 1351411 NR Description: Vacuolar processing enzyme precursor
  misc_feature (57)..(484): NCBI GI NO: 1351408 NR Description: Vacuolar processing enzyme precursor (VPE)
  misc_feature (58)..(484): NCBI GI NO: 13183095 NR Description: asparaginyl endopeptidase [Vigna radiata]
  misc_feature (31)..(484): NCBI GI NO: 4589398 NR Description: asparaginyl endopeptidase (VmPE-1A) [Vigna mungo]
  misc_feature (59)..(484): NCBI GI NO: 27544010 NR Description: vacuolar processing enzyme-2 [Nicotiana tabacum]
SSSKNILLTRIRFKIEVFQTMSSPLGHFQILVFLHALLIFSAESRKTQLLNDNDVESSDKSAKGTRWAVLVAGSNEYYNYRHQADICHAYQILRKGGLKDENIIVFMYDDIAFSSENPRPGVIINKPDGEDVYKGVPKDYTKEAVNVQNFYNVLLGNESGVTGGNGKVVKSGPNDNIFIYYADHGAPGLIAMPTGDEVMAKDFNEVLEKMHKRKKYNKMVIYVEACESGSMFEGILKKNLNIYAVTAANSKESSWGVYCPESYPPPPSEIGTCLGDTFSISWLEDSDLHDMSKETLEQQYHVVKRRVGSDVPETSHVCRFGTEKMLKDYLSSYIGRNPENDNFTFTESFSSPISNSGLVNPRDIPLLYLQRKIQKAPMGSLESKEAQKKLLDEKNHRKQIDQSITDILRLSVKQTNVLNLLTSTRTTGQPLVDDWDCFKTLVNSFKNHCGATVHYGLKYTGALANICNMGVDVKQTVSAIEQACSM

SEQ ID NO: 3803 - protein, 466 aa, Arabidopsis thaliana
  peptide (1)..(466): Ceres Seq. ID no. 12329829
  misc_feature (11)..(362): Pfam Name: Pfam Description:  Peptidase C13 family
  misc_feature (1)..(466): NCBI GI NO: 15231080 NR Description: vacuolar processing enzyme/ asparaginyl endopeptidase
  misc_feature (1)..(466): NCBI GI NO: 21536495 NR Description: vacuolar processing enzyme/ asparaginyl endopeptidase
  misc_feature (36)..(464): NCBI GI NO: 27544006 NR Description: vacuolar processing enzyme-1a [Nicotiana tabacum]
  misc_feature (31)..(464): NCBI GI NO: 27544008 NR Description: vacuolar processing enzyme-1b [Nicotiana tabacum]
  misc_feature (37)..(464): NCBI GI NO: 4589396 NR Description: asparaginyl endopeptidase (VmPE-1) [Vigna mungo]
  misc_feature (38)..(465): NCBI GI NO: 1351411 NR Description: Vacuolar processing enzyme precursor
  misc_feature (37)..(464): NCBI GI NO: 1351408 NR Description: Vacuolar processing enzyme precursor (VPE)
  misc_feature (38)..(464): NCBI GI NO: 13183095 NR Description: asparaginyl endopeptidase [Vigna radiata]
  misc_feature (11)..(464): NCBI GI NO: 4589398 NR Description: asparaginyl endopeptidase (VmPE-1A) [Vigna mungo]
  misc_feature (39)..(464): NCBI GI NO: 27544010 NR Description: vacuolar processing enzyme-2 [Nicotiana tabacum]
MSSPLGHFQILVFLHALLIFSAESRKTQLLNDNDVESSDKSAKGTRWAVLVAGSNEYYNYRHQADICHAYQILRKGGLKDENIIVFMYDDIAFSSENPRPGVIINKPDGEDVYKGVPKDYTKEAVNVQNFYNVLLGNESGVTGGNGKVVKSGPNDNIFIYYADHGAPGLIAMPTGDEVMAKDFNEVLEKMHKRKKYNKMVIYVEACESGSMFEGILKKNLNIYAVTAANSKESSWGVYCPESYPPPPSEIGTCLGDTFSISWLEDSDLHDMSKETLEQQYHVVKRRVGSDVPETSHVCRFGTEKMLKDYLSSYIGRNPENDNFTFTESFSSPISNSGLVNPRDIPLLYLQRKIQKAPMGSLESKEAQKKLLDEKNHRKQIDQSITDILRLSVKQTNVLNLLTSTRTTGQPLVDDWDCFKTLVNSFKNHCGATVHYGLKYTGALANICNMGVDVKQTVSAIEQACSM

SEQ ID NO: 3804 - protein, 380 aa, Arabidopsis thaliana
  peptide (1)..(380): Ceres Seq. ID no. 12329830
  misc_feature (1)..(276): Pfam Name: Pfam Description:  Peptidase C13 family
  misc_feature (1)..(380): NCBI GI NO: 15231080 NR Description: vacuolar processing enzyme/ asparaginyl endopeptidase
  misc_feature (1)..(380): NCBI GI NO: 21536495 NR Description: vacuolar processing enzyme/ asparaginyl endopeptidase
  misc_feature (1)..(378): NCBI GI NO: 27544006 NR Description: vacuolar processing enzyme-1a [Nicotiana tabacum]
  misc_feature (1)..(378): NCBI GI NO: 27544008 NR Description: vacuolar processing enzyme-1b [Nicotiana tabacum]
  misc_feature (1)..(378): NCBI GI NO: 4589396 NR Description: asparaginyl endopeptidase (VmPE-1) [Vigna mungo]
  misc_feature (1)..(379): NCBI GI NO: 1351411 NR Description: Vacuolar processing enzyme precursor
  misc_feature (1)..(378): NCBI GI NO: 1351408 NR Description: Vacuolar processing enzyme precursor (VPE)
  misc_feature (1)..(378): NCBI GI NO: 13183095 NR Description: asparaginyl endopeptidase [Vigna radiata]
  misc_feature (1)..(378): NCBI GI NO: 4589398 NR Description: asparaginyl endopeptidase (VmPE-1A) [Vigna mungo]
  misc_feature (1)..(378): NCBI GI NO: 27544010 NR Description: vacuolar processing enzyme-2 [Nicotiana tabacum]
MYDDIAFSSENPRPGVIINKPDGEDVYKGVPKDYTKEAVNVQNFYNVLLGNESGVTGGNGKVVKSGPNDNIFIYYADHGAPGLIAMPTGDEVMAKDFNEVLEKMHKRKKYNKMVIYVEACESGSMFEGILKKNLNIYAVTAANSKESSWGVYCPESYPPPPSEIGTCLGDTFSISWLEDSDLHDMSKETLEQQYHVVKRRVGSDVPETSHVCRFGTEKMLKDYLSSYIGRNPENDNFTFTESFSSPISNSGLVNPRDIPLLYLQRKIQKAPMGSLESKEAQKKLLDEKNHRKQIDQSITDILRLSVKQTNVLNLLTSTRTTGQPLVDDWDCFKTLVNSFKNHCGATVHYGLKYTGALANICNMGVDVKQTVSAIEQACSM

SEQ ID NO: 3805 - DNA, 1604 bp, Arabidopsis thaliana
  misc_feature (1)..(1604): Ceres Seq. ID no. 12330926
atctacgacagtcgtaccttttgctaggttatcgtcgtcatgatgcagcagccacctccagcttccaacggtgctgcaacagggccagggcagattccttccgaccaacaagcttacctccagcagcagcagtcgtggatgatgcagcaccagcagcaacaacaaggtcagccgcctgcaggatggaatcagcagtctgcaccgtcttctggtcaaccacagcagcagcagtatggtggtggtggatctcagaatccaggatcagctggtgagatccggtccctgtggatcggtgacttgcagccatggatggatgagaactatctcatgaacgtctttggtcttactggcgaggctacagcagctaaagttattcgcaataaacagaacggatattcagaaggttatggctttattgagtttgtgaaccatgctacagctgagaggaatttacagacttacaatggtgctccgatgccgagcagtgagcaggccttcaggttgaactgggctcagcttggagctggagagagacgccaggctgaagggcctgagcacacagtttttgttggagacttggcacctgatgttaccgaccacatgcttactgaaacgtttaaagctgtgtattcctctgtcaagggagctaaagttgtgaatgataggactactggacggtccaagggttatggatttgtcaggtttgcggatgaaagtgagcagattcgtgccatgactgaaatgaatggtcaatactgctcatcaaggcctatgcgtactggtcctgctgccaacaagaagcctcttacaatgcaaccagcttcatatcagaacactcaaggaaattcaggagaaagtgatccaactaacacaacaatttttgttggagctgtggatcaaagtgtaacagaagatgatttgaagtcagtttttggtcaatttggtgaactagttcatgtgaaaatacccgcaggaaaacgttgcggatttgttcaatacgccaatagggcatgtgctgagcaagcactttctgtgttgaacggaacacaacttgggggacaaagcattcgtctttcatggggtcgcagtccttccaacaaacagactcaacctgatcaagcccagtatggtggtggtggaggatactatgggtatcctcctcaaggatatgaagcatacggatatgcacctcctcctcaggaccctaacgcctactacggtggttatgctgggggcggctatggaaactaccagcagcctggtggataccagcagcaacagcagtgaagcatgatgtgtaagtcgtgatcgagctgaagttgtagaaagctgtaaccgtttgacaatggtgaatgaattattgaagtggatgtgtattagctcttcttgtctcagattctctcttcaactcttttttttttcttttggattatttttctttcgcgtggctattgttgagtgtccttgcaagtcataacaaaaagcttaaacacaagtgttttttttttttttttttgctgtaccatttcttcttgtatcacctatgacttccaattattcagtagtaccctcataatttttcaataatactcgttttgtgatcc

SEQ ID NO: 3806 - protein, 415 aa, Arabidopsis thaliana
  peptide (1)..(415): Ceres Seq. ID no. 12330927
  misc_feature (175)..(247): Pfam Name: a.k.a. RRM, RBD, or RNP domain Pfam Description: RNA recognition motif.
  misc_feature (1)..(415): NCBI GI NO: 7485342 NR Description: hypothetical protein F10M23
  misc_feature (1)..(415): NCBI GI NO: 18416906 NR Description: RNA binding protein 45
  misc_feature (7)..(406): NCBI GI NO: 9758270 NR Description: contains similarity to polyadenylate-binding protein5~gene_id:MBG8
  misc_feature (7)..(406): NCBI GI NO: 18423684 NR Description: RNA binding protein 45
  misc_feature (10)..(407): NCBI GI NO: 9663767 NR Description: RNA Binding Protein 45 [Nicotiana plumbaginifolia]
  misc_feature (1)..(415): NCBI GI NO: 34896988 NR Description: putative RNA binding protein [Oryza sativa]
  misc_feature (39)..(415): NCBI GI NO: 15221071 NR Description: RNA binding protein 45
  misc_feature (39)..(415): NCBI GI NO: 21592583 NR Description: putative DNA binding protein
  misc_feature (2)..(415): NCBI GI NO: 40253807 NR Description: putative RNA Binding Protein 45
  misc_feature (2)..(413): NCBI GI NO: 39545835 NR Description: OSJNBb0060E08.6
MMQQPPPASNGAATGPGQIPSDQQAYLQQQQSWMMQHQQQQQGQPPAGWNQQSAPSSGQPQQQQYGGGGSQNPGSAGEIRSLWIGDLQPWMDENYLMNVFGLTGEATAAKVIRNKQNGYSEGYGFIEFVNHATAERNLQTYNGAPMPSSEQAFRLNWAQLGAGERRQAEGPEHTVFVGDLAPDVTDHMLTETFKAVYSSVKGAKVVNDRTTGRSKGYGFVRFADESEQIRAMTEMNGQYCSSRPMRTGPAANKKPLTMQPASYQNTQGNSGESDPTNTTIFVGAVDQSVTEDDLKSVFGQFGELVHVKIPAGKRCGFVQYANRACAEQALSVLNGTQLGGQSIRLSWGRSPSNKQTQPDQAQYGGGGGYYGYPPQGYEAYGYAPPPQDPNAYYGGYAGGGYGNYQQPGGYQQQQQ

SEQ ID NO: 3807 - protein, 414 aa, Arabidopsis thaliana
  peptide (1)..(414): Ceres Seq. ID no. 12330928
  misc_feature (174)..(246): Pfam Name: a.k.a. RRM, RBD, or RNP domain Pfam Description: RNA recognition motif.
  misc_feature (1)..(414): NCBI GI NO: 7485342 NR Description: hypothetical protein F10M23
  misc_feature (1)..(414): NCBI GI NO: 18416906 NR Description: RNA binding protein 45
  misc_feature (6)..(405): NCBI GI NO: 9758270 NR Description: contains similarity to polyadenylate-binding protein5~gene_id:MBG8
  misc_feature (6)..(405): NCBI GI NO: 18423684 NR Description: RNA binding protein 45
  misc_feature (9)..(406): NCBI GI NO: 9663767 NR Description: RNA Binding Protein 45 [Nicotiana plumbaginifolia]
  misc_feature (1)..(414): NCBI GI NO: 34896988 NR Description: putative RNA binding protein [Oryza sativa]
  misc_feature (38)..(414): NCBI GI NO: 15221071 NR Description: RNA binding protein 45
  misc_feature (38)..(414): NCBI GI NO: 21592583 NR Description: putative DNA binding protein
  misc_feature (1)..(414): NCBI GI NO: 40253807 NR Description: putative RNA Binding Protein 45
  misc_feature (1)..(412): NCBI GI NO: 39545835 NR Description: OSJNBb0060E08.6
MQQPPPASNGAATGPGQIPSDQQAYLQQQQSWMMQHQQQQQGQPPAGWNQQSAPSSGQPQQQQYGGGGSQNPGSAGEIRSLWIGDLQPWMDENYLMNVFGLTGEATAAKVIRNKQNGYSEGYGFIEFVNHATAERNLQTYNGAPMPSSEQAFRLNWAQLGAGERRQAEGPEHTVFVGDLAPDVTDHMLTETFKAVYSSVKGAKVVNDRTTGRSKGYGFVRFADESEQIRAMTEMNGQYCSSRPMRTGPAANKKPLTMQPASYQNTQGNSGESDPTNTTIFVGAVDQSVTEDDLKSVFGQFGELVHVKIPAGKRCGFVQYANRACAEQALSVLNGTQLGGQSIRLSWGRSPSNKQTQPDQAQYGGGGGYYGYPPQGYEAYGYAPPPQDPNAYYGGYAGGGYGNYQQPGGYQQQQQ

SEQ ID NO: 3808 - protein, 382 aa, Arabidopsis thaliana
  peptide (1)..(382): Ceres Seq. ID no. 12330929
  misc_feature (142)..(214): Pfam Name: a.k.a. RRM, RBD, or RNP domain Pfam Description: RNA recognition motif.
  misc_feature (1)..(382): NCBI GI NO: 7485342 NR Description: hypothetical protein F10M23
  misc_feature (1)..(382): NCBI GI NO: 18416906 NR Description: RNA binding protein 45
  misc_feature (1)..(373): NCBI GI NO: 9758270 NR Description: contains similarity to polyadenylate-binding protein5~gene_id:MBG8
  misc_feature (1)..(373): NCBI GI NO: 18423684 NR Description: RNA binding protein 45
  misc_feature (1)..(374): NCBI GI NO: 9663767 NR Description: RNA Binding Protein 45 [Nicotiana plumbaginifolia]
  misc_feature (1)..(382): NCBI GI NO: 34896988 NR Description: putative RNA binding protein [Oryza sativa]
  misc_feature (6)..(382): NCBI GI NO: 15221071 NR Description: RNA binding protein 45
  misc_feature (6)..(382): NCBI GI NO: 21592583 NR Description: putative DNA binding protein
  misc_feature (1)..(382): NCBI GI NO: 40253807 NR Description: putative RNA Binding Protein 45
  misc_feature (1)..(380): NCBI GI NO: 39545835 NR Description: OSJNBb0060E08.6
MMQHQQQQQGQPPAGWNQQSAPSSGQPQQQQYGGGGSQNPGSAGEIRSLWIGDLQPWMDENYLMNVFGLTGEATAAKVIRNKQNGYSEGYGFIEFVNHATAERNLQTYNGAPMPSSEQAFRLNWAQLGAGERRQAEGPEHTVFVGDLAPDVTDHMLTETFKAVYSSVKGAKVVNDRTTGRSKGYGFVRFADESEQIRAMTEMNGQYCSSRPMRTGPAANKKPLTMQPASYQNTQGNSGESDPTNTTIFVGAVDQSVTEDDLKSVFGQFGELVHVKIPAGKRCGFVQYANRACAEQALSVLNGTQLGGQSIRLSWGRSPSNKQTQPDQAQYGGGGGYYGYPPQGYEAYGYAPPPQDPNAYYGGYAGGGYGNYQQPGGYQQQQQ

SEQ ID NO: 3809 - DNA, 2010 bp, Arabidopsis thaliana
  misc_feature (1)..(2010): Ceres Seq. ID no. 12329837
atccgccattacagacgaagaagaatttcaactgcaatctctctctgaaccatgagaggtcacgatcggattaacaattgtttgccggaggaacttatcctcgagatattccggcgacttgaatcgaaaccgaatcgcgacgcatgctccctcgtctgcaagcgatggttatctctcgagcgatttagccgcaccacgcttcgtatcggcgcttcgttttctcccgacgacttcatctccctcctatctcgtcgctttctctatattacctctatccatgtcgacgaacgtatctccgtctcccttccttccctctctccttccccaaaaagaaaacgtgggagggacagttcgtcgccatcgtcgagtaagcggaagaaattgactgataagacacattctggagctgagaacgtcgagtcttccagcttgactgatacgggcttgactgctctagcgaatggatttccaagaatagaaaacttgagcttgatatggtgccctaacgtttcaagtgtgggtttgtgttcccttgctcagaaatgcacttcacttaaatctcttgatttacagggttgctatgttggagatcaaggcttagcagctgttggaaagttttgtaagcaacttgaagaactaaatttgcgcttttgcgaaggcttaactgatgttggagttattgatcttgttgttggttgttccaagtctttaaagtctatcggtgttgctgcgtcagcaaaaataacagatttatctctggaagcagttggttctcactgtaaattactagaagttttgtatttggattctgaatacatccatgataaaggattgatagcggtggctcagggatgccaccgtttgaaaaatctgaagcttcaatgtgttagtgtgacggatgtggcttttgctgcagtgggagagttgtgtacttcgttggagcgattggcattgtatagctttcagcattttactgacaagggcatgcgagccatcggtaaagggtctaagaagttgaaagatcttactttaagtgattgttactttgtgagttgcaaaggtttagaagctattgctcatggttgtaaggaacttgagcgtgtggaaattaacggatgccacaacattggtacacgtggaatagaggcaattggaaaatcttgcccgcgcctcaaagagttagctttgttgtattgccaaaggattggtaattcggctcttcaagaaattggaaaaggctgtaaatccctagaaatacttcacttagtagactgctctggcattggagacatcgctatgtgcagtattgctaaaggctgtcgcaacctcaagaaacttcatatccgcagatgctatgagataggaaacaaaggaattatatctattggaaagcattgcaaatcactaaccgagcttagtctccggttttgcgataaagttggaaataaagcattaatcgccattggaaaaggttgctccttacaacaactaaacgtaagtggttgtaatcaaatcagcgatgctggaataacagcaatcgccagaggctgtcctcaactcactcacctcgacattagtgttcttcagaacattggagacatgccgttggctgagcttggagaaggatgtccaatgctgaaagacttggtcttgtctcattgccaccatataacagacaatggtctgaaccatcttgtacagaagtgcaaacttctggagacttgtcacatggtttactgcccagggatcacttccgctggagtggctacagtcgtctcgagctgtccacacatcaaaaaggtgttgatagagaaatggaaagtgactgagaggacgacaaggagagctggatcggttatctcttatctatgcatggatctctagatcgtaatttcaaggtcagtttctaagatttatgtttatgttttcttaataaaagtaataacttatagtccaaacttatggtgagtcatggttgtttattgtatgtttatgtgaactggttgtacg

SEQ ID NO: 3810 - protein, 610 aa, Arabidopsis thaliana
  peptide (1)..(610): Ceres Seq. ID no. 12329838
  misc_feature (93)..(475): NCBI GI NO: 7485070 NR Description: hypothetical protein - Arabidopsis thaliana
  misc_feature (7)..(596): NCBI GI NO: 37531066 NR Description: putative leucine-rich repeats containing protein
  misc_feature (228)..(610): NCBI GI NO: 7485070 NR Description: hypothetical protein - Arabidopsis thaliana
  misc_feature (127)..(588): NCBI GI NO: 30679379 NR Description: F-box protein family (FBL3) [Arabidopsis thaliana]
  misc_feature (11)..(555): NCBI GI NO: 18400846 NR Description: F-box protein family, AtFBL6
  misc_feature (11)..(526): NCBI GI NO: 15239399 NR Description: leucine-rich repeats containing protein
  misc_feature (142)..(578): NCBI GI NO: 18421172 NR Description: F-box protein family; protein id: At5g27920.1
  misc_feature (126)..(584): NCBI GI NO: 18421172 NR Description: F-box protein family; protein id: At5g27920.1
  misc_feature (11)..(499): NCBI GI NO: 7488683 NR Description: hypothetical protein GRR1 - soybean
  misc_feature (127)..(583): NCBI GI NO: 30679379 NR Description: F-box protein family (FBL3) [Arabidopsis thaliana]
MRGHDRINNCLPEELILEIFRRLESKPNRDACSLVCKRWLSLERFSRTTLRIGASFSPDDFISLLSRRFLYITSIHVDERISVSLPSLSPSPKRKRGRDSSSPSSSKRKKLTDKTHSGAENVESSSLTDTGLTALANGFPRIENLSLIWCPNVSSVGLCSLAQKCTSLKSLDLQGCYVGDQGLAAVGKFCKQLEELNLRFCEGLTDVGVIDLVVGCSKSLKSIGVAASAKITDLSLEAVGSHCKLLEVLYLDSEYIHDKGLIAVAQGCHRLKNLKLQCVSVTDVAFAAVGELCTSLERLALYSFQHFTDKGMRAIGKGSKKLKDLTLSDCYFVSCKGLEAIAHGCKELERVEINGCHNIGTRGIEAIGKSCPRLKELALLYCQRIGNSALQEIGKGCKSLEILHLVDCSGIGDIAMCSIAKGCRNLKKLHIRRCYEIGNKGIISIGKHCKSLTELSLRFCDKVGNKALIAIGKGCSLQQLNVSGCNQISDAGITAIARGCPQLTHLDISVLQNIGDMPLAELGEGCPMLKDLVLSHCHHITDNGLNHLVQKCKLLETCHMVYCPGITSAGVATVVSSCPHIKKVLIEKWKVTERTTRRAGSVISYLCMDL

SEQ ID NO: 3811 - DNA, 1831 bp, Arabidopsis thaliana
  misc_feature (1)..(1831): Ceres Seq. ID no. 13489239
tgaggccattctcttttctcctctctctctctctcacacaacacaaacaactcttgagagagagaaacaaatctttcacttgacacttctctccaaatcctcatctcattcttcatcctaaacatttgctcattctcacgatgagccataaccaaaaccaacctcaccggccagtcccggtccatgtcacaaacgccgagccaaaccctaacccaaacaacctcccaaactttctattatccgtccgtctcaaatacgtaaaactcggttaccactacctaatctccaacgctctctacatcctcctccttcctctcctcgccgcaacaatcgctaacctctcttctttcaccatcaacgacctctctctcctctacaacacactccgtttccatttcctctccgccacactcgccaccgcactcttaatctctctctccaccgcttacttcaccacccgtccccgccgtgtcttcctcctcgacttctcgtgttacaaaccagacccttcactgatctgcactcgtgaaacattcatggacagatctcaacgtgtaggcatcttcacagaagacaacttagctttccaacaaaagatcctcgaaagatccggtctaggtcagaaaacttacttccctgaagctcttcttcgtgttcctcctaatccttgtatggaagaagcgagaaaagaggcagaaacagttatgttcggagctattgacgcggttcttgagaagaccggtgtgaaacctaaagatattggaatccttgtggtgaattgtagcttgtttaatccaacaccgtcactttctgctatgattgtgaataagtataagcttagaggcaacattttgagctataatcttggtggaatgggatgtagtgctggccttatctccattgatctcgctaaacagatgcttcaggtgcaaccaaactcatacgcactagtggtgagcacagagaacataaccctaaactggtacttaggcaacgaccgatcaatgcttctatctaactgtatcttccgtatgggcggagccgcggtacttctctcgaaccgctcctctgatcgcagccgttcaaaatatcagctcatccataccgtccgtacccacaaaggagctgatgacaacgcatttggctgtgtttaccaacgagaagacaacaacgcagaagaaaccggcaaaatcggagtgtccctctctaaaaacctaatggcgatagctggagaagctctcaagacaaacatcacaactctcggaccactagttctaccaatgtccgaacaacttctctttttcgcgactcttgtggcccgaaaagtcttcaaagtcaagaaaataaagccttacattcctgatttcaagctagctttcgagcatttctgtatccacgcgggaggtagagccgtgctcgacgagattgagaagaacttggatttatccgaatggcacatggagccatcgaggatgacgttgaaccggtttggtaacacttcgagtagctcactttggtatgagcttgcgtatagtgaagctaaaggaaggattaagagaggagataggacttggcagattgcttttggatcgggttttaagtgtaatagtgcagtttggaaagctttgagaacgattgatccaatggacgagaagactaatccatggattgatgagattgatgactttcctgttcaagttcctaggatcactcccattacatcgtcgtagtgttttaaattcttttggagaactaatttgttatgttttattaaatgtaataacttacgtgatttgatatttttttattatcttaatatatatgattgccg

SEQ ID NO: 3812 - protein, 529 aa, Arabidopsis thaliana [sequence omitted]

SEQ ID NO: 3813 - protein, 397 aa, Arabidopsis thaliana
  peptide (1)..(397): Ceres Seq. ID no. 13489241
  misc_feature (218)..(365): Pfam Name: Pfam Description:  Chalcone and stilbene synthases
  misc_feature (1)..(397): NCBI GI NO: 15239981 NR Description: beta-ketoacyl-CoA synthase, putative
  misc_feature (1)..(397): NCBI GI NO: 14334714 NR Description: putative beta-ketoacyl-CoA synthase
  misc_feature (1)..(397): NCBI GI NO: 15219676 NR Description: beta-ketoacyl-CoA synthase, putative
  misc_feature (1)..(397): NCBI GI NO: 18377979 NR Description: putative beta-ketoacyl-CoA synthase
  misc_feature (1)..(394): NCBI GI NO: 9714501 NR Description: putative fatty acid elongase [Zea mays]
  misc_feature (1)..(394): NCBI GI NO: 15225767 NR Description: beta-ketoacyl-CoA synthase, putative
  misc_feature (1)..(396): NCBI GI NO: 1045614 NR Description: beta-ketoacyl-CoA synthase
  misc_feature (1)..(388): NCBI GI NO: 11066477 NR Description: fatty acid elongase 1-like protein
  misc_feature (1)..(392): NCBI GI NO: 29417540 NR Description: beta-ketoacyl-CoA-synthase [Marchantia polymorpha]
  misc_feature (1)..(389): NCBI GI NO: 19908404 NR Description: putative fatty acid elongase [Tropaeolum majus]
MDRSQRVGIFTEDNLAFQQKILERSGLGQKTYFPEALLRVPPNPCMEEARKEAETVMFGAIDAVLEKTGVKPKDIGILVVNCSLFNPTPSLSAMIVNKYKLRGNILSYNLGGMGCSAGLISIDLAKQMLQVQPNSYALVVSTENITLNWYLGNDRSMLLSNCIFRMGGAAVLLSNRSSDRSRSKYQLIHTVRTHKGADDNAFGCVYQREDNNAEETGKIGVSLSKNLMAIAGEALKTNITTLGPLVLPMSEQLLFFATLVARKVFKVKKIKPYIPDFKLAFEHFCIHAGGRAVLDEIEKNLDLSEWHMEPSRMTLNRFGNTSSSSLWYELAYSEAKGRIKRGDRTWQIAFGSGFKCNSAVWKALRTIDPMDEKTNPWIDEIDDFPVQVPRITPITSS

SEQ ID NO: 3814 - protein, 352 aa, Arabidopsis thaliana
  peptide (1)..(352): Ceres Seq. ID no. 13489242
  misc_feature (173)..(320): Pfam Name: Pfam Description:  Chalcone and stilbene synthases
  misc_feature (1)..(352): NCBI GI NO: 15239981 NR Description: beta-ketoacyl-CoA synthase, putative
  misc_feature (1)..(352): NCBI GI NO: 14334714 NR Description: putative beta-ketoacyl-CoA synthase
  misc_feature (1)..(352): NCBI GI NO: 15219676 NR Description: beta-ketoacyl-CoA synthase, putative
  misc_feature (1)..(352): NCBI GI NO: 18377979 NR Description: putative beta-ketoacyl-CoA synthase
  misc_feature (1)..(349): NCBI GI NO: 9714501 NR Description: putative fatty acid elongase [Zea mays]
  misc_feature (1)..(349): NCBI GI NO: 15225767 NR Description: beta-ketoacyl-CoA synthase, putative
  misc_feature (1)..(351): NCBI GI NO: 1045614 NR Description: beta-ketoacyl-CoA synthase
  misc_feature (1)..(343): NCBI GI NO: 11066477 NR Description: fatty acid elongase 1-like protein
  misc_feature (1)..(347): NCBI GI NO: 29417540 NR Description: beta-ketoacyl-CoA-synthase [Marchantia polymorpha]
  misc_feature (1)..(344): NCBI GI NO: 19908404 NR Description: putative fatty acid elongase [Tropaeolum majus]
MEEARKEAETVMFGAIDAVLEKTGVKPKDIGILVVNCSLFNPTPSLSAMIVNKYKLRGNILSYNLGGMGCSAGLISIDLAKQMLQVQPNSYALVVSTENITLNWYLGNDRSMLLSNCIFRMGGAAVLLSNRSSDRSRSKYQLIHTVRTHKGADDNAFGCVYQREDNNAEETGKIGVSLSKNLMAIAGEALKTNITTLGPLVLPMSEQLLFFATLVARKVFKVKKIKPYIPDFKLAFEHFCIHAGGRAVLDEIEKNLDLSEWHMEPSRMTLNRFGNTSSSSLWYELAYSEAKGRIKRGDRTWQIAFGSGFKCNSAVWKALRTIDPMDEKTNPWIDEIDDFPVQVPRITPITSS

SEQ ID NO: 3815 - DNA, 1688 bp, Arabidopsis thaliana
  misc_feature (1)..(1688): Ceres Seq. ID no. 12395594
ataaacctaatttgccaacgaagttaaaccaaaaaaagaagatctcactctcaccgccttcatttcctcgatctccgtcttcctccttctccgtctgtcgcagagcatcgctcgaattagggtttctgctgagagaagatgagggaaattattagcattcatatcggacaagccgggatccaagtcggaaattcctgctgggagctttactgtctcgaacatggaatccagcccgacggaatgatgccgagtgatactacagttggtgttgcacacgatgcgttcaatactttctttagcgagactggagctgggaagcatgttcctagggctgtcttcgttgatctcgagcctaccgttatcgacgaagttcgtactggtacttaccgtcaacttttccatccagagcagctcatttctgggaaagaagatgctgctaacaacttcgctagaggacattacactgttggaaaggaaattgtggatctatgtcttgaccgtgtgaggaagcttgccgacaactgtactggcttacaagggtttttggtgttcaatgctgttggtggtggaactggttctggattgggttctctgttgctagagcgtttgtctgtagattacggaaagaagtctaagcttggttttaccatatacccttctcctcaggtttctactgctgttgtagagccttacaacagtgtgctttcaacgcattcccttcttgaacataccgatgtagctgtcctcttggataacgaagccatctatgacatttgccgcagatccctagatatcgagaggccaacctacacaaacttgaacaggttgatatcacagatcatttcatccttgacaacatctttgaggtttgatggtgccatcaacgtggatatcactgagttccagaccaatcttgtcccatatccccgtatccatttcatgctgtcatcttatgcaccagtcatctcagccgccaaggcttaccacgagcagctatcagtccctgagatcaccaatgccgtgtttgagccagcgagcatgatggcaaagtgtgacccaaggcacggaaagtacatggcatgttgtttgatgtaccgaggagatgttgttcccaaagatgttaatgctgccgttggcaccatcaagacaaagaggactgttcagtttgttgactggtgcccaactgggttcaaatgtggaatcaactaccaacctccaacagttgttccaggtggtgacctcgctaaggttcagagagctgtatgcatgatcagtaacaacacagcagttgcagaggtgttctcacggatcgaccacaagtttgatctcatgtatgcgaagagggcattcgtgcactggtacgttggtgaaggaatggaggaaggtgaattctctgaggcacgtgaagacttggccgcactggagaaagactacgaagaagttggtgctgaaggtggagacgatgaagaagatgaaggtgaagactattgacaccttttctcaagcaatgtgctaccaaaaagttttttcgtttatctgttttcattaatgattcttgttgattacatgtttgttttaatcctgtacaatattcgatcctccttcgtgtttcatctcggttagatacattttcattggtagagcgaccattggggaagatcccgagttcattatcaagcttttgttgt

SEQ ID NO: 3816 - protein, 450 aa, Arabidopsis thaliana
  peptide (1)..(450): Ceres Seq. ID no. 12395595
  misc_feature (49)..(246): Pfam Name: Pfam Description:  Tubulin/FtsZ family, GTPase domain
  misc_feature (1)..(450): NCBI GI NO: 15241168 NR Description: tubulin alpha-5 chain-like protein
  misc_feature (1)..(450): NCBI GI NO: 135399 NR Description: Tubulin alpha-1 chain
  misc_feature (1)..(450): NCBI GI NO: 6094431 NR Description: Tubulin alpha-3 chain (Alpha-3 tubulin)
  misc_feature (1)..(450): NCBI GI NO: 464846 NR Description: Tubulin alpha-6 chain (Alpha-6 tubulin)
  misc_feature (1)..(450): NCBI GI NO: 8928419 NR Description: Tubulin alpha-1 chain
  misc_feature (1)..(450): NCBI GI NO: 401161 NR Description: Tubulin alpha-5 chain (Alpha-5 tubulin)
  misc_feature (1)..(445): NCBI GI NO: 25396545 NR Description: alpha tubulin [Physcomitrella patens]
  misc_feature (1)..(450): NCBI GI NO: 15220329 NR Description: tubulin alpha-2/alpha-4 chain
  misc_feature (1)..(450): NCBI GI NO: 15233627 NR Description: tubulin alpha-6 chain
  misc_feature (1)..(449): NCBI GI NO: 7271241 NR Description: alpha-tubulin [Miscanthus sinensis]
MREIISIHIGQAGIQVGNSCWELYCLEHGIQPDGMMPSDTTVGVAHDAFNTFFSETGAGKHVPRAVFVDLEPTVIDEVRTGTYRQLFHPEQLISGKEDAANNFARGHYTVGKEIVDLCLDRVRKLADNCTGLQGFLVFNAVGGGTGSGLGSLLLERLSVDYGKKSKLGFTIYPSPQVSTAVVEPYNSVLSTHSLLEHTDVAVLLDNEAIYDICRRSLDIERPTYTNLNRLISQIISSLTTSLRFDGAINVDITEFQTNLVPYPRIHFMLSSYAPVISAAKAYHEQLSVPEITNAVFEPASMMAKCDPRHGKYMACCLMYRGDVVPKDVNAAVGTIKTKRTVQFVDWCPTGFKCGINYQPPTVVPGGDLAKVQRAVCMISNNTAVAEVFSRIDHKFDLMYAKRAFVHWYVGEGMEEGEFSEAREDLAALEKDYEEVGAEGGDDEEDEGEDY

SEQ ID NO: 3817 - protein, 416 aa, Arabidopsis thaliana
  peptide (1)..(416): Ceres Seq. ID no. 12395596
  misc_feature (15)..(212): Pfam Name: Pfam Description:  Tubulin/FtsZ family, GTPase domain
  misc_feature (1)..(416): NCBI GI NO: 15241168 NR Description: tubulin alpha-5 chain-like protein
  misc_feature (1)..(416): NCBI GI NO: 135399 NR Description: Tubulin alpha-1 chain
  misc_feature (1)..(416): NCBI GI NO: 6094431 NR Description: Tubulin alpha-3 chain (Alpha-3 tubulin)
  misc_feature (1)..(416): NCBI GI NO: 464846 NR Description: Tubulin alpha-6 chain (Alpha-6 tubulin)
  misc_feature (1)..(416): NCBI GI NO: 8928419 NR Description: Tubulin alpha-1 chain
  misc_feature (1)..(416): NCBI GI NO: 401161 NR Description: Tubulin alpha-5 chain (Alpha-5 tubulin)
  misc_feature (1)..(411): NCBI GI NO: 25396545 NR Description: alpha tubulin [Physcomitrella patens]
  misc_feature (1)..(416): NCBI GI NO: 15220329 NR Description: tubulin alpha-2/alpha-4 chain
  misc_feature (1)..(416): NCBI GI NO: 15233627 NR Description: tubulin alpha-6 chain
  misc_feature (1)..(415): NCBI GI NO: 7271241 NR Description: alpha-tubulin [Miscanthus sinensis]
MMPSDTTVGVAHDAFNTFFSETGAGKHVPRAVFVDLEPTVIDEVRTGTYRQLFHPEQLISGKEDAANNFARGHYTVGKEIVDLCLDRVRKLADNCTGLQGFLVFNAVGGGTGSGLGSLLLERLSVDYGKKSKLGFTIYPSPQVSTAVVEPYNSVLSTHSLLEHTDVAVLLDNEAIYDICRRSLDIERPTYTNLNRLISQIISSLTTSLRFDGAINVDITEFQTNLVPYPRIHFMLSSYAPVISAAKAYHEQLSVPEITNAVFEPASMMAKCDPRHGKYMACCLMYRGDVVPKDVNAAVGTIKTKRTVQFVDWCPTGFKCGINYQPPTVVPGGDLAKVQRAVCMISNNTAVAEVFSRIDHKFDLMYAKRAFVHWYVGEGMEEGEFSEAREDLAALEKDYEEVGAEGGDDEEDEGEDY

SEQ ID NO: 3818 - protein, 415 aa, Arabidopsis thaliana
  peptide (1)..(415): Ceres Seq. ID no. 12395597
  misc_feature (14)..(211): Pfam Name: Pfam Description:  Tubulin/FtsZ family, GTPase domain
  misc_feature (1)..(415): NCBI GI NO: 15241168 NR Description: tubulin alpha-5 chain-like protein
  misc_feature (1)..(415): NCBI GI NO: 135399 NR Description: Tubulin alpha-1 chain
  misc_feature (1)..(415): NCBI GI NO: 6094431 NR Description: Tubulin alpha-3 chain (Alpha-3 tubulin)
  misc_feature (1)..(415): NCBI GI NO: 464846 NR Description: Tubulin alpha-6 chain (Alpha-6 tubulin)
  misc_feature (1)..(415): NCBI GI NO: 8928419 NR Description: Tubulin alpha-1 chain
  misc_feature (1)..(415): NCBI GI NO: 401161 NR Description: Tubulin alpha-5 chain (Alpha-5 tubulin)
  misc_feature (1)..(410): NCBI GI NO: 25396545 NR Description: alpha tubulin [Physcomitrella patens]
  misc_feature (1)..(415): NCBI GI NO: 15220329 NR Description: tubulin alpha-2/alpha-4 chain
  misc_feature (1)..(415): NCBI GI NO: 15233627 NR Description: tubulin alpha-6 chain
  misc_feature (1)..(414): NCBI GI NO: 7271241 NR Description: alpha-tubulin [Miscanthus sinensis]
MPSDTTVGVAHDAFNTFFSETGAGKHVPRAVFVDLEPTVIDEVRTGTYRQLFHPEQLISGKEDAANNFARGHYTVGKEIVDLCLDRVRKLADNCTGLQGFLVFNAVGGGTGSGLGSLLLERLSVDYGKKSKLGFTIYPSPQVSTAVVEPYNSVLSTHSLLEHTDVAVLLDNEAIYDICRRSLDIERPTYTNLNRLISQIISSLTTSLRFDGAINVDITEFQTNLVPYPRIHFMLSSYAPVISAAKAYHEQLSVPEITNAVFEPASMMAKCDPRHGKYMACCLMYRGDVVPKDVNAAVGTIKTKRTVQFVDWCPTGFKCGINYQPPTVVPGGDLAKVQRAVCMISNNTAVAEVFSRIDHKFDLMYAKRAFVHWYVGEGMEEGEFSEAREDLAALEKDYEEVGAEGGDDEEDEGEDY

SEQ ID NO: 3819 - DNA, 1154 bp, Arabidopsis thaliana
  misc_feature (1)..(1154): Ceres Seq. ID no. 12327520
aatacctttgatatttgcctgcacgtccccaaacaagtagagaataataatcacatcaagattgattaaaaccctctcactaatcaccttcttaatcaccaccctctccggctctcaacagaacaacaacaaaaaaacagcttccgttgtcctgttccggcgaaatcggacggtcgagatcaatcatgcatcgtagagcagcaattcaagaatcggatgacgaagaagatgagacttacaacgacgtcgttcctgaatctccttcttcttgtgaagactcaaagatctcaaaaccaactccaaagaaaagtaggaggaacgtagagaagagagttgtctcagttccgatagctgacgtggaaggatctaagagcagaggcgaagtatatccaccgtccgattcatgggcctggagaaagtacggacaaaaaccgatcaaaggctcgccttatcccaggggatattacagatgtagtagctcaaaaggatgtccggcgaggaagcaggtggagagaagccgtgtggacccttctaagcttatgattacttacgcctgcgaccacaatcaccctttcccttcctcctccgctaacaccaaatcccaccaccgctcctccgtcgtcctcaaaaccgcaaagaaagaggaagaatacgaagaggaggaagaagaactaaccgtcaccgccgcagaggaaccaccggcgggacttgatctaagccacgtagactcaccgttgctattaggcggctgctacagcgaaatcggagagttcgggtggttctacgacgcgtcgatctcatcatcatctggttcttcgaatttcctcgacgtaactctagagagaggtttttcagtaggccaagaggaagatgagtctttgttcggtgatctcggtgatttacctgattgcgcctccgtgttccgccgtgggactgttgcgacggaggagcaacatcgaagatgtgattttggcgccattcctttctgtgatagttctagatgagtttgtgtgtgtagccaaaaccaaaagaaaaaaacacaatttttttattttccactgtaaaggtgtatcaatggtggattcatttttttaaaaaaggaaacccaaataataaatttaatatcatttgagagaattcaagtacaattaaag

SEQ ID NO: 3820 - protein, 272 aa, Arabidopsis thaliana
  peptide (1)..(272): Ceres Seq. ID no. 12327521
  misc_feature (70)..(130): Pfam Name: Pfam Description:  WRKY DNA -binding domain
  misc_feature (1)..(272): NCBI GI NO: 30694863 NR Description: WRKY family transcription factor
  misc_feature (1)..(272): NCBI GI NO: 22331854 NR Description: WRKY family transcription factor
  misc_feature (92)..(272): NCBI GI NO: 11357269 NR Description: DNA-binding WRKY-like protein
  misc_feature (1)..(92): NCBI GI NO: 11357269 NR Description: DNA-binding WRKY-like protein
  misc_feature (14)..(251): NCBI GI NO: 22329838 NR Description: WRKY family transcription factor
  misc_feature (1)..(172): NCBI GI NO: 34909540 NR Description: P0481E12.40
  misc_feature (22)..(219): NCBI GI NO: 34910854 NR Description: P0435H01.23
  misc_feature (225)..(248): NCBI GI NO: 34910854 NR Description: P0435H01.23
  misc_feature (41)..(141): NCBI GI NO: 38567968 NR Description: OSJNBa0093F12.9
  misc_feature (27)..(145): NCBI GI NO: 15226838 NR Description: WRKY family transcription factor
MHRRAAIQESDDEEDETYNDVVPESPSSCEDSKISKPTPKKSRRNVEKRVVSVPIADVEGSKSRGEVYPPSDSWAWRKYGQKPIKGSPYPRGYYRCSSSKGCPARKQVERSRVDPSKLMITYACDHNHPFPSSSANTKSHHRSSVVLKTAKKEEEYEEEEEELTVTAAEEPPAGLDLSHVDSPLLLGGCYSEIGEFGWFYDASISSSSGSSNFLDVTLERGFSVGQEEDESLFGDLGDLPDCASVFRRGTVATEEQHRRCDFGAIPFCDSSR

SEQ ID NO: 3821 - protein, 154 aa, Arabidopsis thaliana
  peptide (1)..(154): Ceres Seq. ID no. 12327522
  misc_feature (1)..(154): NCBI GI NO: 30694863 NR Description: WRKY family transcription factor
  misc_feature (1)..(154): NCBI GI NO: 22331854 NR Description: WRKY family transcription factor
  misc_feature (1)..(154): NCBI GI NO: 11357269 NR Description: DNA-binding WRKY-like protein
  misc_feature (1)..(133): NCBI GI NO: 22329838 NR Description: WRKY family transcription factor
  misc_feature (1)..(54): NCBI GI NO: 34909540 NR Description: P0481E12.40
  misc_feature (1)..(101): NCBI GI NO: 34910854 NR Description: P0435H01.23
  misc_feature (107)..(130): NCBI GI NO: 34910854 NR Description: P0435H01.23
  misc_feature (1)..(23): NCBI GI NO: 38567968 NR Description: OSJNBa0093F12.9
  misc_feature (1)..(27): NCBI GI NO: 15226838 NR Description: WRKY family transcription factor
  misc_feature (1)..(45): NCBI GI NO: 29126352 NR Description: putative DNA -binding protein
MITYACDHNHPFPSSSANTKSHHRSSVVLKTAKKEEEYEEEEEELTVTAAEEPPAGLDLSHVDSPLLLGGCYSEIGEFGWFYDASISSSSGSSNFLDVTLERGFSVGQEEDESLFGDLGDLPDCASVFRRGTVATEEQHRRCDFGAIPFCDSSR

SEQ ID NO: 3822 - DNA, 1448 bp, Arabidopsis thaliana
  misc_feature (1)..(1448): Ceres Seq. ID no. 12559926
agagacacaaaaagggttttgagtattgaccttcttctctcggccgctcgctgaggtttatcaagtgagagccttttctttcggagttttcaacgcaattcttcagagaagcagaagagatgttgtacattatagggttaggtttaggagatgaaaaagatataaccttgagaggactcgaggctgttaagaaatcacagaaagtatacatggaagcttacacttctcttttgtcctttggtctctctgctgatggactttccaatcttgaaaagttctatgggaaaccaattatacttgctgatagagaaatggtggaagaaaaggctggtgatatgattgatgaagccattgataatgatgtcgcttttctcgttgttggtgatcctttcggagctacaacgcatagtgatcttgttgttcgagctaagacactcggtgtaaaagtagaggtagtgcacaatgcatcggtgatgaatgctgttgggatttgtggattgcagctttaccattatggagagactgtttcgatcccattctttaccgagacttggagacctgatagtttttatgagaagatcaagaagaaccgctctcttggacttcacactctctgtttgctagatatccgagtgaaggagcctacttttgaatctctatgcagaggagggaagaaacagtatgaaccgccgaggtatatgagtgttaatacagcaatcgagcagcttctggaagttgagcaaaagcatggagattctgtttatggtgaagacacacagtgtgtgggctttgcccggcttggctctgaggaccagacgatagttgcagggacgatgaagcaactcgaaagcgttgattttggagcaccgttgcattgtcttgtgatagtaggcgagactcatcccgtggaagaagagatgttagagttttacaaatacaaaagtggaaactaaaagaccacaaaactaaagaagactcttcttatcattactcgcaaagcttcaaggcagagcaggaggaggaagagattgaaactaggaactgataggtgaaatactcttcttcatctctattgactttcgaggttttggtagtgaattttgtataagcatagttatggtgtgacttcgaattggaaaggtggatattgaaatattcatttggctatagattgaggtggattttgtatcaaagctttgtttcagagataattttattttggcttggtttggtttggtttgaggatttgaaaccaaactagaggtcgtttcggtttgtttttgttcggtctggttcttgagggttgattacccttcaaaagatcattgtttagtttatgattgtctccttaaaccaccacacgtccaaagattgtattttattattgcccctaagttagaactgagaaaactttgtaacgttcaaatataatgatgtttatagaaatg

SEQ ID NO: 3823 - protein, 277 aa, Arabidopsis thaliana
  peptide (1)..(277): Ceres Seq. ID no. 12559927
  misc_feature (1)..(214): Pfam Name: Corrin/Porphyrin Pfam Description: Tetrapyrrole
  misc_feature (1)..(277): NCBI GI NO: 15236075 NR Description: methyltransferase - like protein
  misc_feature (1)..(274): NCBI GI NO: 28829458 NR Description: similar to Arabidopsis thaliana (Mouse-ear cress)
  misc_feature (1)..(271): NCBI GI NO: 40254183 NR Description: RIKEN cDNA 2410012M04 [Mus musculus]
  misc_feature (1)..(271): NCBI GI NO: 12845949 NR Description: unnamed protein product [Mus musculus]
  misc_feature (87)..(271): NCBI GI NO: 34859873 NR Description: similar to RIKEN cDNA 2410012M04
  misc_feature (1)..(92): NCBI GI NO: 34859873 NR Description: similar to RIKEN cDNA 2410012M04
  misc_feature (1)..(271): NCBI GI NO: 7706272 NR Description: CGI-30 protein [Homo sapiens]
  misc_feature (1)..(270): NCBI GI NO: 6323201 NR Description: diphthamide biosynthesis; Dph5p
  misc_feature (1)..(277): NCBI GI NO: 19075941 NR Description: putative diphthine synthase
  misc_feature (1)..(271): NCBI GI NO: 28572120 NR Description: Diphthamide methyltransferase CG31289-PA
MLYIIGLGLGDEKDITLRGLEAVKKSQKVYMEAYTSLLSFGLSADGLSNLEKFYGKPIILADREMVEEKAGDMIDEAIDNDVAFLVVGDPFGATTHSDLVVRAKTLGVKVEVVHNASVMNAVGICGLQLYHYGETVSIPFFTETWRPDSFYEKIKKNRSLGLHTLCLLDIRVKEPTFESLCRGGKKQYEPPRYMSVNTAIEQLLEVEQKHGDSVYGEDTQCVGFARLGSEDQTIVAGTMKQLESVDFGAPLHCLVIVGETHPVEEEMLEFYKYKSGN

SEQ ID NO: 3824 - protein, 247 aa, Arabidopsis thaliana
  peptide (1)..(247): Ceres Seq. ID no. 12559928
  misc_feature (1)..(184): Pfam Name: Corrin/Porphyrin Pfam Description: Tetrapyrrole
  misc_feature (1)..(247): NCBI GI NO: 15236075 NR Description: methyltransferase - like protein
  misc_feature (1)..(244): NCBI GI NO: 28829458 NR Description: similar to Arabidopsis thaliana (Mouse-ear cress)
  misc_feature (1)..(241): NCBI GI NO: 40254183 NR Description: RIKEN cDNA 2410012M04 [Mus musculus]
  misc_feature (1)..(241): NCBI GI NO: 12845949 NR Description: unnamed protein product [Mus musculus]
  misc_feature (57)..(241): NCBI GI NO: 34859873 NR Description: similar to RIKEN cDNA 2410012M04
  misc_feature (1)..(62): NCBI GI NO: 34859873 NR Description: similar to RIKEN cDNA 2410012M04
  misc_feature (1)..(241): NCBI GI NO: 7706272 NR Description: CGI-30 protein [Homo sapiens]
  misc_feature (1)..(240): NCBI GI NO: 6323201 NR Description: diphthamide biosynthesis; Dph5p
  misc_feature (1)..(247): NCBI GI NO: 19075941 NR Description: putative diphthine synthase
  misc_feature (1)..(241): NCBI GI NO: 28572120 NR Description: Diphthamide methyltransferase CG31289-PA
MEAYTSLLSFGLSADGLSNLEKFYGKPIILADREMVEEKAGDMIDEAIDNDVAFLVVGDPFGATTHSDLVVRAKTLGVKVEVVHNASVMNAVGICGLQLYHYGETVSIPFFTETWRPDSFYEKIKKNRSLGLHTLCLLDIRVKEPTFESLCRGGKKQYEPPRYMSVNTAIEQLLEVEQKHGDSVYGEDTQCVGFARLGSEDQTIVAGTMKQLESVDFGAPLHCLVIVGETHPVEEEMLEFYKYKSGN

SEQ ID NO: 3825 - protein, 213 aa, Arabidopsis thaliana
  peptide (1)..(213): Ceres Seq. ID no. 12559929
  misc_feature (1)..(150): Pfam Name: Corrin/Porphyrin Pfam Description: Tetrapyrrole
  misc_feature (1)..(213): NCBI GI NO: 15236075 NR Description: methyltransferase - like protein
  misc_feature (1)..(210): NCBI GI NO: 28829458 NR Description: similar to Arabidopsis thaliana (Mouse-ear cress)
  misc_feature (1)..(207): NCBI GI NO: 40254183 NR Description: RIKEN cDNA 2410012M04 [Mus musculus]
  misc_feature (1)..(207): NCBI GI NO: 12845949 NR Description: unnamed protein product [Mus musculus]
  misc_feature (23)..(207): NCBI GI NO: 34859873 NR Description: similar to RIKEN cDNA 2410012M04
  misc_feature (1)..(28): NCBI GI NO: 34859873 NR Description: similar to RIKEN cDNA 2410012M04
  misc_feature (1)..(207): NCBI GI NO: 7706272 NR Description: CGI-30 protein [Homo sapiens]
  misc_feature (1)..(206): NCBI GI NO: 6323201 NR Description: diphthamide biosynthesis; Dph5p
  misc_feature (1)..(213): NCBI GI NO: 19075941 NR Description: putative diphthine synthase
  misc_feature (1)..(207): NCBI GI NO: 28572120 NR Description: Diphthamide methyltransferase CG31289-PA
MVEEKAGDMIDEAIDNDVAFLVVGDPFGATTHSDLVVRAKTLGVKVEVVHNASVMNAVGICGLQLYHYGETVSIPFFTETWRPDSFYEKIKKNRSLGLHTLCLLDIRVKEPTFESLCRGGKKQYEPPRYMSVNTAIEQLLEVEQKHGDSVYGEDTQCVGFARLGSEDQTIVAGTMKQLESVDFGAPLHCLVIVGETHPVEEEMLEFYKYKSGN

SEQ ID NO: 3826 - DNA, 2014 bp, Arabidopsis thaliana
  misc_feature (1)..(2014): Ceres Seq. ID no. 13497225
accataggtcaccaaagactttataaataacccatacattatcatatacatataggcatacaaagtgagagaactctactctagattgtgctaaactcaatttgtattaatgatggatagattttggtcatggagattgtttgttgctctctctctttttctccattctccaatttgttcttctgacaaagctccgaactactccttcatgcgggacgcgacaggaagtcctacaacgtcgtactacgactatatcatcatcggtggtgggactgccgggtgccctctagccgcaacgctgtctcaaaacgccagcgttttgctgctcgaacgcggtgactcaccgtacaataaccccaacatcacgaggctctcggctttcggagccgctctctctgacctgtctgagtcctcaccatctcagcgttttgtatcagaagatggtgtcattaatgcacgtgctcgggttctcggtggcggaagcgctctcaacgccggcttctatacacgtgcgggcactaaatacgttaggaacatgggttgggacggagcgctagcgaacgagtcgtaccagtgggttgaagctaaggtggcgtttcagcctccgatggggcggtggcaaacggccgtgagagacggcttattggaggctgggattgtccctaataatggtttcacctatgatcatatcaatggcaccaaatttggcggtactatttttgaccgcaacggcaatagacacaccgccgccgatttgttagagtatgccgatcctaagggtattaccgtccttttgcatgccaccgtccaccggatcttgtttcgtactcgaggtacgaccaagccaatagccaacggagttgtgtaccgagaccggaccggtcaggctcatagagcttacctaaaggaaggcgccttgagtgagatcatcctatcggccggaaccctagggagcccacaacttcttatgctaagtggtgttggcccatcggctcaattacaggcccaaaacatcacggtggtgatggaccagcctcatgtgggtcaaggcatgtatgacaaccctatgaatgccgtgttcgttccttctccagtccccgttgaggtctcactcattgaggttgttgggattaccggggaaggaacatatgtcgaagccgccggtggtgaaaattttggcggaggtggtggtggttctagtggatcgtcctccactagagactactatgcaatgttttcaccaagggcaacattattagagtcaaattcaatgaccaaattatcatcagcccaaccttttcaaggaggcttccttttagagaaagtaatgggcccattatcaacgggtcatttagagctcaagacccgaaacccaaaagataacccgattgtgactttcaactatttccaacatcctgacgacctaaaacgttgtgttcgaggaatccaaaccatagagagagtcgtgcaatctaaagctttttcgaggtataagtacgcagatgtgtcatttgagtatttacttaacctcacggcgagtactcctgtcaatctaaggccgcctcgcagtggtcctggagcctcgttgcctccatccgcagaggaattttgccaacatacagttacaaccatttggcattaccatggaggatgcgttgtgggcagagtggtcgatggggattataaagttattggtatcgaccagcttagagtcattgatatgtcgaccgttggttattgtcccgggacaaatcctcaagccacggttatgatgcttggcaggtatatgggtgtgaagatcttgagagagagactcaccaagaagtagggttttgaatcggatcaggggttttgggaaaacgttatattaaaaatgaaatgaatcaagatattactaatcgatgttattaatagctgaatatgtattgttcttggtaatttctgtttggtacttattattagaccaaactgagatgtatacggaaatatatgtatagactcattcccaattttc

SEQ ID NO: 3827 - protein, 572 aa, Arabidopsis thaliana
  peptide (1)..(572): Ceres Seq. ID no. 13497226
  misc_feature (46)..(312): Pfam Name: Pfam Description:  GMC oxidoreductase
  misc_feature (1)..(572): NCBI GI NO: 17978954 NR Description: At1g12570/T12C24_9 [Arabidopsis thaliana]
  misc_feature (1)..(572): NCBI GI NO: 22329512 NR Description: glucose-methanol-choline
  misc_feature (28)..(572): NCBI GI NO: 9502391 NR Description: T12C24.11 [Arabidopsis thaliana]
  misc_feature (34)..(572): NCBI GI NO: 8778640 NR Description: F5O11.31 [Arabidopsis thaliana]
  misc_feature (6)..(568): NCBI GI NO: 15242236 NR Description: glucose-methanol-choline
  misc_feature (12)..(571): NCBI GI NO: 11358959 NR Description: probable mandelonitrile lyase (EC 4.1.2.10)
  misc_feature (11)..(569): NCBI GI NO: 18410417 NR Description: glucose-methanol-choline
  misc_feature (6)..(558): NCBI GI NO: 10177730 NR Description: mandelonitrile lyase-like protein
  misc_feature (12)..(571): NCBI GI NO: 27452902 NR Description: Putative mandelonitrile lyase
  misc_feature (26)..(572): NCBI GI NO: 11357159 NR Description: adhesion of calyx edges protein ACE
MMDRFWSWRLFVALSLFLHSPICSSDKAPNYSFMRDATGSPTTSYYDYIIIGGGTAGCPLAATLSQNASVLLLERGDSPYNNPNITRLSAFGAALSDLSESSPSQRFVSEDGVINARARVLGGGSALNAGFYTRAGTKYVRNMGWDGALANESYQWVEAKVAFQPPMGRWQTAVRDGLLEAGIVPNNGFTYDHINGTKFGGTIFDRNGNRHTAADLLEYADPKGITVLLHATVHRILFRTRGTTKPIANGVVYRDRTGQAHRAYLKEGALSEIILSAGTLGSPQLLMLSGVGPSAQLQAQNITVVMDQPHVGQGMYDNPMNAVFVPSPVPVEVSLIEVVGITGEGTYVEAAGGENFGGGGGGSSGSSSTRDYYAMFSPRATLLESNSMTKLSSAQPFQGGFLLEKVMGPLSTGHLELKTRNPKDNPIVTFNYFQHPDDLKRCVRGIQTIERVVQSKAFSRYKYADVSFEYLLNLTASTPVNLRPPRSGPGASLPPSAEEFCQHTVTTIWHYHGGCVVGRVVDGDYKVIGIDQLRVIDMSTVGYCPGTNPQATVMMLGRYMGVKILRERLTKK

SEQ ID NO: 3828 - protein, 571 aa, Arabidopsis thaliana
  peptide (1)..(571): Ceres Seq. ID no. 13497227
  misc_feature (45)..(311): Pfam Name: Pfam Description:  GMC oxidoreductase
  misc_feature (1)..(571): NCBI GI NO: 17978954 NR Description: At1g12570/T12C24_9 [Arabidopsis thaliana]
  misc_feature (1)..(571): NCBI GI NO: 22329512 NR Description: glucose-methanol-choline
  misc_feature (27)..(571): NCBI GI NO: 9502391 NR Description: T12C24.11 [Arabidopsis thaliana]
  misc_feature (33)..(571): NCBI GI NO: 8778640 NR Description: F5O11.31 [Arabidopsis thaliana]
  misc_feature (5)..(567): NCBI GI NO: 15242236 NR Description: glucose-methanol-choline
  misc_feature (11)..(570): NCBI GI NO: 11358959 NR Description: probable mandelonitrile lyase (EC 4.1.2.10)
  misc_feature (10)..(568): NCBI GI NO: 18410417 NR Description: glucose-methanol-choline
  misc_feature (5)..(557): NCBI GI NO: 10177730 NR Description: mandelonitrile lyase-like protein
  misc_feature (11)..(570): NCBI GI NO: 27452902 NR Description: Putative mandelonitrile lyase
  misc_feature (25)..(571): NCBI GI NO: 11357159 NR Description: adhesion of calyx edges protein ACE
MDRFWSWRLFVALSLFLHSPICSSDKAPNYSFMRDATGSPTTSYYDYIIIGGGTAGCPLAATLSQNASVLLLERGDSPYNNPNITRLSAFGAALSDLSESSPSQRFVSEDGVINARARVLGGGSALNAGFYTRAGTKYVRNMGWDGALANESYQWVEAKVAFQPPMGRWQTAVRDGLLEAGIVPNNGFTYDHINGTKFGGTIFDRNGNRHTAADLLEYADPKGITVLLHATVHRILFRTRGTTKPIANGVVYRDRTGQAHRAYLKEGALSEIILSAGTLGSPQLLMLSGVGPSAQLQAQNITVVMDQPHVGQGMYDNPMNAVFVPSPVPVEVSLIEVVGITGEGTYVEAAGGENFGGGGGGSSGSSSTRDYYAMFSPRATLLESNSMTKLSSAQPFQGGFLLEKVMGPLSTGHLELKTRNPKDNPIVTFNYFQHPDDLKRCVRGIQTIERVVQSKAFSRYKYADVSFEYLLNLTASTPVNLRPPRSGPGASLPPSAEEFCQHTVTTIWHYHGGCVVGRVVDGDYKVIGIDQLRVIDMSTVGYCPGTNPQATVMMLGRYMGVKILRERLTKK

SEQ ID NO: 3829 - protein, 539 aa, Arabidopsis thaliana
  peptide (1)..(539): Ceres Seq. ID no. 13497228
  misc_feature (13)..(279): Pfam Name: Pfam Description:  GMC oxidoreductase
  misc_feature (1)..(539): NCBI GI NO: 17978954 NR Description: At1g12570/T12C24_9 [Arabidopsis thaliana]
  misc_feature (1)..(539): NCBI GI NO: 22329512 NR Description: glucose-methanol-choline
  misc_feature (1)..(539): NCBI GI NO: 9502391 NR Description: T12C24.11 [Arabidopsis thaliana]
  misc_feature (1)..(539): NCBI GI NO: 8778640 NR Description: F5O11.31 [Arabidopsis thaliana]
  misc_feature (1)..(535): NCBI GI NO: 15242236 NR Description: glucose-methanol-choline
  misc_feature (1)..(538): NCBI GI NO: 11358959 NR Description: probable mandelonitrile lyase (EC 4.1.2.10)
  misc_feature (1)..(536): NCBI GI NO: 18410417 NR Description: glucose-methanol-choline
  misc_feature (1)..(525): NCBI GI NO: 10177730 NR Description: mandelonitrile lyase-like protein
  misc_feature (1)..(538): NCBI GI NO: 27452902 NR Description: Putative mandelonitrile lyase
  misc_feature (1)..(539): NCBI GI NO: 11357159 NR Description: adhesion of calyx edges protein ACE
MRDATGSPTTSYYDYIIIGGGTAGCPLAATLSQNASVLLLERGDSPYNNPNITRLSAFGAALSDLSESSPSQRFVSEDGVINARARVLGGGSALNAGFYTRAGTKYVRNMGWDGALANESYQWVEAKVAFQPPMGRWQTAVRDGLLEAGIVPNNGFTYDHINGTKFGGTIFDRNGNRHTAADLLEYADPKGITVLLHATVHRILFRTRGTTKPIANGVVYRDRTGQAHRAYLKEGALSEIILSAGTLGSPQLLMLSGVGPSAQLQAQNITVVMDQPHVGQGMYDNPMNAVFVPSPVPVEVSLIEVVGITGEGTYVEAAGGENFGGGGGGSSGSSSTRDYYAMFSPRATLLESNSMTKLSSAQPFQGGFLLEKVMGPLSTGHLELKTRNPKDNPIVTFNYFQHPDDLKRCVRGIQTIERVVQSKAFSRYKYADVSFEYLLNLTASTPVNLRPPRSGPGASLPPSAEEFCQHTVTTIWHYHGGCVVGRVVDGDYKVIGIDQLRVIDMSTVGYCPGTNPQATVMMLGRYMGVKILRERLTKK

SEQ ID NO: 3830 - DNA, 1407 bp, Arabidopsis thaliana
  misc_feature (1)..(1407): Ceres Seq. ID no. 12371114
ataaattgaagtgtgtgagatgcatcatccatacacaacatcttccatcttccgataattctcctttagtcttataatcactaataagtacgataactgaaatggatccaagattcatcaacaccattccttccttgaggtatgatgatgataagtgtgatgatgaatatgcgtttgtgaaagctctatgtatgagtggtggagatggtgccaacagttactccgccaattctcgccttcagaaaaaagttttatcaatggccaaaccagtcttggtaagaaacacagaagaaatgatgatgaacttagactttcctacgtacatcaaagttgctgaattgggttgttcttcgggacaaaactcttttttggctatctttgagatcatcaacaccattaatgtgttgtgccaacatgtgaacaaaaactcaccagagatcgattgttgtctaaacgatctcccggaaaatgatttcaacacgacctttaagttcgtacctttcttcaacaaggagctcatgatcacaaacaaatcatcatgtttcgtctatggagctccaggttccttctattccaggctcttctctcgcaatagcctccatttaatacattcctcttatgcactccattggctctctaaggttcccgagaaacttgagaataataaggggaatctgtacataacaagttcaagtcctcaaagtgcatacaaggcctacttgaatcaattccaaaaagacttcaccatgtttctaaggttacgttctgaagaaattgtctctaatggacgtatggttctcaccttcatcggaagaaacactcttaacgatccattgtatagagattgttgtcacttttggacattgctatcaaactctctccgtgacctagtctttgagggtcttgtgagtgagtcaaagctggacgcattcaacatgccgttttatgatccgaacgtacaagaactcaaagaagtgatacaaaaagagggctcttttgaaatcaatgaattggagtcacatggatttgatcttggtcactactacgaagaagatgactttgaagcaggacgcaatgaagctaatggcataagagctgttagtgaaccaatgctcattgctcattttggagaagaaattatcgataccttgttcgataagtatgcataccatgtgactcaacatgccaactgcaggaacaaaacgactgtcagtcttgtcgtttccttgactaagaagtaatcaacttctgtcatgttgctctatttgtatttatttactactgttattttgtttccttgaataaatttcaacacctgccactcaatgtgatgatgtggagctagtattggaaaaaagtgtgactgtaatatattatggtaaatttggtaaatgatttatttcctgc

SEQ ID NO: 3831 - protein, 379 aa, Arabidopsis thaliana
  peptide (1)..(379): Ceres Seq. ID no. 12371115
  misc_feature (58)..(379): Pfam Name: Pfam Description:  SAM dependent carboxyl methyltransferase
  misc_feature (1)..(379): NCBI GI NO: 22330992 NR Description: S-adenosyl-L-methionine: carboxyl methyltransferase family
  misc_feature (1)..(379): NCBI GI NO: 37904506 NR Description: methyl transferase
  misc_feature (53)..(379): NCBI GI NO: 12322908 NR Description: hypothetical protein; 58431-59672
  misc_feature (1)..(379): NCBI GI NO: 15237695 NR Description: S-adenosyl-L-methionine: carboxyl methyltransferase family
  misc_feature (31)..(379): NCBI GI NO: 15239970 NR Description: S-adenosyl-L-methionine: carboxyl methyltransferase family
  misc_feature (16)..(379): NCBI GI NO: 15237696 NR Description: S-adenosyl-L-methionine: carboxyl methyltransferase family
  misc_feature (31)..(379): NCBI GI NO: 9279749 NR Description: S-adenosyl-L-methionine: salicylic acid carboxylmethyltransferase-like
  misc_feature (29)..(379): NCBI GI NO: 15240823 NR Description: S-adenosyl-L-methionine: carboxyl methyltransferase family
  misc_feature (31)..(379): NCBI GI NO: 8885604 NR Description: S-adenosyl-L-methionine: salicylic acid carboxylmethyltransferase-like
  misc_feature (59)..(379): NCBI GI NO: 15233213 NR Description: S-adenosyl-L-methionine: carboxyl methyltransferase family
MDPRFINTIPSLRYDDDKCDDEYAFVKALCMSGGDGANSYSANSRLQKKVLSMAKPVLVRNTEEMMMNLDFPTYIKVAELGCSSGQNSFLAIFEIINTINVLCQHVNKNSPEIDCCLNDLPENDFNTTFKFVPFFNKELMITNKSSCFVYGAPGSFYSRLFSRNSLHLIHSSYALHWLSKVPEKLENNKGNLYITSSSPQSAYKAYLNQFQKDFTMFLRLRSEEIVSNGRMVLTFIGRNTLNDPLYRDCCHFWTLLSNSLRDLVFEGLVSESKLDAFNMPFYDPNVQELKEVIQKEGSFEINELESHGFDLGHYYEEDDFEAGRNEANGIRAVSEPMLIAHFGEEIIDTLFDKYAYHVTQHANCRNKTTVSLVVSLTKK

SEQ ID NO: 3832 - protein, 349 aa, Arabidopsis thaliana
  peptide (1)..(349): Ceres Seq. ID no. 12371116
  misc_feature (28)..(349): Pfam Name: Pfam Description:  SAM dependent carboxyl methyltransferase
  misc_feature (1)..(349): NCBI GI NO: 22330992 NR Description: S-adenosyl-L-methionine: carboxyl methyltransferase family
  misc_feature (1)..(349): NCBI GI NO: 37904506 NR Description: methyl transferase
  misc_feature (23)..(349): NCBI GI NO: 12322908 NR Description: hypothetical protein; 58431-59672
  misc_feature (1)..(349): NCBI GI NO: 15237695 NR Description: S-adenosyl-L-methionine: carboxyl methyltransferase family
  misc_feature (1)..(349): NCBI GI NO: 15239970 NR Description: S-adenosyl-L-methionine: carboxyl methyltransferase family
  misc_feature (1)..(349): NCBI GI NO: 15237696 NR Description: S-adenosyl-L-methionine: carboxyl methyltransferase family
  misc_feature (1)..(349): NCBI GI NO: 9279749 NR Description: S-adenosyl-L-methionine: salicylic acid carboxylmethyltransferase-like
  misc_feature (1)..(349): NCBI GI NO: 15240823 NR Description: S-adenosyl-L-methionine: carboxyl methyltransferase family
  misc_feature (1)..(349): NCBI GI NO: 8885604 NR Description: S-adenosyl-L-methionine: salicylic acid carboxylmethyltransferase-like
  misc_feature (29)..(349): NCBI GI NO: 15233213 NR Description: S-adenosyl-L-methionine: carboxyl methyltransferase family
MSGGDGANSYSANSRLQKKVLSMAKPVLVRNTEEMMMNLDFPTYIKVAELGCSSGQNSFLAIFEIINTINVLCQHVNKNSPEIDCCLNDLPENDFNTTFKFVPFFNKELMITNKSSCFVYGAPGSFYSRLFSRNSLHLIHSSYALHWLSKVPEKLENNKGNLYITSSSPQSAYKAYLNQFQKDFTMFLRLRSEEIVSNGRMVLTFIGRNTLNDPLYRDCCHFWTLLSNSLRDLVFEGLVSESKLDAFNMPFYDPNVQELKEVIQKEGSFEINELESHGFDLGHYYEEDDFEAGRNEANGIRAVSEPMLIAHFGEEIIDTLFDKYAYHVTQHANCRNKTTVSLVVSLTKK

SEQ ID NO: 3833 - protein, 327 aa, Arabidopsis thaliana
  peptide (1)..(327): Ceres Seq. ID no. 12371117
  misc_feature (6)..(327): Pfam Name: Pfam Description:  SAM dependent carboxyl methyltransferase
  misc_feature (1)..(327): NCBI GI NO: 22330992 NR Description: S-adenosyl-L-methionine: carboxyl methyltransferase family
  misc_feature (1)..(327): NCBI GI NO: 37904506 NR Description: methyl transferase
  misc_feature (1)..(327): NCBI GI NO: 12322908 NR Description: hypothetical protein; 58431-59672
  misc_feature (1)..(327): NCBI GI NO: 15237695 NR Description: S-adenosyl-L-methionine: carboxyl methyltransferase family
  misc_feature (1)..(327): NCBI GI NO: 15239970 NR Description: S-adenosyl-L-methionine: carboxyl methyltransferase family
  misc_feature (1)..(327): NCBI GI NO: 15237696 NR Description: S-adenosyl-L-methionine: carboxyl methyltransferase family
  misc_feature (1)..(327): NCBI GI NO: 9279749 NR Description: S-adenosyl-L-methionine: salicylic acid carboxylmethyltransferase-like
  misc_feature (1)..(327): NCBI GI NO: 15240823 NR Description: S-adenosyl-L-methionine: carboxyl methyltransferase family
  misc_feature (1)..(327): NCBI GI NO: 8885604 NR Description: S-adenosyl-L-methionine: salicylic acid carboxylmethyltransferase-like
  misc_feature (7)..(327): NCBI GI NO: 15233213 NR Description: S-adenosyl-L-methionine: carboxyl methyltransferase family
MAKPVLVRNTEEMMMNLDFPTYIKVAELGCSSGQNSFLAIFEIINTINVLCQHVNKNSPEIDCCLNDLPENDFNTTFKFVPFFNKELMITNKSSCFVYGAPGSFYSRLFSRNSLHLIHSSYALHWLSKVPEKLENNKGNLYITSSSPQSAYKAYLNQFQKDFTMFLRLRSEEIVSNGRMVLTFIGRNTLNDPLYRDCCHFWTLLSNSLRDLVFEGLVSESKLDAFNMPFYDPNVQELKEVIQKEGSFEINELESHGFDLGHYYEEDDFEAGRNEANGIRAVSEPMLIAHFGEEIIDTLFDKYAYHVTQHANCRNKTTVSLVVSLTKK

SEQ ID NO: 3834 - DNA, 1052 bp, Arabidopsis thaliana
  misc_feature (1)..(1052): Ceres Seq. ID no. 12439723
gaaactgttcttttgccctcttctctcaattttaatccaccaaacaaatcgaacagtgttcgataacttttagattgcaagtcctgtttttgatttggtcgggagaaagaaaactagggttttgatgggaactgatacagttatgtctggacgagtaaggaaagatctatcaaaaacgaatccaaatgggaatattcctgagaatcgttctaattcacgtaagaagatccaacgacggagtaagaaaaccctaatctgtccggttcaaaaactattcgatacttgtaagaaagttttcgctgatggcaaatctggtaccgtcccttctcaagaaaacattgagatgcttcgagccgttttggatgaaatcaagcctgaggatgttggcgtaaatcctaagatgtcgtattttcgatctacagtgaccggacgatctccgttagtgacgtatcttcacatctatgcatgtcatagattctcgatttgcattttctgtttacctccatctggtgttatccctcttcacaatcacccggagatgactgtgtttagtaagctcttgtttggtacaatgcatatcaaatcctatgattgggtccctgattctccccagccgagttcagatactcgtttggcgaaagtgaaagtagattcggactttaccgcaccttgtgatacttctatactgtacccggctgatggagggaatatgcattgcttcaccgcgaaaacggcttgcgcggttcttgatgttattggtcctccatactctgatcccgcaggacgtcattgtacttactatttcgattatccgttctctagtttctcggtcgatggagtcgtggttgccgaggaggagaaggaaggctatgcatggttgaaggagagggaagagaagccagaggatttaacggttactgcattgatgtatagtggaccaaccatcaaagaatgaatgtggaagcatagcagaaaaaaaaaaccctttctttttctttgttctgttagagtattttcttgatttctggttgcatataaaaagaggtttttgg

SEQ ID NO: 3835 - protein, 276 aa, Arabidopsis thaliana
  peptide (1)..(276): Ceres Seq. ID no. 12439724
  misc_feature (1)..(276): NCBI GI NO: 15242505 NR Description: putative protein; protein id: At5g39890
  misc_feature (7)..(276): NCBI GI NO: 10176982 NR Description: contains similarity to unknownprotein~emb|CAB89322
  misc_feature (13)..(276): NCBI GI NO: 15242218 NR Description: putative protein; protein id: At5g15120.1
  misc_feature (47)..(274): NCBI GI NO: 34906308 NR Description: unnamed protein product
  misc_feature (31)..(274): NCBI GI NO: 29244630 NR Description: hypothetical protein
  misc_feature (48)..(275): NCBI GI NO: 25370572 NR Description: hypothetical protein At2g42670
  misc_feature (48)..(275): NCBI GI NO: 21536850 NR Description: unknown [Arabidopsis thaliana]
  misc_feature (48)..(275): NCBI GI NO: 18406030 NR Description: expressed protein; protein id: At2g42670
  misc_feature (79)..(275): NCBI GI NO: 15451150 NR Description: Unknown protein [Arabidopsis thaliana]
  misc_feature (47)..(276): NCBI GI NO: 15231104 NR Description: putative protein; protein id: At3g58670
MGTDTVMSGRVRKDLSKTNPNGNIPENRSNSRKKIQRRSKKTLICPVQKLFDTCKKVFADGKSGTVPSQENIEMLRAVLDEIKPEDVGVNPKMSYFRSTVTGRSPLVTYLHIYACHRFSICIFCLPPSGVIPLHNHPEMTVFSKLLFGTMHIKSYDWVPDSPQPSSDTRLAKVKVDSDFTAPCDTSILYPADGGNMHCFTAKTACAVLDVIGPPYSDPAGRHCTYYFDYPFSSFSVDGVVVAEEEKEGYAWLKEREEKPEDLTVTALMYSGPTIKE

SEQ ID NO: 3836 - protein, 270 aa, Arabidopsis thaliana
  peptide (1)..(270): Ceres Seq. ID no. 12439725
  misc_feature (1)..(270): NCBI GI NO: 15242505 NR Description: putative protein; protein id: At5g39890
  misc_feature (1)..(270): NCBI GI NO: 10176982 NR Description: contains similarity to unknownprotein~emb|CAB89322
  misc_feature (7)..(270): NCBI GI NO: 15242218 NR Description: putative protein; protein id: At5g15120.1
  misc_feature (41)..(268): NCBI GI NO: 34906308 NR Description: unnamed protein product
  misc_feature (25)..(268): NCBI GI NO: 29244630 NR Description: hypothetical protein
  misc_feature (42)..(269): NCBI GI NO: 25370572 NR Description: hypothetical protein At2g42670
  misc_feature (42)..(269): NCBI GI NO: 21536850 NR Description: unknown [Arabidopsis thaliana]
  misc_feature (42)..(269): NCBI GI NO: 18406030 NR Description: expressed protein; protein id: At2g42670
  misc_feature (73)..(269): NCBI GI NO: 15451150 NR Description: Unknown protein [Arabidopsis thaliana]
  misc_feature (41)..(270): NCBI GI NO: 15231104 NR Description: putative protein; protein id: At3g58670
MSGRVRKDLSKTNPNGNIPENRSNSRKKIQRRSKKTLICPVQKLFDTCKKVFADGKSGTVPSQENIEMLRAVLDEIKPEDVGVNPKMSYFRSTVTGRSPLVTYLHIYACHRFSICIFCLPPSGVIPLHNHPEMTVFSKLLFGTMHIKSYDWVPDSPQPSSDTRLAKVKVDSDFTAPCDTSILYPADGGNMHCFTAKTACAVLDVIGPPYSDPAGRHCTYYFDYPFSSFSVDGVVVAEEEKEGYAWLKEREEKPEDLTVTALMYSGPTIKE

SEQ ID NO: 3837 - protein, 203 aa, Arabidopsis thaliana
  peptide (1)..(203): Ceres Seq. ID no. 12439726
  misc_feature (1)..(203): NCBI GI NO: 15242505 NR Description: putative protein; protein id: At5g39890
  misc_feature (1)..(203): NCBI GI NO: 10176982 NR Description: contains similarity to unknownprotein~emb|CAB89322
  misc_feature (1)..(203): NCBI GI NO: 15242218 NR Description: putative protein; protein id: At5g15120.1
  misc_feature (1)..(201): NCBI GI NO: 34906308 NR Description: unnamed protein product
  misc_feature (1)..(201): NCBI GI NO: 29244630 NR Description: hypothetical protein
  misc_feature (1)..(202): NCBI GI NO: 25370572 NR Description: hypothetical protein At2g42670
  misc_feature (1)..(202): NCBI GI NO: 21536850 NR Description: unknown [Arabidopsis thaliana]
  misc_feature (1)..(202): NCBI GI NO: 18406030 NR Description: expressed protein; protein id: At2g42670
  misc_feature (6)..(202): NCBI GI NO: 15451150 NR Description: Unknown protein [Arabidopsis thaliana]
  misc_feature (1)..(203): NCBI GI NO: 15231104 NR Description: putative protein; protein id: At3g58670
MLRAVLDEIKPEDVGVNPKMSYFRSTVTGRSPLVTYLHIYACHRFSICIFCLPPSGVIPLHNHPEMTVFSKLLFGTMHIKSYDWVPDSPQPSSDTRLAKVKVDSDFTAPCDTSILYPADGGNMHCFTAKTACAVLDVIGPPYSDPAGRHCTYYFDYPFSSFSVDGVVVAEEEKEGYAWLKEREEKPEDLTVTALMYSGPTIKE

SEQ ID NO: 3838 - DNA, 1474 bp, Arabidopsis thaliana
  misc_feature (1)..(1474): Ceres Seq. ID no. 12331029
atctattaatcatctaggtggcagaagcagcatcgttgagaacgaagaagcttgaaaaagttgcgagctcagagaatctggaagtagcaaaatttggcggctttaactcagcaatttgttctgtacatggtattttgagaagagagcattcagctcacagttacgctctgcctatccagcttctaaatctactcactttggtcgagtcatggcttcttctggatctgaggcaaaagctaattacgcacccatatctaccaatgaacctgttgtgtctgttgattggctccactctaatcttggagatgctgatataaaggttttggatgcctcatggtacatggcacatgagcaaagaaatccaatccaagagtatcaagttgctcatattccaggtgctctcttctttgatttgaatggaatagcagatcgaaaaacaaatagattcccattaatagctttggcaagccttctggctgtgagcttctatgtgtctgtatgcgcaacaaccaaaaagtattgtatattatttgaattacatgtgcagttacgacacatgctaccatctgaggaagcttttgctgctggttgttctgctcttggaatcgagaacaacgatggagtggttgtgtatgatggaatggggctctttagtgcagctcgtgtatggtggatgtttagagtctttggacatgacaaagtatgggtacttgatggaggcttgccgaaatggcgtgcttcaggctatgacgttgaatccagtgtttcaaatgatgccattttgaaagccagtgcagcaactgaggctatagagaagatctatcaaggacaaacaattagcccaataacttttcagacgaagttccggccacatcttgtattggcacttgatcaggtgaaggaaaacatcgaggataagacttatcagcacatcgatgcgcgttcaaaggctagatttgacggtattgctccagaaccttggaagggtttaccgagtggtcatatacccggtaccaagtgtgtcccttttcccctaatgtttgattcctctcaaacactgttaccagcagaggagctgaagaagcagtttgaacaggaagacatatctctggacagtccgattgcggcctcatgtggaaccggtgtaacagcttgtattttggcattgggactttatcgtctgggaaaaactaatgtggcaatctatgatgggtcttggactgaatgggcaactgcaccaaacttgcccatagtgggttcttcttcataagaaagtccaagaaaaagctacaagatcacaagccagtggatatatatttataagcttagcttggttcaatccatttctgtgttaaactttaacaaatttgctgggagggttgtattagtattatacatcagtattcaggattcttgagtttggtctcatctttgtggagattgattaaaagtcttaatgttcttgttgtttgtc

SEQ ID NO: 3839 - protein, 353 aa, Arabidopsis thaliana
  peptide (1)..(353): Ceres Seq. ID no. 12331030
  misc_feature (23)..(78): Pfam Name: Pfam Description:  Rhodanese-like domain
  misc_feature (113)..(353): NCBI GI NO: 25456716 NR Description: thiosulfate sulfurtransferase (EC 2.8.1.1)
  misc_feature (1)..(83): NCBI GI NO: 25456716 NR Description: thiosulfate sulfurtransferase (EC 2.8.1.1)
  misc_feature (114)..(353): NCBI GI NO: 30684873 NR Description: mercaptopyruvate sulfurtransferase (Mst2/Rdh2)
  misc_feature (1)..(78): NCBI GI NO: 30684873 NR Description: mercaptopyruvate sulfurtransferase (Mst2/Rdh2)
  misc_feature (114)..(353): NCBI GI NO: 18394364 NR Description: mercaptopyruvate sulfurtransferase
  misc_feature (1)..(78): NCBI GI NO: 18394364 NR Description: mercaptopyruvate sulfurtransferase
  misc_feature (114)..(353): NCBI GI NO: 25288797 NR Description: hypothetical protein F3O9.26
  misc_feature (1)..(78): NCBI GI NO: 25288797 NR Description: hypothetical protein F3O9.26
  misc_feature (114)..(353): NCBI GI NO: 18412307 NR Description: mercaptopyruvate sulfurtransferase
  misc_feature (1)..(78): NCBI GI NO: 18412307 NR Description: mercaptopyruvate sulfurtransferase
MASSGSEAKANYAPISTNEPVVSVDWLHSNLGDADIKVLDASWYMAHEQRNPIQEYQVAHIPGALFFDLNGIADRKTNRFPLIALASLLAVSFYVSVCATTKKYCILFELHVQLRHMLPSEEAFAAGCSALGIENNDGVVVYDGMGLFSAARVWWMFRVFGHDKVWVLDGGLPKWRASGYDVESSVSNDAILKASAATEAIEKIYQGQTISPITFQTKFRPHLVLALDQVKENIEDKTYQHIDARSKARFDGIAPEPWKGLPSGHIPGTKCVPFPLMFDSSQTLLPAEELKKQFEQEDISLDSPIAASCGTGVTACILALGLYRLGKTNVAIYDGSWTEWATAPNLPIVGSSS

SEQ ID NO: 3840 - protein, 309 aa, Arabidopsis thaliana
  peptide (1)..(309): Ceres Seq. ID no. 12331031
  misc_feature (70)..(134): Pfam Name: Pfam Description:  Rhodanese-like domain
  misc_feature (69)..(309): NCBI GI NO: 25456716 NR Description: thiosulfate sulfurtransferase (EC 2.8.1.1)
  misc_feature (1)..(39): NCBI GI NO: 25456716 NR Description: thiosulfate sulfurtransferase (EC 2.8.1.1)
  misc_feature (70)..(309): NCBI GI NO: 30684873 NR Description: mercaptopyruvate sulfurtransferase (Mst2/Rdh2)
  misc_feature (1)..(34): NCBI GI NO: 30684873 NR Description: mercaptopyruvate sulfurtransferase (Mst2/Rdh2)
  misc_feature (70)..(309): NCBI GI NO: 18394364 NR Description: mercaptopyruvate sulfurtransferase
  misc_feature (1)..(34): NCBI GI NO: 18394364 NR Description: mercaptopyruvate sulfurtransferase
  misc_feature (70)..(309): NCBI GI NO: 25288797 NR Description: hypothetical protein F3O9.26
  misc_feature (1)..(34): NCBI GI NO: 25288797 NR Description: hypothetical protein F3O9.26
  misc_feature (70)..(309): NCBI GI NO: 18412307 NR Description: mercaptopyruvate sulfurtransferase
  misc_feature (1)..(34): NCBI GI NO: 18412307 NR Description: mercaptopyruvate sulfurtransferase
MAHEQRNPIQEYQVAHIPGALFFDLNGIADRKTNRFPLIALASLLAVSFYVSVCATTKKYCILFELHVQLRHMLPSEEAFAAGCSALGIENNDGVVVYDGMGLFSAARVWWMFRVFGHDKVWVLDGGLPKWRASGYDVESSVSNDAILKASAATEAIEKIYQGQTISPITFQTKFRPHLVLALDQVKENIEDKTYQHIDARSKARFDGIAPEPWKGLPSGHIPGTKCVPFPLMFDSSQTLLPAEELKKQFEQEDISLDSPIAASCGTGVTACILALGLYRLGKTNVAIYDGSWTEWATAPNLPIVGSSS

SEQ ID NO: 3841 - protein, 237 aa, Arabidopsis thaliana
  peptide (1)..(237): Ceres Seq. ID no. 12331032
  misc_feature (1)..(62): Pfam Name: Pfam Description:  Rhodanese-like domain
  misc_feature (1)..(237): NCBI GI NO: 25456716 NR Description: thiosulfate sulfurtransferase (EC 2.8.1.1)
  misc_feature (1)..(237): NCBI GI NO: 30684873 NR Description: mercaptopyruvate sulfurtransferase (Mst2/Rdh2)
  misc_feature (1)..(237): NCBI GI NO: 18394364 NR Description: mercaptopyruvate sulfurtransferase
  misc_feature (1)..(237): NCBI GI NO: 25288797 NR Description: hypothetical protein F3O9.26
  misc_feature (1)..(237): NCBI GI NO: 18412307 NR Description: mercaptopyruvate sulfurtransferase
  misc_feature (1)..(237): NCBI GI NO: 25288794 NR Description: thiosulfate sulfurtransferase (EC 2
  misc_feature (1)..(232): NCBI GI NO: 4406372 NR Description: thiosulfate sulfurtransferase [Datisca glomerata]
  misc_feature (1)..(236): NCBI GI NO: 14571545 NR Description: thiosulfate transferase [Triticum aestivum]
  misc_feature (96)..(232): NCBI GI NO: 27381801 NR Description: thiosulfate sulfurtransferase
  misc_feature (1)..(90): NCBI GI NO: 27381801 NR Description: thiosulfate sulfurtransferase
MLPSEEAFAAGCSALGIENNDGVVVYDGMGLFSAARVWWMFRVFGHDKVWVLDGGLPKWRASGYDVESSVSNDAILKASAATEAIEKIYQGQTISPITFQTKFRPHLVLALDQVKENIEDKTYQHIDARSKARFDGIAPEPWKGLPSGHIPGTKCVPFPLMFDSSQTLLPAEELKKQFEQEDISLDSPIAASCGTGVTACILALGLYRLGKTNVAIYDGSWTEWATAPNLPIVGSSS

SEQ ID NO: 3842 - DNA, 2063 bp, Arabidopsis thaliana
  misc_feature (1)..(2063): Ceres Seq. ID no. 12371494
aaacaaaaaaaacagagacccttcctctggggaatctaaggaagcttcaaaatgaagctaaagatttctctaatcgctccgattcttcttctcttctcattcttcttcgccgtggaatctaagtgcaggactagctgtcctttagctctagcttcgtactatctcgagaacggaacaacactctccgtcatcaaccaaaacctcaattcttcaatcgcgccttacgatcaaatcaatttcgatccaatcctcaggtacaacagtaacattaaagacaaagatagaatccagatgggctctagggttcttgtacctttcccttgcgaatgtcaacctggtgatttcctagggcacaatttcagctacagtgttcgacaggaagatacttacgaaagagtcgcgattagtaattacgcgaatctcacgacgatggagtcgttacaggcgaggaatccttttccggcgactaacatacctctctctgcgacgcttaatgtattggtgaattgttcttgtggtgatgagagtgtttcgaaagattttggtttgtttgttacgtatccgcttcgtcctgaagacagtctcagttctattgcgagatcttccggtgtatcggcggatattctgcagagatataatcccggtgttaattttaactccgggaatggaatcgtttatgtgcctggaagagatccaaatggtgcatttccaccattcaaatcaagtaaacaagatggtgttggtgctggagttattgctggtatagttataggagtgattgtggctttgttgttgatcttgtttatcgtatattatgcttaccggaagaataagtcgaagggtgattcgttttcttcttctattccgttgtctactaaggctgatcatgcttcttctactagtctccaaagtggaggtttgggtggtgccggagtgtctcctggcattgctgccataagcgtggacaaatctgttgagttttcgttggaggaactagcaaaggctactgataatttcaatttgtcttttaagattgggcaaggtggttttggggctgtttactatgcagagctgagaggagaaaaagctgcgattaagaagatggacatggaggcatcgaaacagttcttggcggaactaaaagtcttaacgcgtgtacatcatgtcaacctggttcgcctgattggatattgtgttgagggatcacttttcttggtgtatgaatatgttgagaatggtaaccttggacaacatttacatgggtcaggacgagaaccattaccgtggactaagagagtgcagattgcactagactcagctagaggtttagaatatatccacgagcacacggttccagtttatgtccatagggacattaaatctgccaatattttgatagaccagaaattccgagcaaaggtagcagatttcgggttaacaaaactgacagaagttggaggttcagcaactcggggtgcaatgggtacatttggttacatggcaccagagactgtttatggagaagtgtctgcaaaagtagatgtatatgcatttggagttgtcctttacgaattgatttctgcgaaaggtgcggttgtcaaaatgacagaagccgttggtgaatttagaggccttgttggtgtgttcgaagaatcattcaaggaaaccgacaaagaagaagcactacgcaagattatagacccgaggctcggtgatagttacccgtttgattcggtatacaagatggcggaattagggaaagcatgtacacaagagaatgcgcagctacgtccgagtatgagatacattgtggttgctttatccactctcttttcgtctaccggaaattgggatgttggaaacttccaaaacgaagatttagtcagtcttatgtccggccggtagactcgttttccggtttgctgttgttatatagaaatgattgttttttggtatgctcacgtatattttgtctgtctatacgaactttacatgtcacaactcacaagttgacttttatatgattttctataacgctctatatgtcaattattcaacgtctc

SEQ ID NO: 3843 - protein, 617 aa, Arabidopsis thaliana
  peptide (1)..(617): Ceres Seq. ID no. 12371495
  misc_feature (1)..(617): NCBI GI NO: 11994399 NR Description: contains similarity to receptor proteinkinase~gene_id:MIL23
  misc_feature (1)..(617): NCBI GI NO: 37651058 NR Description: Nod-factor receptor 1a
  misc_feature (1)..(617): NCBI GI NO: 37651060 NR Description: Nod-factor receptor 1b
  misc_feature (1)..(617): NCBI GI NO: 34485516 NR Description: LysM domain-containing receptor-like kinase 3
  misc_feature (294)..(617): NCBI GI NO: 38175551 NR Description: receptor protein kinase PERK1-like protein
  misc_feature (25)..(224): NCBI GI NO: 38175551 NR Description: receptor protein kinase PERK1-like protein
  misc_feature (302)..(596): NCBI GI NO: 34485514 NR Description: LysM domain-containing receptor-like kinase 1
  misc_feature (5)..(266): NCBI GI NO: 34485514 NR Description: LysM domain-containing receptor-like kinase 1
  misc_feature (130)..(596): NCBI GI NO: 34485526 NR Description: LysM domain-containing receptor-like kinase 4
  misc_feature (298)..(617): NCBI GI NO: 15218078 NR Description: unknown protein; protein id: At1g51940.1
MKLKISLIAPILLLFSFFFAVESKCRTSCPLALASYYLENGTTLSVINQNLNSSIAPYDQINFDPILRYNSNIKDKDRIQMGSRVLVPFPCECQPGDFLGHNFSYSVRQEDTYERVAISNYANLTTMESLQARNPFPATNIPLSATLNVLVNCSCGDESVSKDFGLFVTYPLRPEDSLSSIARSSGVSADILQRYNPGVNFNSGNGIVYVPGRDPNGAFPPFKSSKQDGVGAGVIAGIVIGVIVALLLILFIVYYAYRKNKSKGDSFSSSIPLSTKADHASSTSLQSGGLGGAGVSPGIAAISVDKSVEFSLEELAKATDNFNLSFKIGQGGFGAVYYAELRGEKAAIKKMDMEASKQFLAELKVLTRVHHVNLVRLIGYCVEGSLFLVYEYVENGNLGQHLHGSGREPLPWTKRVQIALDSARGLEYIHEHTVPVYVHRDIKSANILIDQKFRAKVADFGLTKLTEVGGSATRGAMGTFGYMAPETVYGEVSAKVDVYAFGVVLYELISAKGAVVKMTEAVGEFRGLVGVFEESFKETDKEEALRKIIDPRLGDSYPFDSVYKMAELGKACTQENAQLRPSMRYIVVALSTLFSSTGNWDVGNFQNEDLVSLMSGR

SEQ ID NO: 3844 - protein, 537 aa, Arabidopsis thaliana
  peptide (1)..(537): Ceres Seq. ID no. 12371496
  misc_feature (1)..(537): NCBI GI NO: 11994399 NR Description: contains similarity to receptor proteinkinase~gene_id:MIL23
  misc_feature (1)..(537): NCBI GI NO: 37651058 NR Description: Nod-factor receptor 1a
  misc_feature (1)..(537): NCBI GI NO: 37651060 NR Description: Nod-factor receptor 1b
  misc_feature (1)..(537): NCBI GI NO: 34485516 NR Description: LysM domain-containing receptor-like kinase 3
  misc_feature (214)..(537): NCBI GI NO: 38175551 NR Description: receptor protein kinase PERK1-like protein
  misc_feature (1)..(144): NCBI GI NO: 38175551 NR Description: receptor protein kinase PERK1-like protein
  misc_feature (222)..(516): NCBI GI NO: 34485514 NR Description: LysM domain-containing receptor-like kinase 1
  misc_feature (1)..(186): NCBI GI NO: 34485514 NR Description: LysM domain-containing receptor-like kinase 1
  misc_feature (50)..(516): NCBI GI NO: 34485526 NR Description: LysM domain-containing receptor-like kinase 4
  misc_feature (218)..(537): NCBI GI NO: 15218078 NR Description: unknown protein; protein id: At1g51940.1
MGSRVLVPFPCECQPGDFLGHNFSYSVRQEDTYERVAISNYANLTTMESLQARNPFPATNIPLSATLNVLVNCSCGDESVSKDFGLFVTYPLRPEDSLSSIARSSGVSADILQRYNPGVNFNSGNGIVYVPGRDPNGAFPPFKSSKQDGVGAGVIAGIVIGVIVALLLILFIVYYAYRKNKSKGDSFSSSIPLSTKADHASSTSLQSGGLGGAGVSPGIAAISVDKSVEFSLEELAKATDNFNLSFKIGQGGFGAVYYAELRGEKAAIKKMDMEASKQFLAELKVLTRVHHVNLVRLIGYCVEGSLFLVYEYVENGNLGQHLHGSGREPLPWTKRVQIALDSARGLEYIHEHTVPVYVHRDIKSANILIDQKFRAKVADFGLTKLTEVGGSATRGAMGTFGYMAPETVYGEVSAKVDVYAFGVVLYELISAKGAVVKMTEAVGEFRGLVGVFEESFKETDKEEALRKIIDPRLGDSYPFDSVYKMAELGKACTQENAQLRPSMRYIVVALSTLFSSTGNWDVGNFQNEDLVSLMSGR

SEQ ID NO: 3845 - protein, 491 aa, Arabidopsis thaliana
  peptide (1)..(491): Ceres Seq. ID no. 12371497
  misc_feature (1)..(491): NCBI GI NO: 11994399 NR Description: contains similarity to receptor proteinkinase~gene_id:MIL23
  misc_feature (1)..(491): NCBI GI NO: 37651058 NR Description: Nod-factor receptor 1a
  misc_feature (1)..(491): NCBI GI NO: 37651060 NR Description: Nod-factor receptor 1b
  misc_feature (1)..(491): NCBI GI NO: 34485516 NR Description: LysM domain-containing receptor-like kinase 3
  misc_feature (168)..(491): NCBI GI NO: 38175551 NR Description: receptor protein kinase PERK1-like protein
  misc_feature (1)..(98): NCBI GI NO: 38175551 NR Description: receptor protein kinase PERK1-like protein
  misc_feature (176)..(470): NCBI GI NO: 34485514 NR Description: LysM domain-containing receptor-like kinase 1
  misc_feature (1)..(140): NCBI GI NO: 34485514 NR Description: LysM domain-containing receptor-like kinase 1
  misc_feature (4)..(470): NCBI GI NO: 34485526 NR Description: LysM domain-containing receptor-like kinase 4
  misc_feature (172)..(491): NCBI GI NO: 15218078 NR Description: unknown protein; protein id: At1g51940.1
MESLQARNPFPATNIPLSATLNVLVNCSCGDESVSKDFGLFVTYPLRPEDSLSSIARSSGVSADILQRYNPGVNFNSGNGIVYVPGRDPNGAFPPFKSSKQDGVGAGVIAGIVIGVIVALLLILFIVYYAYRKNKSKGDSFSSSIPLSTKADHASSTSLQSGGLGGAGVSPGIAAISVDKSVEFSLEELAKATDNFNLSFKIGQGGFGAVYYAELRGEKAAIKKMDMEASKQFLAELKVLTRVHHVNLVRLIGYCVEGSLFLVYEYVENGNLGQHLHGSGREPLPWTKRVQIALDSARGLEYIHEHTVPVYVHRDIKSANILIDQKFRAKVADFGLTKLTEVGGSATRGAMGTFGYMAPETVYGEVSAKVDVYAFGVVLYELISAKGAVVKMTEAVGEFRGLVGVFEESFKETDKEEALRKIIDPRLGDSYPFDSVYKMAELGKACTQENAQLRPSMRYIVVALSTLFSSTGNWDVGNFQNEDLVSLMSGR

SEQ ID NO: 3846 - DNA, 1435 bp, Arabidopsis thaliana
  misc_feature (1)..(1435): Ceres Seq. ID no. 12328568
aattatatgtatatatatacgtacacaaaatcatacgtttttccacaaatggatcaagaagaggaagagatcgagattcctaattactttatctgcccaatctcactagagatcatgaaagatccagtcacgaccgtttctggcatcacttacgaccgtcaaaacatcgttaaatggctcgaaaaggtcccttcttgtcccgtcacgaagcaacctcttcccttagactccgatcttacacctaaccacatgcttcgccgtcttatccaacactggtgcgtcgagaacgagacacgtggcgttgtcagaatctctacacctcgagttcctcctggaaaacttaacgtcgtcgaagagatcaagaatctcaaaaagttcggccaagaagccttaggaagagaagaaacgttgcagaagcttgaagttttggcaatggacggaaataacagaagattgatgtgtgaatgtggcgtacataagtctttgatcttgttcgtagtcaagtgtactagtgaagacgaagacggacgacgtcgtatcaaaggactagatgagtctcttcgtcttcttcacttgatcggtattccatcaaacgacgcaaaaacaatcttgatggaaaacgatcgagttatggaatcgttgacttgggttttacaccaagaagactttctcagtaaggcttatacaattgtgctattgaggaatctaacggaatacacttcctctcatatcgtagagagattgaatcccgagatttttaaagggatcatagggtttctcaaggatgttgtaaatagtgttaatcggacgagccctaccgtgagagaaacggtacagtcatcatcaaggcctagcttgggaaaaacggaaccatcaaaacttgatcatagtttggtcatcaaacaagcggtgactgccgcgctgatgattcttttagagacttcttcgtggagccgaaaccgatcactccttgtggatctcggtgcggtttctgaactcatcgaactcgaaataagctacactggcgagaaaagaatcacagaacttatgttaggagttttatctcgtttatgttgctgtgcgaacggtagagccgagattcttgctcataggggcggaatcgcggttgtgacaaagcggctattgagggtttcacctgcggcagacgatagagctatctctatcctaactacagtgtcaaaattctcgccggaaaacatggtggtggaagagatggttaatgttgggacggtagagaagctctgttccgttctaggaatggattgtggtttgaacttgaaggagaaagcaaaagagatactaaaagatcattttgatgagtggaagaagtttccatgtattgacataactcttctcactaagctgctaagcatctcacccaaagggccaaagatctaagtaaataatctgctgc

SEQ ID NO: 3847 - protein, 472 aa, Arabidopsis thaliana
  peptide (1)..(472): Ceres Seq. ID no. 12328569
  misc_feature (25)..(99): Pfam Name: Pfam Description:  U-box domain
  misc_feature (3)..(472): NCBI GI NO: 18399375 NR Description: expressed protein; protein id: At3g11840
  misc_feature (17)..(472): NCBI GI NO: 6671940 NR Description: hypothetical protein [Arabidopsis thaliana]
  misc_feature (296)..(454): NCBI GI NO: 15231222 NR Description: putative protein; protein id: At3g52450.1
  misc_feature (21)..(153): NCBI GI NO: 15231222 NR Description: putative protein; protein id: At3g52450.1
  misc_feature (25)..(266): NCBI GI NO: 34908566 NR Description: P0505D12.10
  misc_feature (299)..(459): NCBI GI NO: 34908566 NR Description: P0505D12.10
  misc_feature (23)..(303): NCBI GI NO: 30013683 NR Description: Avr9/Cf-9 rapidly elicited protein 74
  misc_feature (314)..(442): NCBI GI NO: 30013683 NR Description: Avr9/Cf-9 rapidly elicited protein 74
  misc_feature (21)..(265): NCBI GI NO: 25408431 NR Description: hypothetical protein At2g35930
  misc_feature (21)..(265): NCBI GI NO: 30686609 NR Description: expressed protein [Arabidopsis thaliana]
NYMYIYTYTKSYVFPQMDQEEEEIEIPNYFICPISLEIMKDPVTTVSGITYDRQNIVKWLEKVPSCPVTKQPLPLDSDLTPNHMLRRLIQHWCVENETRGVVRISTPRVPPGKLNVVEEIKNLKKFGQEALGREETLQKLEVLAMDGNNRRLMCECGVHKSLILFVVKCTSEDEDGRRRIKGLDESLRLLHLIGIPSNDAKTILMENDRVMESLTWVLHQEDFLSKAYTIVLLRNLTEYTSSHIVERLNPEIFKGIIGFLKDVVNSVNRTSPTVRETVQSSSRPSLGKTEPSKLDHSLVIKQAVTAALMILLETSSWSRNRSLLVDLGAVSELIELEISYTGEKRITELMLGVLSRLCCCANGRAEILAHRGGIAVVTKRLLRVSPAADDRAISILTTVSKFSPENMVVEEMVNVGTVEKLCSVLGMDCGLNLKEKAKEILKDHFDEWKKFPCIDITLLTKLLSISPKGPKI

SEQ ID NO: 3848 - protein, 470 aa, Arabidopsis thaliana
  peptide (1)..(470): Ceres Seq. ID no. 12328570
  misc_feature (23)..(97): Pfam Name: Pfam Description:  U-box domain
  misc_feature (1)..(470): NCBI GI NO: 18399375 NR Description: expressed protein; protein id: At3g11840
  misc_feature (15)..(470): NCBI GI NO: 6671940 NR Description: hypothetical protein [Arabidopsis thaliana]
  misc_feature (294)..(452): NCBI GI NO: 15231222 NR Description: putative protein; protein id: At3g52450.1
  misc_feature (19)..(151): NCBI GI NO: 15231222 NR Description: putative protein; protein id: At3g52450.1
  misc_feature (23)..(264): NCBI GI NO: 34908566 NR Description: P0505D12.10
  misc_feature (297)..(457): NCBI GI NO: 34908566 NR Description: P0505D12.10
  misc_feature (21)..(301): NCBI GI NO: 30013683 NR Description: Avr9/Cf-9 rapidly elicited protein 74
  misc_feature (312)..(440): NCBI GI NO: 30013683 NR Description: Avr9/Cf-9 rapidly elicited protein 74
  misc_feature (19)..(263): NCBI GI NO: 25408431 NR Description: hypothetical protein At2g35930
  misc_feature (19)..(263): NCBI GI NO: 30686609 NR Description: expressed protein [Arabidopsis thaliana]
MYIYTYTKSYVFPQMDQEEEEIEIPNYFICPISLEIMKDPVTTVSGITYDRQNIVKWLEKVPSCPVTKQPLPLDSDLTPNHMLRRLIQHWCVENETRGVVRISTPRVPPGKLNVVEEIKNLKKFGQEALGREETLQKLEVLAMDGNNRRLMCECGVHKSLILFVVKCTSEDEDGRRRIKGLDESLRLLHLIGIPSNDAKTILMENDRVMESLTWVLHQEDFLSKAYTIVLLRNLTEYTSSHIVERLNPEIFKGIIGFLKDVVNSVNRTSPTVRETVQSSSRPSLGKTEPSKLDHSLVIKQAVTAALMILLETSSWSRNRSLLVDLGAVSELIELEISYTGEKRITELMLGVLSRLCCCANGRAEILAHRGGIAVVTKRLLRVSPAADDRAISILTTVSKFSPENMVVEEMVNVGTVEKLCSVLGMDCGLNLKEKAKEILKDHFDEWKKFPCIDITLLTKLLSISPKGPKI

SEQ ID NO: 3849 - protein, 456 aa, Arabidopsis thaliana
  peptide (1)..(456): Ceres Seq. ID no. 12328571
  misc_feature (9)..(83): Pfam Name: Pfam Description:  U-box domain
  misc_feature (1)..(456): NCBI GI NO: 18399375 NR Description: expressed protein; protein id: At3g11840
  misc_feature (1)..(456): NCBI GI NO: 6671940 NR Description: hypothetical protein [Arabidopsis thaliana]
  misc_feature (280)..(438): NCBI GI NO: 15231222 NR Description: putative protein; protein id: At3g52450.1
  misc_feature (5)..(137): NCBI GI NO: 15231222 NR Description: putative protein; protein id: At3g52450.1
  misc_feature (9)..(250): NCBI GI NO: 34908566 NR Description: P0505D12.10
  misc_feature (283)..(443): NCBI GI NO: 34908566 NR Description: P0505D12.10
  misc_feature (7)..(287): NCBI GI NO: 30013683 NR Description: Avr9/Cf-9 rapidly elicited protein 74
  misc_feature (298)..(426): NCBI GI NO: 30013683 NR Description: Avr9/Cf-9 rapidly elicited protein 74
  misc_feature (5)..(249): NCBI GI NO: 25408431 NR Description: hypothetical protein At2g35930
  misc_feature (5)..(249): NCBI GI NO: 30686609 NR Description: expressed protein [Arabidopsis thaliana]
MDQEEEEIEIPNYFICPISLEIMKDPVTTVSGITYDRQNIVKWLEKVPSCPVTKQPLPLDSDLTPNHMLRRLIQHWCVENETRGVVRISTPRVPPGKLNVVEEIKNLKKFGQEALGREETLQKLEVLAMDGNNRRLMCECGVHKSLILFVVKCTSEDEDGRRRIKGLDESLRLLHLIGIPSNDAKTILMENDRVMESLTWVLHQEDFLSKAYTIVLLRNLTEYTSSHIVERLNPEIFKGIIGFLKDVVNSVNRTSPTVRETVQSSSRPSLGKTEPSKLDHSLVIKQAVTAALMILLETSSWSRNRSLLVDLGAVSELIELEISYTGEKRITELMLGVLSRLCCCANGRAEILAHRGGIAVVTKRLLRVSPAADDRAISILTTVSKFSPENMVVEEMVNVGTVEKLCSVLGMDCGLNLKEKAKEILKDHFDEWKKFPCIDITLLTKLLSISPKGPKI

SEQ ID NO: 3850 - DNA, 1325 bp, Arabidopsis thaliana
  misc_feature (1)..(1325): Ceres Seq. ID no. 12579499
accttttgactcttcttctctctctctctgcaaattcaaaacagtgaaaaaaacctctcttcattttttaactccctctctctctctctctatggagagacgaacgagacgagtgaaattcacagagaatcgtacggtcacaaacgtagcagctacaccatctaacgggtctccgagactggtccgtatcactgttactgatcctttcgctactgactcgtctagcgacgacgacgacaacaacaacgtcacggtggttccaagagtgaaacgatacgtgaaggagattagattctgccaaggtgaatcttcttcctccaccgcggcgaggaaaggtaagcacaaggaggaggaaagcgtagtggttgaagatgacgtgtcgacgtcggtgaagcctaaaaagtacagaggcgtgagacagagaccttggggaaaattcgcggcggagattagagatccgtcgagccgtactcggatttggcttgggacttttgtcacggcggaggaagctgctatagcgtacgatagagccgcgattcatctcaaaggacctaaagcgctcacgaatttcctaactccgccgacgccaacgccggttatcgatctccaaacggtttccgcctgcgattacggtagagattctcggcagagccttcattcaccgacctctgttctaagattcaacgtcaacgaggaaacagagcatgagattgaagcgatcgagctatctccgagagaaagtcgacggttataaaagaagaagaagaatcgtcggcgggtttggtgttcccggatccgtatctgttaccggatttatctctcgccggcgaatgtttttgggataccgaaattgcccctgaccttttgtttctcgatgaagaaaccaaaatccaatcaacgttgttaccaaacacagaggtttcgaaacaaggagaaaacgaaactgaagatttcgagtttggtttgattgatgatttcgagtcttctccatgggatgtggatcatttcttcgaccatcatcatcactctttcgattaaaaatctcttcttttttggggaaatttttgtgtggtgatgatgacgtggatacatcgtgaccgtcggcttaccttttttagtctgaatgacgtggactgttcagatcaactgaagcgcaaacaaaaaaaaactagggttttgttttattaatttgtgggtaaatattttagttaagaagaagataagtatgttaatgtttatcaaggttggacctttcgttgttttggttcctctctctcagattgtctcaacggtaggaagcagtatataaatgtgtttctatgtcc

SEQ ID NO: 3851 - protein, 250 aa, Arabidopsis thaliana
  peptide (1)..(250): Ceres Seq. ID no. 12579500
  misc_feature (132)..(196): Pfam Name: Pfam Description:  AP2 domain
  misc_feature (31)..(250): NCBI GI NO: 15233169 NR Description: putative protein; protein id: At3g61630
  misc_feature (31)..(241): NCBI GI NO: 15225959 NR Description: putative AP2 domain transcription factor
  misc_feature (36)..(232): NCBI GI NO: 15234337 NR Description: putative protein; protein id: At4g27950.1
  misc_feature (37)..(197): NCBI GI NO: 22655200 NR Description: putative Ap2 domain protein [Arabidopsis thaliana]
  misc_feature (37)..(197): NCBI GI NO: 15236595 NR Description: putative Ap2 domain protein; protein id: At4g23750
  misc_feature (58)..(246): NCBI GI NO: 15237053 NR Description: putative Ap2 domain protein; protein id: At4g11140
  misc_feature (32)..(249): NCBI GI NO: 15238705 NR Description: putative protein; protein id: At5g53290.1
  misc_feature (38)..(225): NCBI GI NO: 7531181 NR Description: PATHOGENESIS-RELATED GENES TRANSCRIPTIONAL ACTIVATOR PTI6
  misc_feature (24)..(226): NCBI GI NO: 34898320 NR Description: Similar to Nicotiana tabacum mRNA for ERF1
  misc_feature (25)..(226): NCBI GI NO: 7489208 NR Description: Tsi1 protein - common tobacco
PFDSSSLSLCKFKTVKKTSLHFLTPSLSLSMERRTRRVKFTENRTVTNVAATPSNGSPRLVRITVTDPFATDSSSDDDDNNNVTVVPRVKRYVKEIRFCQGESSSSTAARKGKHKEEESVVVEDDVSTSVKPKKYRGVRQRPWGKFAAEIRDPSSRTRIWLGTFVTAEEAAIAYDRAAIHLKGPKALTNFLTPPTPTPVIDLQTVSACDYGRDSRQSLHSPTSVLRFNVNEETEHEIEAIELSPRESRRL

SEQ ID NO: 3852 - protein, 220 aa, Arabidopsis thaliana
  peptide (1)..(220): Ceres Seq. ID no. 12579501
  misc_feature (102)..(166): Pfam Name: Pfam Description:  AP2 domain
  misc_feature (1)..(220): NCBI GI NO: 15233169 NR Description: putative protein; protein id: At3g61630
  misc_feature (1)..(211): NCBI GI NO: 15225959 NR Description: putative AP2 domain transcription factor
  misc_feature (6)..(202): NCBI GI NO: 15234337 NR Description: putative protein; protein id: At4g27950.1
  misc_feature (7)..(167): NCBI GI NO: 22655200 NR Description: putative Ap2 domain protein [Arabidopsis thaliana]
  misc_feature (7)..(167): NCBI GI NO: 15236595 NR Description: putative Ap2 domain protein; protein id: At4g23750
  misc_feature (28)..(216): NCBI GI NO: 15237053 NR Description: putative Ap2 domain protein; protein id: At4g11140
  misc_feature (2)..(219): NCBI GI NO: 15238705 NR Description: putative protein; protein id: At5g53290.1
  misc_feature (8)..(195): NCBI GI NO: 7531181 NR Description: PATHOGENESIS-RELATED GENES TRANSCRIPTIONAL ACTIVATOR PTI6
  misc_feature (1)..(196): NCBI GI NO: 34898320 NR Description: Similar to Nicotiana tabacum mRNA for ERF1
  misc_feature (1)..(196): NCBI GI NO: 7489208 NR Description: Tsi1 protein - common tobacco
MERRTRRVKFTENRTVTNVAATPSNGSPRLVRITVTDPFATDSSSDDDDNNNVTVVPRVKRYVKEIRFCQGESSSSTAARKGKHKEEESVVVEDDVSTSVKPKKYRGVRQRPWGKFAAEIRDPSSRTRIWLGTFVTAEEAAIAYDRAAIHLKGPKALTNFLTPPTPTPVIDLQTVSACDYGRDSRQSLHSPTSVLRFNVNEETEHEIEAIELSPRESRRL

SEQ ID NO: 3853 - DNA, 873 bp, Arabidopsis thaliana
  misc_feature (1)..(873): Ceres Seq. ID no. 12328483
aacaaaaaaccctaacaaaaatggaatcgaaagcaatttgcttagggtttcttcctccaagacttcgattttcatctccacgtttaccctctcttcctccttctcctcctgtaagtgaaatttaaccatcaaaatttcatttttttccatttcgattcttccaaaaccttatcctaaaatttgtcaatatctcctgattctataggcttcttccacatttgcgacgcgtcacaaacttgattccagacaaaccctcctttggaacaaaccgcaattgagccgaggccgtgtagcgtgttcttcttctcaatctgactcaagacctgacaagaagcaatcggataagagtaactatgctcgagctgagctgttccgtgggaaatcaggttctgtttctttcaatggtctgactcatcagctggttgaagaaagtaaactggtttcagctccgtttcaagaagagaaaggttctttcttgtgggttttggctcctgttgttttgatttcttcgttgattcttcctcagttctttctaagtggtatcattgaagctaccttcaaaaacgacactgttgctgaaattgttacttctttttgctttgagacggtgttttatgctggtcttgcgatattcctgtctgtgactgaccgagtgcagaggccgtacttagacttcagctccaagagatggggtctgatcactggactgaggggataccttacgtctgcattcctcacgatgggtttaaaagttgtagttcccgtatttgctgtttacatgacttggccagctcttggaatagatgctttgattgcagtgcttcctttcttggttggctgtgcagttcaaagagttttcgagaagagtccagc

SEQ ID NO: 3854 - protein, 62 aa, Arabidopsis thaliana
  peptide (1)..(62): Ceres Seq. ID no. 12328484
MGSDHWTEGIPYVCIPHDGFKSCSSRICCLHDLASSWNRCFDCSASFLGWLCSSKSFREESS

SEQ ID NO: 3855 - protein, 44 aa, Arabidopsis thaliana
  peptide (1)..(44): Ceres Seq. ID no. 12328485
  misc_feature (1)..(41): NCBI GI NO: 15221197 NR Description: unknown protein; protein id: At1g48460.1
  misc_feature (1)..(41): NCBI GI NO: 25405928 NR Description: protein T1N15.7 [imported] - Arabidopsis thaliana
  misc_feature (1)..(42): NCBI GI NO: 34910348 NR Description: P0684B02.8
  misc_feature (1)..(42): NCBI GI NO: 21592953 NR Description: unknown [Arabidopsis thaliana]
  misc_feature (1)..(42): NCBI GI NO: 9758304 NR Description: emb|CAB81845
  misc_feature (1)..(42): NCBI GI NO: 18424658 NR Description: putative protein; protein id: At5g63040
MGLKVVVPVFAVYMTWPALGIDALIAVLPFLVGCAVQRVFEKSP

SEQ ID NO: 3856 - protein, 40 aa, Arabidopsis thaliana
  peptide (1)..(40): Ceres Seq. ID no. 12328486
  misc_feature (7)..(38): NCBI GI NO: 15221197 NR Description: unknown protein; protein id: At1g48460.1
  misc_feature (7)..(38): NCBI GI NO: 25405928 NR Description: protein T1N15.7 [imported] - Arabidopsis thaliana
QKTLTKMESKAICLGFLPPRLRFSSPRLPSLPPSPPVSEI

SEQ ID NO: 3857 - DNA, 1316 bp, Arabidopsis thaliana
  misc_feature (1)..(1316): Ceres Seq. ID no. 12329162
cttgccgttccatgctccaagtaaggacctgatttctctcgttttctctttctctctctctctctctcattctctcaacgaaatctcgatctcgtcgaggaagaagaagaacccagatcagaaaacataacaacaatgtcgtcgtctgcgaagaaacaaaccctgttcatatcgacattaatcatctcatggtactcttcaaacatcggtgttcttctcctcaacaagttccttctctcgaattacggattcaaattcccgatttttctcacaatgtgtcacatgtccgcttgcgctatccttagctacatctccattgttttcctcaagcttgttcctctccaacatctcaaatctcgttctcaattccttaaggttgctactctcagcatcgtcttttgtgcttccgtcgtcggtggtaacatctcccttcgttaccttcctgtctctttcaatcaagccgtcggtgctacgacgccgtttttcacggctctgtttgcttatcttatgacctttaagagagaagcttgggttacttatggtgctctcgtccctgtcgtcgccggtgtcgtcatcgccagtgggggtgagccaggatttcactggtttgggttcataatgtgcattagtgctactgcggcaagagcctttaaatctgttcttcaaggcatcttactttcttcagagggggaaaaattgaactcaatgaatttgatgttgtatatgtctcccatagctgtcattgctcttcttcccgttacgctatttatggaaccagacgtgatcagtgtgaccttgacgcttgcaaaacaacatcagtacatgtggatacttcttctggttaactctgtcatggcttattcagccaatctgttgaattttctggttaccaaacacacaagcgccctcaccctccaggttcttggaaatgctaaaggagcagttgcagtggtgatttctatcttgatctttcaaaacccggttacggttatgggaattggcgggtactccataaccgtccttggggtggttgcttatggagagacaaaacgcagatttagatgaactctcagacattagcaagtgagacaacatagcttctctatgtttgtttcttcatctgttcaagactcatccttaggacctgaaatttttgggcatttaggagatgagaatttatcaatagtgattttttgtaactattttatacgcactttatcatgtaatatgtatttggactatgttagatttgatggtgagataatcatttttgtgtgtttcctggttgaaataccattttggttattgaacttatt

SEQ ID NO: 3858 - protein, 309 aa, Arabidopsis thaliana; identical to SEQ ID NO: 1772
  peptide (1)..(309): Ceres Seq. ID no. 12329163
  misc_feature (26)..(149): Pfam Name: Pfam Description:  Integral membrane protein DUF6
  misc_feature (1)..(309): NCBI GI NO: 15237644 NR Description: phosphate/phosphoenolpyruvate translocator
  misc_feature (1)..(309): NCBI GI NO: 17064798 NR Description: phosphate/phosphoenolpyruvate translocator-like
  misc_feature (1)..(309): NCBI GI NO: 15228248 NR Description: unknown protein; protein id: At3g10290.1
  misc_feature (11)..(307): NCBI GI NO: 27476065 NR Description: Putative phosphate/phosphoenolpyruvate translocator protein
  misc_feature (11)..(307): NCBI GI NO: 9759107 NR Description: phosphate/phosphoenolpyruvate translocator protein-like
  misc_feature (11)..(307): NCBI GI NO: 30681126 NR Description: phosphate translocator-related
  misc_feature (152)..(307): NCBI GI NO: 15229717 NR Description: integral membrane protein, putative
  misc_feature (11)..(153): NCBI GI NO: 15229717 NR Description: integral membrane protein, putative
  misc_feature (1)..(307): NCBI GI NO: 15221371 NR Description: hypothetical protein; protein id: At1g12500.1
  misc_feature (6)..(302): NCBI GI NO: 15219121 NR Description: glucose 6 phosphate/phosphate translocator

SEQ ID NO: 3859 - protein, 263 aa, Arabidopsis thaliana; identical to SEQ ID NO: 1773
  peptide (1)..(263): Ceres Seq. ID no. 12329164
  misc_feature (1)..(103): Pfam Name: Pfam Description:  Integral membrane protein DUF6
  misc_feature (1)..(263): NCBI GI NO: 15237644 NR Description: phosphate/phosphoenolpyruvate translocator
  misc_feature (1)..(263): NCBI GI NO: 17064798 NR Description: phosphate/phosphoenolpyruvate translocator-like
  misc_feature (1)..(263): NCBI GI NO: 15228248 NR Description: unknown protein; protein id: At3g10290.1
  misc_feature (1)..(261): NCBI GI NO: 27476065 NR Description: Putative phosphate/phosphoenolpyruvate translocator protein
  misc_feature (1)..(261): NCBI GI NO: 9759107 NR Description: phosphate/phosphoenolpyruvate translocator protein-like
  misc_feature (1)..(261): NCBI GI NO: 30681126 NR Description: phosphate translocator-related
  misc_feature (106)..(261): NCBI GI NO: 15229717 NR Description: integral membrane protein, putative
  misc_feature (1)..(107): NCBI GI NO: 15229717 NR Description: integral membrane protein, putative
  misc_feature (1)..(261): NCBI GI NO: 15221371 NR Description: hypothetical protein; protein id: At1g12500.1
  misc_feature (1)..(256): NCBI GI NO: 15219121 NR Description: glucose 6 phosphate/phosphate translocator

SEQ ID NO: 3860 - protein, 260 aa, Arabidopsis thaliana
  peptide (1)..(260): Ceres Seq. ID no. 12329165
  misc_feature (1)..(100): Pfam Name: Pfam Description:  Integral membrane protein DUF6
  misc_feature (1)..(260): NCBI GI NO: 15237644 NR Description: phosphate/phosphoenolpyruvate translocator
  misc_feature (1)..(260): NCBI GI NO: 17064798 NR Description: phosphate/phosphoenolpyruvate translocator-like
  misc_feature (1)..(260): NCBI GI NO: 15228248 NR Description: unknown protein; protein id: At3g10290.1
  misc_feature (1)..(258): NCBI GI NO: 27476065 NR Description: Putative phosphate/phosphoenolpyruvate translocator protein
  misc_feature (1)..(258): NCBI GI NO: 9759107 NR Description: phosphate/phosphoenolpyruvate translocator protein-like
  misc_feature (1)..(258): NCBI GI NO: 30681126 NR Description: phosphate translocator-related
  misc_feature (103)..(258): NCBI GI NO: 15229717 NR Description: integral membrane protein, putative
  misc_feature (1)..(104): NCBI GI NO: 15229717 NR Description: integral membrane protein, putative
  misc_feature (1)..(258): NCBI GI NO: 15221371 NR Description: hypothetical protein; protein id: At1g12500.1
  misc_feature (1)..(253): NCBI GI NO: 15219121 NR Description: glucose 6 phosphate/phosphate translocator
MSACAILSYISIVFLKLVPLQHLKSRSQFLKVATLSIVFCASVVGGNISLRYLPVSFNQAVGATTPFFTALFAYLMTFKREAWVTYGALVPVVAGVVIASGGEPGFHWFGFIMCISATAARAFKSVLQGILLSSEGEKLNSMNLMLYMSPIAVIALLPVTLFMEPDVISVTLTLAKQHQYMWILLLVNSVMAYSANLLNFLVTKHTSALTLQVLGNAKGAVAVVISILIFQNPVTVMGIGGYSITVLGVVAYGETKRRFR

SEQ ID NO: 3861 - DNA, 1016 bp, Arabidopsis thaliana
  misc_feature (1)..(1016): Ceres Seq. ID no. 13576736
caaaatagttctcaatcagttggatcatctttttattcctaaataaataaactccaaaagcatctctctgtttcttctcctctcttcaagctttttgtttcgtctcagtcgtcgtcatcatctctgacagcaaggttattcacataggcaaagaagtcattcttttgcatgctgttttccaataaagttaattctctaacagaacaagtttcgagattggatattgacgacaacgatatgggacttggaggtagtgaaacaatggaatgcaagtgtggtatgcctctgtgtatctgtgtagctcctcccaaatcaactgataaaccaaacccacctgctaccattgctcctgtggttcttcctcagttgaagtcagaggcttcagcaaaaagtaaaggttccacttccagcagcaatgctagatcagctctaaatgctggactagacaccccccaaagagactatgaagccagtggggagggattaagagaagcgattaagaatggtgacagtgctggtgcgaaaaagcttctaaaagagggcgtagatgcaaattaccgagacaggcaaggaatgtcggtgcttcatctggctgtcctgttcaaccaaactgatattgcgttgatgttgatggatcatggagcaagccttgagtacaagaatgcacaaggagaaacaccgctagattgtgccccggcaacactgcaatacaagatgcgggaaaagatgaagtccacttaacagcatgcctcagacagagctacaaatcattcctcaaatctttttcagataagggaaagatttgtaatggaaaaaatcaagggatcatgaatttgcttgtaactttagttgcattctgtgtgcaattttccatgttatgtgatctttgaaccatgtcttcttccgctatgacataaaaactcccttttgtttttatgtcatcaaaatgtgacaatgcagaaacaaataccagcattgttatcatacgaattcatttatcttacaaactttgtttt

SEQ ID NO: 3862 - protein, 190 aa, Arabidopsis thaliana
  peptide (1)..(190): Ceres Seq. ID no. 13576737
  misc_feature (134)..(166): Pfam Name: Pfam Description:  Ankyrin repeat
  misc_feature (1)..(190): NCBI GI NO: 30683047 NR Description: expressed protein [Arabidopsis thaliana]
  misc_feature (32)..(188): NCBI GI NO: 33146872 NR Description: unknown protein
  misc_feature (24)..(104): NCBI GI NO: 25407827 NR Description: hypothetical protein At2g26210
  misc_feature (32)..(188): NCBI GI NO: 34906752 NR Description: contains EST AU056950
  misc_feature (88)..(172): NCBI GI NO: 17230240 NR Description: hypothetical protein [Nostoc sp. PCC 7120]
MLFSNKVNSLTEQVSRLDIDDNDMGLGGSETMECKCGMPLCICVAPPKSTDKPNPPATIAPVVLPQLKSEASAKSKGSTSSSNARSALNAGLDTPQRDYEASGEGLREAIKNGDSAGAKKLLKEGVDANYRDRQGMSVLHLAVLFNQTDIALMLMDHGASLEYKNAQGETPLDCAPATLQYKMREKMKST

SEQ ID NO: 3863 - protein, 167 aa, Arabidopsis thaliana
  peptide (1)..(167): Ceres Seq. ID no. 13576738
  misc_feature (111)..(143): Pfam Name: Pfam Description:  Ankyrin repeat
  misc_feature (1)..(167): NCBI GI NO: 30683047 NR Description: expressed protein [Arabidopsis thaliana]
  misc_feature (9)..(165): NCBI GI NO: 33146872 NR Description: unknown protein
  misc_feature (1)..(81): NCBI GI NO: 25407827 NR Description: hypothetical protein At2g26210
  misc_feature (9)..(165): NCBI GI NO: 34906752 NR Description: contains EST AU056950
  misc_feature (65)..(149): NCBI GI NO: 17230240 NR Description: hypothetical protein [Nostoc sp. PCC 7120]
MGLGGSETMECKCGMPLCICVAPPKSTDKPNPPATIAPVVLPQLKSEASAKSKGSTSSSNARSALNAGLDTPQRDYEASGEGLREAIKNGDSAGAKKLLKEGVDANYRDRQGMSVLHLAVLFNQTDIALMLMDHGASLEYKNAQGETPLDCAPATLQYKMREKMKST

SEQ ID NO: 3864 - protein, 159 aa, Arabidopsis thaliana
  peptide (1)..(159): Ceres Seq. ID no. 13576739
  misc_feature (103)..(135): Pfam Name: Pfam Description:  Ankyrin repeat
  misc_feature (1)..(159): NCBI GI NO: 30683047 NR Description: expressed protein [Arabidopsis thaliana]
  misc_feature (1)..(157): NCBI GI NO: 33146872 NR Description: unknown protein
  misc_feature (1)..(73): NCBI GI NO: 25407827 NR Description: hypothetical protein At2g26210
  misc_feature (1)..(157): NCBI GI NO: 34906752 NR Description: contains EST AU056950
  misc_feature (57)..(141): NCBI GI NO: 17230240 NR Description: hypothetical protein [Nostoc sp. PCC 7120]
MECKCGMPLCICVAPPKSTDKPNPPATIAPVVLPQLKSEASAKSKGSTSSSNARSALNAGLDTPQRDYEASGEGLREAIKNGDSAGAKKLLKEGVDANYRDRQGMSVLHLAVLFNQTDIALMLMDHGASLEYKNAQGETPLDCAPATLQYKMREKMKST

SEQ ID NO: 3865 - DNA, 641 bp, Arabidopsis thaliana
  misc_feature (1)..(641): Ceres Seq. ID no. 13576537
aatagctttttttgtattctctccatttgcttaatctcattttcgtttcaccgccgtctctctctatatcaaaatgggtcgccgtagctcaggaggaagatctgcccctcgccctcgtcctgctgctgcacgcagcccagctcctcaacctgtacaccgtgcacctcctccagctccagctcaggccagcggtggtggtggtggcatgttctcaggcattggttcaaccattgctcagggtatggcttttggtactggaagtgcagttgcacacagggctgttgattctgtgatgggtccacgaaccattcagcatgaggctgttgaggctgcttctgcatctgcagcccctgctggaagcgccatgctttctagcacctgtgacattcatgctaaggctttccaagattgcatcggcagctatggaagcgagattagcaaatgtcagttctacatggacatgttgtccgagtgcaggaagaactctggttccgtgattggtgcctagagtttccatttctcctatttgttttatcttaaagaattatccagctgtgatgatgctgagaatttggatatgatgatatgatcaaataacagtattatgtttccagaacctgaaactgcatggttgaagtctt

SEQ ID NO: 3866 - protein, 144 aa, Arabidopsis thaliana
  peptide (1)..(144): Ceres Seq. ID no. 13576538
  misc_feature (1)..(144): NCBI GI NO: 15237688 NR Description: expressed protein [Arabidopsis thaliana]
  misc_feature (1)..(140): NCBI GI NO: 13174237 NR Description: unknown protein [Oryza sativa]
  misc_feature (1)..(144): NCBI GI NO: 15242455 NR Description: expressed protein [Arabidopsis thaliana]
  misc_feature (10)..(135): NCBI GI NO: 39581909 NR Description: Hypothetical protein CBG20173
  misc_feature (7)..(139): NCBI GI NO: 37590390 NR Description: Unknown (protein for MGC:73308) [Danio rerio]
  misc_feature (1)..(137): NCBI GI NO: 23509031 NR Description: hypothetical protein, conserved
MGRRSSGGRSAPRPRPAAARSPAPQPVHRAPPPAPAQASGGGGGMFSGIGSTIAQGMAFGTGSAVAHRAVDSVMGPRTIQHEAVEAASASAAPAGSAMLSSTCDIHAKAFQDCIGSYGSEISKCQFYMDMLSECRKNSGSVIGA

SEQ ID NO: 3867 - protein, 100 aa, Arabidopsis thaliana
  peptide (1)..(100): Ceres Seq. ID no. 13576539
  misc_feature (1)..(100): NCBI GI NO: 15237688 NR Description: expressed protein [Arabidopsis thaliana]
  misc_feature (1)..(96): NCBI GI NO: 13174237 NR Description: unknown protein [Oryza sativa]
  misc_feature (1)..(100): NCBI GI NO: 15242455 NR Description: expressed protein [Arabidopsis thaliana]
  misc_feature (1)..(91): NCBI GI NO: 39581909 NR Description: Hypothetical protein CBG20173
  misc_feature (1)..(95): NCBI GI NO: 37590390 NR Description: Unknown (protein for MGC:73308) [Danio rerio]
  misc_feature (1)..(93): NCBI GI NO: 23509031 NR Description: hypothetical protein, conserved
MFSGIGSTIAQGMAFGTGSAVAHRAVDSVMGPRTIQHEAVEAASASAAPAGSAMLSSTCDIHAKAFQDCIGSYGSEISKCQFYMDMLSECRKNSGSVIGA

SEQ ID NO: 3868 - protein, 88 aa, Arabidopsis thaliana
  peptide (1)..(88): Ceres Seq. ID no. 13576540
  misc_feature (1)..(88): NCBI GI NO: 15237688 NR Description: expressed protein [Arabidopsis thaliana]
  misc_feature (1)..(84): NCBI GI NO: 13174237 NR Description: unknown protein [Oryza sativa]
  misc_feature (1)..(88): NCBI GI NO: 15242455 NR Description: expressed protein [Arabidopsis thaliana]
  misc_feature (1)..(79): NCBI GI NO: 39581909 NR Description: Hypothetical protein CBG20173
  misc_feature (1)..(83): NCBI GI NO: 37590390 NR Description: Unknown (protein for MGC:73308) [Danio rerio]
  misc_feature (1)..(81): NCBI GI NO: 23509031 NR Description: hypothetical protein, conserved
MAFGTGSAVAHRAVDSVMGPRTIQHEAVEAASASAAPAGSAMLSSTCDIHAKAFQDCIGSYGSEISKCQFYMDMLSECRKNSGSVIGA

SEQ ID NO: 3869 - DNA, 2181 bp, Arabidopsis thaliana; identical to SEQ ID NO: 2675
  misc_feature (1)..(2181): Ceres Seq. ID no. 13646180

SEQ ID NO: 3870 - protein, 497 aa, Arabidopsis thaliana; identical to SEQ ID NO: 2676
  peptide (1)..(497): Ceres Seq. ID no. 13646181
  misc_feature (330)..(470): Pfam Name: Pfam Description:  Chalcone and stilbene synthases
  misc_feature (1)..(497): NCBI GI NO: 15221431 NR Description: very-long-chain fatty acid condensing enzyme
  misc_feature (1)..(497): NCBI GI NO: 17979464 NR Description: At1g68530/T26J14_10 [Arabidopsis thaliana]
  misc_feature (6)..(497): NCBI GI NO: 21593111 NR Description: very-long-chain fatty acid condensing enzyme CUT1
  misc_feature (6)..(497): NCBI GI NO: 15222592 NR Description: very-long-chain fatty acid condensing enzyme
  misc_feature (6)..(497): NCBI GI NO: 21618184 NR Description: fatty acid condensing enzyme CUT1, putative
  misc_feature (6)..(497): NCBI GI NO: 28393607 NR Description: putative fatty acid condensing enzyme CUT1
  misc_feature (1)..(349): NCBI GI NO: 30697701 NR Description: very-long-chain fatty acid condensing enzyme
  misc_feature (6)..(489): NCBI GI NO: 15226724 NR Description: very-long-chain fatty acid condensing enzyme
  misc_feature (6)..(489): NCBI GI NO: 15223556 NR Description: very-long-chain fatty acid condensing enzyme
  misc_feature (6)..(492): NCBI GI NO: 29417540 NR Description: beta-ketoacyl-CoA-synthase [Marchantia polymorpha]

SEQ ID NO: 3871 - protein, 492 aa, Arabidopsis thaliana; identical to SEQ ID NO: 2677
  peptide (1)..(492): Ceres Seq. ID no. 13646182
  misc_feature (325)..(465): Pfam Name: Pfam Description:  Chalcone and stilbene synthases
  misc_feature (1)..(492): NCBI GI NO: 15221431 NR Description: very-long-chain fatty acid condensing enzyme
  misc_feature (1)..(492): NCBI GI NO: 17979464 NR Description: At1g68530/T26J14_10 [Arabidopsis thaliana]
  misc_feature (1)..(492): NCBI GI NO: 21593111 NR Description: very-long-chain fatty acid condensing enzyme CUT1
  misc_feature (1)..(492): NCBI GI NO: 15222592 NR Description: very-long-chain fatty acid condensing enzyme
  misc_feature (1)..(492): NCBI GI NO: 21618184 NR Description: fatty acid condensing enzyme CUT1, putative
  misc_feature (1)..(492): NCBI GI NO: 28393607 NR Description: putative fatty acid condensing enzyme CUT1
  misc_feature (1)..(344): NCBI GI NO: 30697701 NR Description: very-long-chain fatty acid condensing enzyme
  misc_feature (1)..(484): NCBI GI NO: 15226724 NR Description: very-long-chain fatty acid condensing enzyme
  misc_feature (1)..(484): NCBI GI NO: 15223556 NR Description: very-long-chain fatty acid condensing enzyme
  misc_feature (1)..(487): NCBI GI NO: 29417540 NR Description: beta-ketoacyl-CoA-synthase [Marchantia polymorpha]

SEQ ID NO: 3872 - protein, 460 aa, Arabidopsis thaliana; identical to SEQ ID NO: 2678
  peptide (1)..(460): Ceres Seq. ID no. 13646183
  misc_feature (293)..(433): Pfam Name: Pfam Description:  Chalcone and stilbene synthases
  misc_feature (1)..(460): NCBI GI NO: 15221431 NR Description: very-long-chain fatty acid condensing enzyme
  misc_feature (1)..(460): NCBI GI NO: 17979464 NR Description: At1g68530/T26J14_10 [Arabidopsis thaliana]
  misc_feature (1)..(460): NCBI GI NO: 21593111 NR Description: very-long-chain fatty acid condensing enzyme CUT1
  misc_feature (1)..(460): NCBI GI NO: 15222592 NR Description: very-long-chain fatty acid condensing enzyme
  misc_feature (1)..(460): NCBI GI NO: 21618184 NR Description: fatty acid condensing enzyme CUT1, putative
  misc_feature (1)..(460): NCBI GI NO: 28393607 NR Description: putative fatty acid condensing enzyme CUT1
  misc_feature (1)..(312): NCBI GI NO: 30697701 NR Description: very-long-chain fatty acid condensing enzyme
  misc_feature (1)..(452): NCBI GI NO: 15226724 NR Description: very-long-chain fatty acid condensing enzyme
  misc_feature (1)..(452): NCBI GI NO: 15223556 NR Description: very-long-chain fatty acid condensing enzyme
  misc_feature (1)..(455): NCBI GI NO: 29417540 NR Description: beta-ketoacyl-CoA-synthase [Marchantia polymorpha]

SEQ ID NO: 3873 - DNA, 1807 bp, Arabidopsis thaliana
  misc_feature (1)..(1807): Ceres Seq. ID no. 13489575
gatatcatcaaaaaccacaaaactttcttttctttttctaactattttatttattattcctacaaaatgtcatgtttgaagtatttcttgatcttattgatgttgggactgtgtgtctcatcggaggagaattttcaatatgactacttgaaagttccggcaagcgagtttgtgagctccataaacacaattgtggtagtgataagacaagtgagttcaattttgtctcagttcgctgatttcagcggagatcgccggctgcagaatgcggtttccgattgccttgatctgcttgacttttcttcagaggagctcacttggtctgcttctgcttctgagaatccaaaaggtaagggcaacggaacaggggacgttggatcggacacaaggacatggttaagtgctgctctctccaaccaagccacttgtatggaaggcttcgatggtacctctggtctcgtaaaatcccttgtcgctggcagtctcgatcaactatattctatgcttagggaattgttaccacttgtgcaaccagagcagaaacccaaggctgtttctaaacctggccctattgctaaaggaccgaaggcaccacctggccgtaaactcagagacaccgacgaagacgaaagccttcaattcccagactgggtcagaccggacgatcgtaaactattagaatcaaacggtaggacttacgacgttagtgtagcattggatgggacaggcaacttcacaaagataatggacgccataaagaaagctcctgattatagctcgacacgtttcgtcatatacattaaaaaaggtttatatttggagaatgttgagatcaagaagaagaaatggaacattgtaatgttaggtgatggcattgacgtgactgttatttccggtaaccgcagcttcatcgatggttggaccactttccgatcagctacattcgcggtaagcggaagaggattcttagcaagagatataacgttccagaacacagcagggccagagaagcatcaggcggtagcactgagatcagactctgacctctctgtgttcttcagatgtgcgatgaggggttatcaagatacactctacacgcacaccatgcgtcagttctaccgtgagtgcaccatcacgggaacagtagattttatatttggggatgggactgttgtgtttcaaaactgtcaaattttggctaaaagaggactccctaaccaaaagaacaccatcactgcacaaggccggaaagatgtcaaccaaccctcaggattctcaattcaattcagcaatatctcggcggacgcagatttggtcccatacctaaacacgacaaggacgtatctaggaaggccatggaagctatattcgagaacggttttcattaggaacaatatgagcgacgttgtgagacccgaaggatggcttgagtggaacgctgattttgcgttggacacactcttctacggagagttcatgaactacgggcctggttcaggactcagcagccgagtcaaatggcctggttaccacgtctttaacaactcggatcaggctaacaacttcaccgtttctcagttcattaaaggaaatctttggctgccttctacgggagtaacgtttagtgatggcttgtatatctaaactggctcagtgtttctattgtgaatgttcctgttttttgttccttttcattttgttttgcgttttcttgtcatgttcttctaagttggtttgttgtggtatttcacggttttggaaaaatattgataaatggggaatttaagtcgatcggctgaagttgaac

SEQ ID NO: 3874 - protein, 547 aa, Arabidopsis thaliana
  peptide (1)..(547): Ceres Seq. ID no. 13489576
  misc_feature (234)..(531): Pfam Name: Pfam Description:  Pectinesterase
  misc_feature (23)..(547): NCBI GI NO: 14190429 NR Description: AT4g33220/F4I10_150 [Arabidopsis thaliana]
  misc_feature (78)..(547): NCBI GI NO: 7447375 NR Description: pectinesterase homolog F4I10
  misc_feature (144)..(547): NCBI GI NO: 18418172 NR Description: pectinesterase family [Arabidopsis thaliana]
  misc_feature (28)..(545): NCBI GI NO: 30690925 NR Description: pectinesterase family [Arabidopsis thaliana]
  misc_feature (213)..(542): NCBI GI NO: 6093744 NR Description: Pectinesterase PPE8B precursor
  misc_feature (40)..(207): NCBI GI NO: 6093744 NR Description: Pectinesterase PPE8B precursor
  misc_feature (46)..(547): NCBI GI NO: 15081598 NR Description: pectin methylesterase PME1 [Vitis vinifera]
  misc_feature (205)..(544): NCBI GI NO: 33520429 NR Description: pectinesterase [Fragaria x ananassa]
  misc_feature (27)..(178): NCBI GI NO: 33520429 NR Description: pectinesterase [Fragaria x ananassa]
  misc_feature (86)..(545): NCBI GI NO: 15230020 NR Description: pectinesterase family [Arabidopsis thaliana]
DIIKNHKTFFSFSNYFIYYSYKMSCLKYFLILLMLGLCVSSEENFQYDYLKVPASEFVSSINTIVVVIRQVSSILSQFADFSGDRRLQNAVSDCLDLLDFSSEELTWSASASENPKGKGNGTGDVGSDTRTWLSAALSNQATCMEGFDGTSGLVKSLVAGSLDQLYSMLRELLPLVQPEQKPKAVSKPGPIAKGPKAPPGRKLRDTDEDESLQFPDWVRPDDRKLLESNGRTYDVSVALDGTGNFTKIMDAIKKAPDYSSTRFVIYIKKGLYLENVEIKKKKWNIVMLGDGIDVTVISGNRSFIDGWTTFRSATFAVSGRGFLARDITFQNTAGPEKHQAVALRSDSDLSVFFRCAMRGYQDTLYTHTMRQFYRECTITGTVDFIFGDGTVVFQNCQILAKRGLPNQKNTITAQGRKDVNQPSGFSIQFSNISADADLVPYLNTTRTYLGRPWKLYSRTVFIRNNMSDVVRPEGWLEWNADFALDTLFYGEFMNYGPGSGLSSRVKWPGYHVFNNSDQANNFTVSQFIKGNLWLPSTGVTFSDGLYI

SEQ ID NO: 3875 - protein, 525 aa, Arabidopsis thaliana
  peptide (1)..(525): Ceres Seq. ID no. 13489577
  misc_feature (212)..(509): Pfam Name: Pfam Description:  Pectinesterase
  misc_feature (1)..(525): NCBI GI NO: 14190429 NR Description: AT4g33220/F4I10_150 [Arabidopsis thaliana]
  misc_feature (56)..(525): NCBI GI NO: 7447375 NR Description: pectinesterase homolog F4I10
  misc_feature (122)..(525): NCBI GI NO: 18418172 NR Description: pectinesterase family [Arabidopsis thaliana]
  misc_feature (6)..(523): NCBI GI NO: 30690925 NR Description: pectinesterase family [Arabidopsis thaliana]
  misc_feature (191)..(520): NCBI GI NO: 6093744 NR Description: Pectinesterase PPE8B precursor
  misc_feature (18)..(185): NCBI GI NO: 6093744 NR Description: Pectinesterase PPE8B precursor
  misc_feature (24)..(525): NCBI GI NO: 15081598 NR Description: pectin methylesterase PME1 [Vitis vinifera]
  misc_feature (183)..(522): NCBI GI NO: 33520429 NR Description: pectinesterase [Fragaria x ananassa]
  misc_feature (5)..(156): NCBI GI NO: 33520429 NR Description: pectinesterase [Fragaria x ananassa]
  misc_feature (64)..(523): NCBI GI NO: 15230020 NR Description: pectinesterase family [Arabidopsis thaliana]
MSCLKYFLILLMLGLCVSSEENFQYDYLKVPASEFVSSINTIVVVIRQVSSILSQFADFSGDRRLQNAVSDCLDLLDFSSEELTWSASASENPKGKGNGTGDVGSDTRTWLSAALSNQATCMEGFDGTSGLVKSLVAGSLDQLYSMLRELLPLVQPEQKPKAVSKPGPIAKGPKAPPGRKLRDTDEDESLQFPDWVRPDDRKLLESNGRTYDVSVALDGTGNFTKIMDAIKKAPDYSSTRFVIYIKKGLYLENVEIKKKKWNIVMLGDGIDVTVISGNRSFIDGWTTFRSATFAVSGRGFLARDITFQNTAGPEKHQAVALRSDSDLSVFFRCAMRGYQDTLYTHTMRQFYRECTITGTVDFIFGDGTVVFQNCQILAKRGLPNQKNTITAQGRKDVNQPSGFSIQFSNISADADLVPYLNTTRTYLGRPWKLYSRTVFIRNNMSDVVRPEGWLEWNADFALDTLFYGEFMNYGPGSGLSSRVKWPGYHVFNNSDQANNFTVSQFIKGNLWLPSTGVTFSDGLYI

SEQ ID NO: 3876 - protein, 514 aa, Arabidopsis thaliana
  peptide (1)..(514): Ceres Seq. ID no. 13489578
  misc_feature (201)..(498): Pfam Name: Pfam Description:  Pectinesterase
  misc_feature (1)..(514): NCBI GI NO: 14190429 NR Description: AT4g33220/F4I10_150 [Arabidopsis thaliana]
  misc_feature (45)..(514): NCBI GI NO: 7447375 NR Description: pectinesterase homolog F4I10
  misc_feature (111)..(514): NCBI GI NO: 18418172 NR Description: pectinesterase family [Arabidopsis thaliana]
  misc_feature (1)..(512): NCBI GI NO: 30690925 NR Description: pectinesterase family [Arabidopsis thaliana]
  misc_feature (180)..(509): NCBI GI NO: 6093744 NR Description: Pectinesterase PPE8B precursor
  misc_feature (7)..(174): NCBI GI NO: 6093744 NR Description: Pectinesterase PPE8B precursor
  misc_feature (13)..(514): NCBI GI NO: 15081598 NR Description: pectin methylesterase PME1 [Vitis vinifera]
  misc_feature (172)..(511): NCBI GI NO: 33520429 NR Description: pectinesterase [Fragaria x ananassa]
  misc_feature (1)..(145): NCBI GI NO: 33520429 NR Description: pectinesterase [Fragaria x ananassa]
  misc_feature (53)..(512): NCBI GI NO: 15230020 NR Description: pectinesterase family [Arabidopsis thaliana]
MLGLCVSSEENFQYDYLKVPASEFVSSINTIVVVIRQVSSILSQFADFSGDRRLQNAVSDCLDLLDFSSEELTWSASASENPKGKGNGTGDVGSDTRTWLSAALSNQATCMEGFDGTSGLVKSLVAGSLDQLYSMLRELLPLVQPEQKPKAVSKPGPIAKGPKAPPGRKLRDTDEDESLQFPDWVRPDDRKLLESNGRTYDVSVALDGTGNFTKIMDAIKKAPDYSSTRFVIYIKKGLYLENVEIKKKKWNIVMLGDGIDVTVISGNRSFIDGWTTFRSATFAVSGRGFLARDITFQNTAGPEKHQAVALRSDSDLSVFFRCAMRGYQDTLYTHTMRQFYRECTITGTVDFIFGDGTVVFQNCQILAKRGLPNQKNTITAQGRKDVNQPSGFSIQFSNISADADLVPYLNTTRTYLGRPWKLYSRTVFIRNNMSDVVRPEGWLEWNADFALDTLFYGEFMNYGPGSGLSSRVKWPGYHVFNNSDQANNFTVSQFIKGNLWLPSTGVTFSDGLYI

SEQ ID NO: 3877 - DNA, 609 bp, Arabidopsis thaliana
  misc_feature (1)..(609): Ceres Seq. ID no. 12323160
atggcggaacttgagaatccaagtgtaatgtcgaagctgatagcattcttatcttcattgctagagcgagttgctgagtcaaacgatctgacccgacgagtcgcgactcagtcacagagagtttcggtgtttcatggactgagtcgaccaacgataacgattcagagctatctagagaggatcttcaaatacgcaaattgtagtccttcttgcttcgtcgttgcttacgtttatctcgatcgtttcactcacagacaaccttcacttcccatcaattcctttaacgtccatcgtcttctcatcactagtgtcatggtcgctgctaaattcctcgatgatctgtactacaacaatgcgtattacgcgaaagtgggaggaataagcacgaaggagatgaattttctagagctggatttcttattcgggttaggatttgaattaaacgtgacgccaaacacattcaacgcctacttctcttatcttcaaaaggaaatgactcttcttcaacctctctctctcgttgttgtcccatcatcaagatctctcattaccttcaacgacgatgaagcttctcatcagaaacaacaacaacaacaactcgctgtttga

SEQ ID NO: 3878 - protein, 202 aa, Arabidopsis thaliana
  peptide (1)..(202): Ceres Seq. ID no. 12323161
  misc_feature (15)..(148): Pfam Name: Pfam Description:  Cyclin, N-terminal domain
  misc_feature (1)..(202): NCBI GI NO: 15224950 NR Description: putative PREG1-like negative regulator
  misc_feature (5)..(199): NCBI GI NO: 37536902 NR Description: hypothetical protein
  misc_feature (3)..(179): NCBI GI NO: 15240306 NR Description: PREG-like - like protein; protein id: At5g61650.1
  misc_feature (9)..(178): NCBI GI NO: 15240794 NR Description: putative protein; protein id: At5g07450.1
  misc_feature (8)..(165): NCBI GI NO: 25493992 NR Description: PREG-like protein
  misc_feature (2)..(165): NCBI GI NO: 14140116 NR Description: PREG-like protein [Oryza sativa]
  misc_feature (12)..(182): NCBI GI NO: 15233185 NR Description: PREG-like protein, putative; protein id: At3g21870
  misc_feature (7)..(164): NCBI GI NO: 15229382 NR Description: putative protein; protein id: At3g63120
  misc_feature (7)..(164): NCBI GI NO: 21593009 NR Description: unknown [Arabidopsis thaliana]
  misc_feature (5)..(166): NCBI GI NO: 15232360 NR Description: regulatory protein - like; protein id: At3g60550.1
MAELENPSVMSKLIAFLSSLLERVAESNDLTRRVATQSQRVSVFHGLSRPTITIQSYLERIFKYANCSPSCFVVAYVYLDRFTHRQPSLPINSFNVHRLLITSVMVAAKFLDDLYYNNAYYAKVGGISTKEMNFLELDFLFGLGFELNVTPNTFNAYFSYLQKEMTLLQPLSLVVVPSSRSLITFNDDEASHQKQQQQQLAV

SEQ ID NO: 3879 - protein, 193 aa, Arabidopsis thaliana
  peptide (1)..(193): Ceres Seq. ID no. 12323162
  misc_feature (6)..(139): Pfam Name: Pfam Description:  Cyclin, N-terminal domain
  misc_feature (1)..(193): NCBI GI NO: 15224950 NR Description: putative PREG1-like negative regulator
  misc_feature (1)..(190): NCBI GI NO: 37536902 NR Description: hypothetical protein
  misc_feature (1)..(170): NCBI GI NO: 15240306 NR Description: PREG-like - like protein; protein id: At5g61650.1
  misc_feature (1)..(169): NCBI GI NO: 15240794 NR Description: putative protein; protein id: At5g07450.1
  misc_feature (1)..(156): NCBI GI NO: 25493992 NR Description: PREG-like protein
  misc_feature (1)..(156): NCBI GI NO: 14140116 NR Description: PREG-like protein [Oryza sativa]
  misc_feature (3)..(173): NCBI GI NO: 15233185 NR Description: PREG-like protein, putative; protein id: At3g21870
  misc_feature (1)..(155): NCBI GI NO: 15229382 NR Description: putative protein; protein id: At3g63120
  misc_feature (1)..(155): NCBI GI NO: 21593009 NR Description: unknown [Arabidopsis thaliana]
  misc_feature (1)..(157): NCBI GI NO: 15232360 NR Description: regulatory protein - like; protein id: At3g60550.1
MSKLIAFLSSLLERVAESNDLTRRVATQSQRVSVFHGLSRPTITIQSYLERIFKYANCSPSCFVVAYVYLDRFTHRQPSLPINSFNVHRLLITSVMVAAKFLDDLYYNNAYYAKVGGISTKEMNFLELDFLFGLGFELNVTPNTFNAYFSYLQKEMTLLQPLSLVVVPSSRSLITFNDDEASHQKQQQQQLAV

SEQ ID NO: 3880 - DNA, 1382 bp, Arabidopsis thaliana
  misc_feature (1)..(1382): Ceres Seq. ID no. 12323163
aagaacgtccaatccaatctataaatctccttgatggaatttccgtacatattacttgttcctttctgatctcttcttcatcggttttatgtttcatcgagtttgaatatttctttgattctctgtttgatgattgctagttctttagaagagcaatgagttattctggagccggactcggaaagcctggctcaggtaaaaggagaataagggatcttttaactcaatctgataaccgagtctgcgctgattgtggcgctccagatcctaagtgggcgtcagctaatattggagtgtttatatgcttaaaatgttgtggtgtccacagaagccttggcagtcatatctcaaaggtcttatccgtgacattggatgaatggtcagatgaagaagtcgattcgatgattgaaattggaggaaatgcctctgcaaattcaatttacgaggcgtttattcctgaaggtagctctaagcctggacctgatgctagtcatgaccagcgtatgaggttcattaggtcgaaatatgagcaccaagagtttctgaaaccaagcttgcggatcacatccgtgaggggctctagtacaaagactccagcatttctttcatcgagtctatctaaaaagattgttgatagctttcgcactaattcatcatcgcaacagccgcaacttgaaggcatggttgagtttattggattgttgaaggtgactattaaaaagggtaccaatatggccatccgagatatgatgtcaagtgatccctatgttgtgttgactctaggacaacagaaggctcaatctactgtagtgaagagcaacttaaaccctgtctggaatgaggaactcatgctctctgttcctcataactatggctcagtgaaattgcaagtgtttgactatgacacattttctgctgatgacataatgggagaagctgagattgatatccagcctctgattacatctgcaatggcttttggagaccctgaaatgtttggagatatgcagattggaaaatggctgaaatcgcacgacaatgctcttatagaagatagcatcatcaacattgcagatggtaaagtgaagcaagaggttcaaatcaagcttcagaatgttgaatctggtgaactagaactagaaatggagtggctacctcttgagcaataaataatcaactatataatagggtcattatatataaccaaacaaattttattactgtattcattattttaacattcccccttggttcttgtttgacaaatttttgaaactttgatctcattgaaaactttctttcgtactttgttgttgtaatgttcttttggcagattagatatttgtataactcatatgattatatgttttgactcatgttct

SEQ ID NO: 3881 - protein, 337 aa, Arabidopsis thaliana
  peptide (1)..(337): Ceres Seq. ID no. 12323164
  misc_feature (15)..(137): Pfam Name: Pfam Description:  Putative GTPase activating protein for Arf
  misc_feature (1)..(337): NCBI GI NO: 18415638 NR Description: putative protein; protein id: At4g21160
  misc_feature (1)..(337): NCBI GI NO: 21594052 NR Description: putative GTPase activating protein
  misc_feature (40)..(337): NCBI GI NO: 7486586 NR Description: hypothetical protein F7J7
  misc_feature (1)..(41): NCBI GI NO: 7486586 NR Description: hypothetical protein F7J7
  misc_feature (1)..(337): NCBI GI NO: 18412932 NR Description: putative protein; protein id: At4g05330
  misc_feature (1)..(337): NCBI GI NO: 25407332 NR Description: hypothetical protein AT4g05330
  misc_feature (17)..(337): NCBI GI NO: 6648206 NR Description: putative GTPase activating protein
  misc_feature (17)..(337): NCBI GI NO: 30680493 NR Description: zinc finger and C2 domain protein, putative
  misc_feature (9)..(337): NCBI GI NO: 19386828 NR Description: putative zinc finger and C2 domain protein
  misc_feature (1)..(121): NCBI GI NO: 25411567 NR Description: hypothetical protein At2g14490
MSYSGAGLGKPGSGKRRIRDLLTQSDNRVCADCGAPDPKWASANIGVFICLKCCGVHRSLGSHISKVLSVTLDEWSDEEVDSMIEIGGNASANSIYEAFIPEGSSKPGPDASHDQRMRFIRSKYEHQEFLKPSLRITSVRGSSTKTPAFLSSSLSKKIVDSFRTNSSSQQPQLEGMVEFIGLLKVTIKKGTNMAIRDMMSSDPYVVLTLGQQKAQSTVVKSNLNPVWNEELMLSVPHNYGSVKLQVFDYDTFSADDIMGEAEIDIQPLITSAMAFGDPEMFGDMQIGKWLKSHDNALIEDSIINIADGKVKQEVQIKLQNVESGELELEMEWLPLEQ

SEQ ID NO: 3882 - protein, 255 aa, Arabidopsis thaliana
  peptide (1)..(255): Ceres Seq. ID no. 12323165
  misc_feature (1)..(55): Pfam Name: Pfam Description:  Putative GTPase activating protein for Arf
  misc_feature (1)..(255): NCBI GI NO: 18415638 NR Description: putative protein; protein id: At4g21160
  misc_feature (1)..(255): NCBI GI NO: 21594052 NR Description: putative GTPase activating protein
  misc_feature (1)..(255): NCBI GI NO: 7486586 NR Description: hypothetical protein F7J7
  misc_feature (1)..(255): NCBI GI NO: 18412932 NR Description: putative protein; protein id: At4g05330
  misc_feature (1)..(255): NCBI GI NO: 25407332 NR Description: hypothetical protein AT4g05330
  misc_feature (1)..(255): NCBI GI NO: 6648206 NR Description: putative GTPase activating protein
  misc_feature (1)..(255): NCBI GI NO: 30680493 NR Description: zinc finger and C2 domain protein, putative
  misc_feature (1)..(255): NCBI GI NO: 19386828 NR Description: putative zinc finger and C2 domain protein
  misc_feature (1)..(39): NCBI GI NO: 25411567 NR Description: hypothetical protein At2g14490
  misc_feature (1)..(28): NCBI GI NO: 15225946 NR Description: unknown protein; protein id: At2g14490.1
MIEIGGNASANSIYEAFIPEGSSKPGPDASHDQRMRFIRSKYEHQEFLKPSLRITSVRGSSTKTPAFLSSSLSKKIVDSFRTNSSSQQPQLEGMVEFIGLLKVTIKKGTNMAIRDMMSSDPYVVLTLGQQKAQSTVVKSNLNPVWNEELMLSVPHNYGSVKLQVFDYDTFSADDIMGEAEIDIQPLITSAMAFGDPEMFGDMQIGKWLKSHDNALIEDSIINIADGKVKQEVQIKLQNVESGELELEMEWLPLEQ

SEQ ID NO: 3883 - protein, 221 aa, Arabidopsis thaliana
  peptide (1)..(221): Ceres Seq. ID no. 12323166
  misc_feature (67)..(146): Pfam Name: Pfam Description:  C2 domain
  misc_feature (1)..(221): NCBI GI NO: 18415638 NR Description: putative protein; protein id: At4g21160
  misc_feature (1)..(221): NCBI GI NO: 21594052 NR Description: putative GTPase activating protein
  misc_feature (1)..(221): NCBI GI NO: 7486586 NR Description: hypothetical protein F7J7
  misc_feature (1)..(221): NCBI GI NO: 18412932 NR Description: putative protein; protein id: At4g05330
  misc_feature (1)..(221): NCBI GI NO: 25407332 NR Description: hypothetical protein AT4g05330
  misc_feature (1)..(221): NCBI GI NO: 6648206 NR Description: putative GTPase activating protein
  misc_feature (1)..(221): NCBI GI NO: 30680493 NR Description: zinc finger and C2 domain protein, putative
  misc_feature (1)..(221): NCBI GI NO: 19386828 NR Description: putative zinc finger and C2 domain protein
  misc_feature (64)..(219): NCBI GI NO: 33146442 NR Description: zinc finger and C2 domain protein-like
  misc_feature (1)..(39): NCBI GI NO: 28850396 NR Description: similar to Arabidopsis thaliana (Mouse-ear cress)
MRFIRSKYEHQEFLKPSLRITSVRGSSTKTPAFLSSSLSKKIVDSFRTNSSSQQPQLEGMVEFIGLLKVTIKKGTNMAIRDMMSSDPYVVLTLGQQKAQSTVVKSNLNPVWNEELMLSVPHNYGSVKLQVFDYDTFSADDIMGEAEIDIQPLITSAMAFGDPEMFGDMQIGKWLKSHDNALIEDSIINIADGKVKQEVQIKLQNVESGELELEMEWLPLEQ

SEQ ID NO: 3884 - DNA, 1077 bp, Arabidopsis thaliana
  misc_feature (1)..(1077): Ceres Seq. ID no. 13487185
acaaccaatcccatctcttgtttcacttccgccctccatctttcttcgtgattgagagaatcttcaacgaaagaaagcaactttttttgggtgaaattcacagaacaaccaaggtttttcttcttcttcttcttctccagttcctacagaatcatgcctgacaagaacatcgtagaggacgttatcggtgatttggtggataacttcacggagactgttcagaagaacaaacatggttcctccttcttcgaacaagaagattccgtcagttctcgtttcaaccgtttgtttgatcgccagaagccaattcatcatgtcttaggcggtggcaaatctgctgatgtgttgttatggaggaacaagaagatctctgcaagtgttttgatgggagctaccgcaatttgggtgctttttgaatggatcaatttccatttcctgtctctcgtttgctatgccctcttgcttggtatgattgcacaattcgtttggtctaacgcctctggattcttaaaccgctcacagtctagagtgcctcgcctagttcttccaaaggatttctttgctgaagtcggtgtggccgttggaaaagaagttaaccgcggtttgttgtttcttcaggacttggcttgtaaagggaatttgaaacagttcctcatggctgtaatcggactatgggtagctgcaatggtcgggagctgttgcaatttcctaactgttttgtatatcgggtttgttggggcacacacaatgccggttctgtatgagagatacgaagacgaagtggatggttttatggattctatgatcatgaagtttcatagtcattacaagaagcttgatactgggtttctcagtagaatcccaagtggaaagtttggattaaagaagcgtgagtgactaaatcactcaagcattttcttattttaccttgtttgttgttagaacaatatggattatggtttgctaaatgaatgttttgagaatattattcattcatgtagattttgtgtatttccttactaaacaataccttgtccatgtatttgtcaataccttggttaataagagaatcatcat

SEQ ID NO: 3885 - protein, 247 aa, Arabidopsis thaliana
  peptide (1)..(247): Ceres Seq. ID no. 13487186
  misc_feature (1)..(247): NCBI GI NO: 30681227 NR Description: expressed protein [Arabidopsis thaliana]
  misc_feature (1)..(247): NCBI GI NO: 18398810 NR Description: expressed protein [Arabidopsis thaliana]
  misc_feature (4)..(247): NCBI GI NO: 34897094 NR Description: unknown protein
  misc_feature (1)..(247): NCBI GI NO: 34899590 NR Description: hypothetical protein~similar to Oryza sativa chromosome3
  misc_feature (4)..(245): NCBI GI NO: 34909318 NR Description: OSJNBb0021A09.5
  misc_feature (44)..(245): NCBI GI NO: 34904202 NR Description: P0492F05.25
  misc_feature (14)..(246): NCBI GI NO: 18406991 NR Description: expressed protein [Arabidopsis thaliana]
  misc_feature (23)..(247): NCBI GI NO: 15236556 NR Description: expressed protein [Arabidopsis thaliana]
  misc_feature (4)..(245): NCBI GI NO: 15238125 NR Description: expressed protein [Arabidopsis thaliana]
  misc_feature (12)..(247): NCBI GI NO: 15237093 NR Description: expressed protein [Arabidopsis thaliana]
MPDKNIVEDVIGDLVDNFTETVQKNKHGSSFFEQEDSVSSRFNRLFDRQKPIHHVLGGGKSADVLLWRNKKISASVLMGATAIWVLFEWINFHFLSLVCYALLLGMIAQFVWSNASGFLNRSQSRVPRLVLPKDFFAEVGVAVGKEVNRGLLFLQDLACKGNLKQFLMAVIGLWVAAMVGSCCNFLTVLYIGFVGAHTMPVLYERYEDEVDGFMDSMIMKFHSHYKKLDTGFLSRIPSGKFGLKKRE

SEQ ID NO: 3886 - protein, 170 aa, Arabidopsis thaliana
  peptide (1)..(170): Ceres Seq. ID no. 13487187
  misc_feature (1)..(170): NCBI GI NO: 30681227 NR Description: expressed protein [Arabidopsis thaliana]
  misc_feature (1)..(170): NCBI GI NO: 18398810 NR Description: expressed protein [Arabidopsis thaliana]
  misc_feature (1)..(170): NCBI GI NO: 34897094 NR Description: unknown protein
  misc_feature (1)..(170): NCBI GI NO: 34899590 NR Description: hypothetical protein~similar to Oryza sativa chromosome3
  misc_feature (1)..(168): NCBI GI NO: 34909318 NR Description: OSJNBb0021A09.5
  misc_feature (1)..(168): NCBI GI NO: 34904202 NR Description: P0492F05.25
  misc_feature (1)..(169): NCBI GI NO: 18406991 NR Description: expressed protein [Arabidopsis thaliana]
  misc_feature (1)..(170): NCBI GI NO: 15236556 NR Description: expressed protein [Arabidopsis thaliana]
  misc_feature (1)..(168): NCBI GI NO: 15238125 NR Description: expressed protein [Arabidopsis thaliana]
  misc_feature (1)..(170): NCBI GI NO: 15237093 NR Description: expressed protein [Arabidopsis thaliana]
MGATAIWVLFEWINFHFLSLVCYALLLGMIAQFVWSNASGFLNRSQSRVPRLVLPKDFFAEVGVAVGKEVNRGLLFLQDLACKGNLKQFLMAVIGLWVAAMVGSCCNFLTVLYIGFVGAHTMPVLYERYEDEVDGFMDSMIMKFHSHYKKLDTGFLSRIPSGKFGLKKRE

SEQ ID NO: 3887 - protein, 142 aa, Arabidopsis thaliana
  peptide (1)..(142): Ceres Seq. ID no. 13487188
  misc_feature (1)..(142): NCBI GI NO: 30681227 NR Description: expressed protein [Arabidopsis thaliana]
  misc_feature (1)..(142): NCBI GI NO: 18398810 NR Description: expressed protein [Arabidopsis thaliana]
  misc_feature (1)..(142): NCBI GI NO: 34897094 NR Description: unknown protein
  misc_feature (1)..(142): NCBI GI NO: 34899590 NR Description: hypothetical protein~similar to Oryza sativa chromosome3
  misc_feature (1)..(140): NCBI GI NO: 34909318 NR Description: OSJNBb0021A09.5
  misc_feature (1)..(140): NCBI GI NO: 34904202 NR Description: P0492F05.25
  misc_feature (1)..(141): NCBI GI NO: 18406991 NR Description: expressed protein [Arabidopsis thaliana]
  misc_feature (1)..(142): NCBI GI NO: 15236556 NR Description: expressed protein [Arabidopsis thaliana]
  misc_feature (1)..(140): NCBI GI NO: 15238125 NR Description: expressed protein [Arabidopsis thaliana]
  misc_feature (1)..(142): NCBI GI NO: 15237093 NR Description: expressed protein [Arabidopsis thaliana]
MIAQFVWSNASGFLNRSQSRVPRLVLPKDFFAEVGVAVGKEVNRGLLFLQDLACKGNLKQFLMAVIGLWVAAMVGSCCNFLTVLYIGFVGAHTMPVLYERYEDEVDGFMDSMIMKFHSHYKKLDTGFLSRIPSGKFGLKKRE

SEQ ID NO: 3888 - DNA, 2414 bp, Arabidopsis thaliana
  misc_feature (1)..(2414): Ceres Seq. ID no. 12325652
aagaactttcccagttttgttttttaatcatatcaaagcaaactgtgtgatggataagtacaaagtcgccggaaaatttggtctcccggacatcacggtggcagagatggaatctttagctagcttttgtgaagctgtcttgccttcagtgcagccaccgccggaagagctttccggtgaaggtgataaccatcggaacaaagaggctctccggtcattttactcaacttctgggtctaaaactcctgtccttcgccagagcattgagctggtcacgaaacgagggacaatagaagcttatattgctactaggcttatattgttcttgcttgctactcggcttgggacgcttctcatttgtggaaccgagtgtttggtctcaagatggccttttgtcgagaaatttagtgagctctcgttggagaagagagaaagagtacttcagaaacaattcaagaattggattctgactccaattagagctgcttttgtctacatcaaagttgcattcctcttctgtttcttctcccgggtgaatccaaatggcgaaaacccggcatgggaagccatagggtatcgtgttaaccccgatgagaacaaaccttctgaaactcataacgaaagaccacttgagaaagggatagtggagacgatggaagaaacagagcagactcttcttgaatcacttgctcataaaggcctagaagcggttcttgacacggagcatgatgcgatcagaataaaatgtgatgttgtggtcgtcgggtctggttcaggaggaggcgtagcagcttctgttctagcgaaatctggtttaaaagtggttgttcttgaaaaaggaagctactttacgccttctgaacatcgtcctttcgaaggtcctggcttggataaactctacgagaatggagggattctcccgagtgttgatgggagttttatggtgttggctggagcaactgtaggtggtggatctgctgtgaactggtctgcgtgtatcaaaaccccgaagtcggttcttcaagaatggtcagaggatcaaaatatacctcttttcggtactaaagaatatctaacggctatggaagttgtgtggaagaggatgggtgtcacggagaaatgtgaactggagagttttcagaatcagattctgagaaaaggttgcgaaaatctcgggttcaatgttgaaaacgtgccaagaaactcctcggagagtcattactgtggatcttgcgggtatggatgtagacaaggagacaagaaaggaagtgaccggacttggcttgtcgatgcggtggggcacggtgccgtgattcttactggatgtaaagcggagagattcatactcgaaaagaacggtagtaacaaaggaggcaagcaaatgaaatgtttgggagtgatggctaaatctttaaacggaaacatagcaaagatgttaaagattgaagctaaagtaacggtttcagcagggggtgctcttttaacacctccgttgatgatatctagcgggttgagaaaccgaaacatcggtaaaaaccttcacttacaccctgttttaatggcgtggggttacttcccggacaaggaatcttctaacatcagtttcaagggaaattcatatgaaggcgggatcataacatcagtgagcaaagtgttatcagaagattctgaagtcagagcaatcatagagacaccgcaactaggaccaggttcgttctccgttttaactccttggacctctgggcttgacatgaagaaaagaatggctagatactcaagaaccgcgagtctcataaccatagttagagaccgcgggtcaggagaagttaaaaccgaaggcagaataaactacaccgtggacaaaaccgacagagataatctcaaagctgggcttagagagtcgctaaggatactaatagcagctggagcagaggaagtgggaactcacagaagcgacgggcagagactaatatgcaaaggtgtcaatgagaattcgatccaagagtttttagactcggtgagtacagaggaaggagcaaagggaatgactgagaaatggaacgtttatagctcagctcatcagatgggaagctgtagaattggagaaaatgaaaaagaaggtgcaatagatttgaatggagagagttgggaagcagagaagttgtttgtgtgcgatgcaagtgcgttgcctagtgctgttggtgttaaccctatgatcacagtcatgtctacggcttattgtatctccacaagaatcgctaagtccatgaccactggtttatctcattgaactaaaataacgtatactttctattcatcctaatcaaatttatgtgtaaccaacatgataattcatagttaaagactcttctattgatcatgtctactaataaaatccatgttttggaaacgtt

SEQ ID NO: 3889 - protein, 762 aa, Arabidopsis thaliana
  peptide (1)..(762): Ceres Seq. ID no. 12325653
  misc_feature (250)..(525): Pfam Name: Pfam Description:  GMC oxidoreductase
  misc_feature (34)..(756): NCBI GI NO: 15235348 NR Description: putative protein; protein id: At4g28570
  misc_feature (34)..(756): NCBI GI NO: 21554016 NR Description: unknown [Arabidopsis thaliana]
  misc_feature (34)..(756): NCBI GI NO: 14532706 NR Description: unknown protein [Arabidopsis thaliana]
  misc_feature (185)..(758): NCBI GI NO: 37535318 NR Description: putative alcohol oxidase
  misc_feature (34)..(142): NCBI GI NO: 37535318 NR Description: putative alcohol oxidase
  misc_feature (80)..(756): NCBI GI NO: 25367436 NR Description: hypothetical protein
  misc_feature (176)..(759): NCBI GI NO: 37535334 NR Description: putative oxidase
  misc_feature (177)..(759): NCBI GI NO: 16905151 NR Description: putative alcohol oxidase [Oryza sativa]
  misc_feature (178)..(757): NCBI GI NO: 37535330 NR Description: putative alcohol oxidase
  misc_feature (181)..(752): NCBI GI NO: 15234998 NR Description: putative protein; protein id: At4g19380.1
RTFPVLFFNHIKANCVMDKYKVAGKFGLPDITVAEMESLASFCEAVLPSVQPPPEELSGEGDNHRNKEALRSFYSTSGSKTPVLRQSIELVTKRGTIEAYIATRLILFLLATRLGTLLICGTECLVSRWPFVEKFSELSLEKRERVLQKQFKNWILTPIRAAFVYIKVAFLFCFFSRVNPNGENPAWEAIGYRVNPDENKPSETHNERPLEKGIVETMEETEQTLLESLAHKGLEAVLDTEHDAIRIKCDVVVVGSGSGGGVAASVLAKSGLKVVVLEKGSYFTPSEHRPFEGPGLDKLYENGGILPSVDGSFMVLAGATVGGGSAVNWSACIKTPKSVLQEWSEDQNIPLFGTKEYLTAMEVVWKRMGVTEKCELESFQNQILRKGCENLGFNVENVPRNSSESHYCGSCGYGCRQGDKKGSDRTWLVDAVGHGAVILTGCKAERFILEKNGSNKGGKQMKCLGVMAKSLNGNIAKMLKIEAKVTVSAGGALLTPPLMISSGLRNRNIGKNLHLHPVLMAWGYFPDKESSNISFKGNSYEGGIITSVSKVLSEDSEVRAIIETPQLGPGSFSVLTPWTSGLDMKKRMARYSRTASLITIVRDRGSGEVKTEGRINYTVDKTDRDNLKAGLRESLRILIAAGAEEVGTHRSDGQRLICKGVNENSIQEFLDSVSTEEGAKGMTEKWNVYSSAHQMGSCRIGENEKEGAIDLNGESWEAEKLFVCDASALPSAVGVNPMITVMSTAYCISTRIAKSMTTGLSH

SEQ ID NO: 3890 - protein, 746 aa, Arabidopsis thaliana
  peptide (1)..(746): Ceres Seq. ID no. 12325654
  misc_feature (234)..(509): Pfam Name: Pfam Description:  GMC oxidoreductase
  misc_feature (18)..(740): NCBI GI NO: 15235348 NR Description: putative protein; protein id: At4g28570
  misc_feature (18)..(740): NCBI GI NO: 21554016 NR Description: unknown [Arabidopsis thaliana]
  misc_feature (18)..(740): NCBI GI NO: 14532706 NR Description: unknown protein [Arabidopsis thaliana]
  misc_feature (169)..(742): NCBI GI NO: 37535318 NR Description: putative alcohol oxidase
  misc_feature (18)..(126): NCBI GI NO: 37535318 NR Description: putative alcohol oxidase
  misc_feature (64)..(740): NCBI GI NO: 25367436 NR Description: hypothetical protein
  misc_feature (160)..(743): NCBI GI NO: 37535334 NR Description: putative oxidase
  misc_feature (161)..(743): NCBI GI NO: 16905151 NR Description: putative alcohol oxidase [Oryza sativa]
  misc_feature (162)..(741): NCBI GI NO: 37535330 NR Description: putative alcohol oxidase
  misc_feature (165)..(736): NCBI GI NO: 15234998 NR Description: putative protein; protein id: At4g19380.1
MDKYKVAGKFGLPDITVAEMESLASFCEAVLPSVQPPPEELSGEGDNHRNKEALRSFYSTSGSKTPVLRQSIELVTKRGTIEAYIATRLILFLLATRLGTLLICGTECLVSRWPFVEKFSELSLEKRERVLQKQFKNWILTPIRAAFVYIKVAFLFCFFSRVNPNGENPAWEAIGYRVNPDENKPSETHNERPLEKGIVETMEETEQTLLESLAHKGLEAVLDTEHDAIRIKCDVVVVGSGSGGGVAASVLAKSGLKVVVLEKGSYFTPSEHRPFEGPGLDKLYENGGILPSVDGSFMVLAGATVGGGSAVNWSACIKTPKSVLQEWSEDQNIPLFGTKEYLTAMEVVWKRMGVTEKCELESFQNQILRKGCENLGFNVENVPRNSSESHYCGSCGYGCRQGDKKGSDRTWLVDAVGHGAVILTGCKAERFILEKNGSNKGGKQMKCLGVMAKSLNGNIAKMLKIEAKVTVSAGGALLTPPLMISSGLRNRNIGKNLHLHPVLMAWGYFPDKESSNISFKGNSYEGGIITSVSKVLSEDSEVRAIIETPQLGPGSFSVLTPWTSGLDMKKRMARYSRTASLITIVRDRGSGEVKTEGRINYTVDKTDRDNLKAGLRESLRILIAAGAEEVGTHRSDGQRLICKGVNENSIQEFLDSVSTEEGAKGMTEKWNVYSSAHQMGSCRIGENEKEGAIDLNGESWEAEKLFVCDASALPSAVGVNPMITVMSTAYCISTRIAKSMTTGLSH

SEQ ID NO: 3891 - protein, 727 aa, Arabidopsis thaliana
  peptide (1)..(727): Ceres Seq. ID no. 12325655
  misc_feature (215)..(490): Pfam Name: Pfam Description:  GMC oxidoreductase
  misc_feature (1)..(721): NCBI GI NO: 15235348 NR Description: putative protein; protein id: At4g28570
  misc_feature (1)..(721): NCBI GI NO: 21554016 NR Description: unknown [Arabidopsis thaliana]
  misc_feature (1)..(721): NCBI GI NO: 14532706 NR Description: unknown protein [Arabidopsis thaliana]
  misc_feature (150)..(723): NCBI GI NO: 37535318 NR Description: putative alcohol oxidase
  misc_feature (1)..(107): NCBI GI NO: 37535318 NR Description: putative alcohol oxidase
  misc_feature (45)..(721): NCBI GI NO: 25367436 NR Description: hypothetical protein
  misc_feature (141)..(724): NCBI GI NO: 37535334 NR Description: putative oxidase
  misc_feature (142)..(724): NCBI GI NO: 16905151 NR Description: putative alcohol oxidase [Oryza sativa]
  misc_feature (143)..(722): NCBI GI NO: 37535330 NR Description: putative alcohol oxidase
  misc_feature (146)..(717): NCBI GI NO: 15234998 NR Description: putative protein; protein id: At4g19380.1
MESLASFCEAVLPSVQPPPEELSGEGDNHRNKEALRSFYSTSGSKTPVLRQSIELVTKRGTIEAYIATRLILFLLATRLGTLLICGTECLVSRWPFVEKFSELSLEKRERVLQKQFKNWILTPIRAAFVYIKVAFLFCFFSRVNPNGENPAWEAIGYRVNPDENKPSETHNERPLEKGIVETMEETEQTLLESLAHKGLEAVLDTEHDAIRIKCDVVVVGSGSGGGVAASVLAKSGLKVVVLEKGSYFTPSEHRPFEGPGLDKLYENGGILPSVDGSFMVLAGATVGGGSAVNWSACIKTPKSVLQEWSEDQNIPLFGTKEYLTAMEVVWKRMGVTEKCELESFQNQILRKGCENLGFNVENVPRNSSESHYCGSCGYGCRQGDKKGSDRTWLVDAVGHGAVILTGCKAERFILEKNGSNKGGKQMKCLGVMAKSLNGNIAKMLKIEAKVTVSAGGALLTPPLMISSGLRNRNIGKNLHLHPVLMAWGYFPDKESSNISFKGNSYEGGIITSVSKVLSEDSEVRAIIETPQLGPGSFSVLTPWTSGLDMKKRMARYSRTASLITIVRDRGSGEVKTEGRINYTVDKTDRDNLKAGLRESLRILIAAGAEEVGTHRSDGQRLICKGVNENSIQEFLDSVSTEEGAKGMTEKWNVYSSAHQMGSCRIGENEKEGAIDLNGESWEAEKLFVCDASALPSAVGVNPMITVMSTAYCISTRIAKSMTTGLSH

SEQ ID NO: 3892 - DNA, 1371 bp, Arabidopsis thaliana
  misc_feature (1)..(1371): Ceres Seq. ID no. 12340245
aacgtagaagaagctgatttaaatcccaaatccatttcaacgtagaagcttctacagattcgatttgggtgtctttggttttggatttggtaaagcttctcggtcacttgcttggtgattgaaattgaatcgattgtgattgtgattgtgagggaattatggctcaagccgtagaagaatggtacaagcagatgccgattataacccggtcgtatctcacggcggctgtagtcaccaccgtcgggtgttcgctcgaggtttgaagttttctgactcatgaaagcctttagctttgctctgattgatctgattagtttttccttgaaaaattgaatctttgtgtttctgttatgtatgtggatggttttgtttttttgatgtaaaaggtagctctttattggaattggggtagctaacgaatggttaagtttagagctaagtgttgtggtgttatggcttatgatgtaacattttgtggaacatttttttgttttgcagattatatctccttataatctctacctaaatcctacccttgtggtgaagcaataccagttctggcgtcttgttaccaatttcctttatttcagaaagatggatttggactttttgttccatatgttttttctagctcgatactgcaaactgctcgaagaaaactccttcaggggaaagactgcggatttcctttacatgctcttattcggggcaactgttctaactggtattgttctcattggcggaatgataccttatttgtccgtttcattctccaaaatcatcttcctcagcaattcattgactttcatgatggtctatgtatggagtaaacaaaatccttacatccacatgagtttccttggcctcttcactttcacagcagcttatttaccatgggtacttcttggattctctatccttgttggtgcaagtgcatggggggattttctgggaatgatagcgggccacgcatactacttcttggcgtttgtgtatccacgaatgacggatcgacgtcccttgaaaactccatctttcctcaaagccctatttgctgatgagccagtcgtgattgcaaggccagaagatgtgagatttgctcatgcgccttttgatgaaatccaccaagactgaatcttgatcctccacaaaacaccagccacaacgcacagttcaagtgtactcagataatgttattgattcttgacctttatagttgtggataatgtggaagtgagatagtgttggctctgatttttttccctagttttccgtcttcttttcttgtccgatacaaatgtgtttcctccttgtgcatatgaactcaaattgtgtacaaagtcttcaaaagtactagtttatagtttcgtc

SEQ ID NO: 3893 - protein, 179 aa, Arabidopsis thaliana
  peptide (1)..(179): Ceres Seq. ID no. 12340246
  misc_feature (1)..(147): Pfam Name: Pfam Description:  Der1-like family
  misc_feature (1)..(179): NCBI GI NO: 17473759 NR Description: putative protein [Arabidopsis thaliana]
  misc_feature (1)..(179): NCBI GI NO: 22328865 NR Description: putative protein; protein id: At4g21810
  misc_feature (1)..(179): NCBI GI NO: 15234480 NR Description: unknown protein; protein id: At4g04860
  misc_feature (1)..(179): NCBI GI NO: 7487831 NR Description: hypothetical protein T8O5
  misc_feature (1)..(179): NCBI GI NO: 25407582 NR Description: hypothetical protein AT4g21810
  misc_feature (1)..(179): NCBI GI NO: 27573354 NR Description: putative Der1-like protein
  misc_feature (74)..(179): NCBI GI NO: 4455289 NR Description: putative protein [Arabidopsis thaliana]
  misc_feature (1)..(174): NCBI GI NO: 40352706 NR Description: Unknown (protein for MGC:63991) [Danio rerio]
  misc_feature (1)..(165): NCBI GI NO: 31219425 NR Description: ENSANGP00000001887 [Anopheles gambiae]
  misc_feature (1)..(157): NCBI GI NO: 31455614 NR Description: carcinoma related gene [Homo sapiens]
MDLDFLFHMFFLARYCKLLEENSFRGKTADFLYMLLFGATVLTGIVLIGGMIPYLSVSFSKIIFLSNSLTFMMVYVWSKQNPYIHMSFLGLFTFTAAYLPWVLLGFSILVGASAWGDFLGMIAGHAYYFLAFVYPRMTDRRPLKTPSFLKALFADEPVVIARPEDVRFAHAPFDEIHQD

SEQ ID NO: 3894 - protein, 171 aa, Arabidopsis thaliana
  peptide (1)..(171): Ceres Seq. ID no. 12340247
  misc_feature (1)..(139): Pfam Name: Pfam Description:  Der1-like family
  misc_feature (1)..(171): NCBI GI NO: 17473759 NR Description: putative protein [Arabidopsis thaliana]
  misc_feature (1)..(171): NCBI GI NO: 22328865 NR Description: putative protein; protein id: At4g21810
  misc_feature (1)..(171): NCBI GI NO: 15234480 NR Description: unknown protein; protein id: At4g04860
  misc_feature (1)..(171): NCBI GI NO: 7487831 NR Description: hypothetical protein T8O5
  misc_feature (1)..(171): NCBI GI NO: 25407582 NR Description: hypothetical protein AT4g21810
  misc_feature (1)..(171): NCBI GI NO: 27573354 NR Description: putative Der1-like protein
  misc_feature (66)..(171): NCBI GI NO: 4455289 NR Description: putative protein [Arabidopsis thaliana]
  misc_feature (1)..(166): NCBI GI NO: 40352706 NR Description: Unknown (protein for MGC:63991) [Danio rerio]
  misc_feature (1)..(157): NCBI GI NO: 31219425 NR Description: ENSANGP00000001887 [Anopheles gambiae]
  misc_feature (1)..(149): NCBI GI NO: 31455614 NR Description: carcinoma related gene [Homo sapiens]
MFFLARYCKLLEENSFRGKTADFLYMLLFGATVLTGIVLIGGMIPYLSVSFSKIIFLSNSLTFMMVYVWSKQNPYIHMSFLGLFTFTAAYLPWVLLGFSILVGASAWGDFLGMIAGHAYYFLAFVYPRMTDRRPLKTPSFLKALFADEPVVIARPEDVRFAHAPFDEIHQD

SEQ ID NO: 3895 - protein, 146 aa, Arabidopsis thaliana
  peptide (1)..(146): Ceres Seq. ID no. 12340248
  misc_feature (1)..(114): Pfam Name: Pfam Description:  Der1-like family
  misc_feature (1)..(146): NCBI GI NO: 17473759 NR Description: putative protein [Arabidopsis thaliana]
  misc_feature (1)..(146): NCBI GI NO: 22328865 NR Description: putative protein; protein id: At4g21810
  misc_feature (1)..(146): NCBI GI NO: 15234480 NR Description: unknown protein; protein id: At4g04860
  misc_feature (1)..(146): NCBI GI NO: 7487831 NR Description: hypothetical protein T8O5
  misc_feature (1)..(146): NCBI GI NO: 25407582 NR Description: hypothetical protein AT4g21810
  misc_feature (1)..(146): NCBI GI NO: 27573354 NR Description: putative Der1-like protein
  misc_feature (41)..(146): NCBI GI NO: 4455289 NR Description: putative protein [Arabidopsis thaliana]
  misc_feature (1)..(141): NCBI GI NO: 40352706 NR Description: Unknown (protein for MGC:63991) [Danio rerio]
  misc_feature (1)..(132): NCBI GI NO: 31219425 NR Description: ENSANGP00000001887 [Anopheles gambiae]
  misc_feature (1)..(124): NCBI GI NO: 31455614 NR Description: carcinoma related gene [Homo sapiens]
MLLFGATVLTGIVLIGGMIPYLSVSFSKIIFLSNSLTFMMVYVWSKQNPYIHMSFLGLFTFTAAYLPWVLLGFSILVGASAWGDFLGMIAGHAYYFLAFVYPRMTDRRPLKTPSFLKALFADEPVVIARPEDVRFAHAPFDEIHQD

SEQ ID NO: 3896 - DNA, 2701 bp, Arabidopsis thaliana
  misc_feature (1)..(2701): Ceres Seq. ID no. 12599860
gagtaacccgaaagcaaagactgagagaaccaaggctccgatctaacaatgaggaagaggacgctcgtgtccgttttgttccttttctcgcttctgtttcttcttccagatcaaggaagaaagttacacgcgaatgcagaagagagttccgatgatgttacagatccaccaaaagttgaggagaaaattggtggtcacggtggtttatcgacggattccgatgtagttcatagagagtctgagtcgatgtcaaagaagacgcttcgcagtaacgcggagaagtttgagttccaagctgaggtttctcggcttatggacattattatcaactctctatacagtaacaaggacattttcttaagagagttgatctccaatgcttctgatgccttggacaaaattaggttccttgcactcactgacaaagacgttttgggtgaaggtgacactgctaagcttgagatccagattaagctagacaaagccaagaagattctttctattcgagaccggggaattggtatgactaaggaagacttaatcaagaaccttggtaccatagcaaaatctggaacgtcagcttttgttgagaaaatgcaatcaagtggggatttgaaccttattggacaatttggagttggattctactctgcctatcttgttgctgactacattgaagtcattagcaagcacaatgatgacagccagtatgtatgggaatcaaaggctaacggtaaatttgctgtttccgaggatacatggaatgagcctcttggacgtggaaccgagattagattacatcttagggatgaagctggcgagtacctagaagaaagtaaacttaaggaattggtgaagagatattctgaattcattaacttccctatctccctctgggctagcaaagaggttgaaaccgaggtcccagttgaggaagatgaatcagctgatgaggaaactgaaaccacctctaccgaggaagaaaaggaagaagatgctgaggaggaagatggtgagaaaaagcagaaaaccaagaaggtgaaagaaacagtttatgaatgggagcttctgaatgatgttaaggctatatggctgagaagtccaaaggaggtgacagaggaagagtacactaaattctaccactctctctcaaaggattttaccgacgagaagccaatggcttggagtcactttaatgctgaaggtgatgttgaattcaaggctgtgttgtatgttcctccgaaagctccccatgatctatacgagagctattacaacagcaacaaggcgaacttgaagctatatgtcaggagggtgttcatctcagatgaatttgatgagcttctgcctaagtatttgagtttcttgaagggtcttgttgactctgacacattgcctctaaatgtatcaagagaaatgcttcaacaacacagcagcttaaagacaattaagaagaagcttatccgaaaggcgcttgatatgatccgcaagcttgctgaagaagatcctgatgaaatccatgatgatgagaaaaaagatgtggagaagtctggtgagaacgatgagaagaagggtcaatacacaaaattctggaacgagtttggcaagtctgtcaaactaggtatcattgaggatgctgctaacaggaaccgcttggcaaaacttcttcgttttgagacaacaaagtccgatggaaaattgacttccctggatcagtacattaagagaatgaaaaagagccaaaaggacatattttacatcacaggaagcagcaaggaacagctagagaaatctccattcctggagaggctcatcaagaagggctatgaggtcatcttcttcacagacccagttgatgaatacttgatgcaatacctgatggattacgaagacaaaaagttccagaatgtgtccaaggaaggactgaaggttgggaaagattcaaaagacaaggagctgaaggaagcattcaaggagctaacaaagtggtggaaaggaaatctcgctagcgaaaacgtagacgatgtcaaaatcagcaaccgtttggctgacactccatgtgtagtcgtaacatccaagtttggatggagtgctaatatggagaggatcatgcagtcccaaactctctcggatgctaataagcaagcttacatgcgcggaaagagagtcctcgagatcaacccacgacaccctatcatcaaagaactcaaggatagaattgcaagtgacccagaggatgagagtgtgaaggaaacagcacagctcatgtaccagacagctttgatcgagagtggattcatactcaccgacccaaaagactttgctgcccgtatttataactcagtcaagagcggtctgaacatcagccctgatgcagtagccgacgaggaaatcgaggcagcagaggaaccagagaccagtgaggcaactgagacgaaatcagatgacttggctggtggtctaaacattgaagccgaacccgttgagcaacaagaagagaacaccaaggacgaactgtagatttcacttctgatgtttctcctttgtgtttacctctttagtttaaagcagaacatcgttttactcgaatatcaagattagtttaattaagcagtttttgatggattatgtaaacgcactacttgcattctagagatcaaggaacctaaacttcttcttttcaatgtatgagttttttatc

SEQ ID NO: 3897 - protein, 823 aa, Arabidopsis thaliana
  peptide (1)..(823): Ceres Seq. ID no. 12599861
  misc_feature (258)..(806): Pfam Name: Pfam Description:  Hsp90 protein
  misc_feature (33)..(485): NCBI GI NO: 27803582 NR Description: heat shock protein gp96 [Xenopus laevis]
  misc_feature (495)..(822): NCBI GI NO: 27803582 NR Description: heat shock protein gp96 [Xenopus laevis]
  misc_feature (29)..(522): NCBI GI NO: 21357739 NR Description: Glycoprotein 93 CG5520-PA
  misc_feature (494)..(817): NCBI GI NO: 21357739 NR Description: Glycoprotein 93 CG5520-PA
  misc_feature (76)..(485): NCBI GI NO: 22086553 NR Description: heat shock protein Hsp90 [Achlya ambisexualis]
  misc_feature (495)..(795): NCBI GI NO: 22086553 NR Description: heat shock protein Hsp90 [Achlya ambisexualis]
  misc_feature (71)..(489): NCBI GI NO: 15228059 NR Description: putative heat shock protein; protein id: At2g04030
  misc_feature (498)..(818): NCBI GI NO: 15228059 NR Description: putative heat shock protein; protein id: At2g04030
  misc_feature (71)..(489): NCBI GI NO: 20453106 NR Description: At2g04030/F3C11.14 [Arabidopsis thaliana]
  misc_feature (498)..(818): NCBI GI NO: 20453106 NR Description: At2g04030/F3C11.14 [Arabidopsis thaliana]
MRKRTLVSVLFLFSLLFLLPDQGRKLHANAEESSDDVTDPPKVEEKIGGHGGLSTDSDVVHRESESMSKKTLRSNAEKFEFQAEVSRLMDIIINSLYSNKDIFLRELISNASDALDKIRFLALTDKDVLGEGDTAKLEIQIKLDKAKKILSIRDRGIGMTKEDLIKNLGTIAKSGTSAFVEKMQSSGDLNLIGQFGVGFYSAYLVADYIEVISKHNDDSQYVWESKANGKFAVSEDTWNEPLGRGTEIRLHLRDEAGEYLEESKLKELVKRYSEFINFPISLWASKEVETEVPVEEDESADEETETTSTEEEKEEDAEEEDGEKKQKTKKVKETVYEWELLNDVKAIWLRSPKEVTEEEYTKFYHSLSKDFTDEKPMAWSHFNAEGDVEFKAVLYVPPKAPHDLYESYYNSNKANLKLYVRRVFISDEFDELLPKYLSFLKGLVDSDTLPLNVSREMLQQHSSLKTIKKKLIRKALDMIRKLAEEDPDEIHDDEKKDVEKSGENDEKKGQYTKFWNEFGKSVKLGIIEDAANRNRLAKLLRFETTKSDGKLTSLDQYIKRMKKSQKDIFYITGSSKEQLEKSPFLERLIKKGYEVIFFTDPVDEYLMQYLMDYEDKKFQNVSKEGLKVGKDSKDKELKEAFKELTKWWKGNLASENVDDVKISNRLADTPCVVVTSKFGWSANMERIMQSQTLSDANKQAYMRGKRVLEINPRHPIIKELKDRIASDPEDESVKETAQLMYQTALIESGFILTDPKDFAARIYNSVKSGLNISPDAVADEEIEAAEEPETSEATETKSDDLAGGLNIEAEPVEQQEENTKDEL

SEQ ID NO: 3898 - protein, 757 aa, Arabidopsis thaliana
  peptide (1)..(757): Ceres Seq. ID no. 12599862
  misc_feature (192)..(740): Pfam Name: Pfam Description:  Hsp90 protein
  misc_feature (1)..(419): NCBI GI NO: 27803582 NR Description: heat shock protein gp96 [Xenopus laevis]
  misc_feature (429)..(756): NCBI GI NO: 27803582 NR Description: heat shock protein gp96 [Xenopus laevis]
  misc_feature (1)..(456): NCBI GI NO: 21357739 NR Description: Glycoprotein 93 CG5520-PA
  misc_feature (428)..(751): NCBI GI NO: 21357739 NR Description: Glycoprotein 93 CG5520-PA
  misc_feature (10)..(419): NCBI GI NO: 22086553 NR Description: heat shock protein Hsp90 [Achlya ambisexualis]
  misc_feature (429)..(729): NCBI GI NO: 22086553 NR Description: heat shock protein Hsp90 [Achlya ambisexualis]
  misc_feature (5)..(423): NCBI GI NO: 15228059 NR Description: putative heat shock protein; protein id: At2g04030
  misc_feature (432)..(752): NCBI GI NO: 15228059 NR Description: putative heat shock protein; protein id: At2g04030
  misc_feature (5)..(423): NCBI GI NO: 20453106 NR Description: At2g04030/F3C11.14 [Arabidopsis thaliana]
  misc_feature (432)..(752): NCBI GI NO: 20453106 NR Description: At2g04030/F3C11.14 [Arabidopsis thaliana]
MSKKTLRSNAEKFEFQAEVSRLMDIIINSLYSNKDIFLRELISNASDALDKIRFLALTDKDVLGEGDTAKLEIQIKLDKAKKILSIRDRGIGMTKEDLIKNLGTIAKSGTSAFVEKMQSSGDLNLIGQFGVGFYSAYLVADYIEVISKHNDDSQYVWESKANGKFAVSEDTWNEPLGRGTEIRLHLRDEAGEYLEESKLKELVKRYSEFINFPISLWASKEVETEVPVEEDESADEETETTSTEEEKEEDAEEEDGEKKQKTKKVKETVYEWELLNDVKAIWLRSPKEVTEEEYTKFYHSLSKDFTDEKPMAWSHFNAEGDVEFKAVLYVPPKAPHDLYESYYNSNKANLKLYVRRVFISDEFDELLPKYLSFLKGLVDSDTLPLNVSREMLQQHSSLKTIKKKLIRKALDMIRKLAEEDPDEIHDDEKKDVEKSGENDEKKGQYTKFWNEFGKSVKLGIIEDAANRNRLAKLLRFETTKSDGKLTSLDQYIKRMKKSQKDIFYITGSSKEQLEKSPFLERLIKKGYEVIFFTDPVDEYLMQYLMDYEDKKFQNVSKEGLKVGKDSKDKELKEAFKELTKWWKGNLASENVDDVKISNRLADTPCVVVTSKFGWSANMERIMQSQTLSDANKQAYMRGKRVLEINPRHPIIKELKDRIASDPEDESVKETAQLMYQTALIESGFILTDPKDFAARIYNSVKSGLNISPDAVADEEIEAAEEPETSEATETKSDDLAGGLNIEAEPVEQQEENTKDEL

SEQ ID NO: 3899 - protein, 735 aa, Arabidopsis thaliana
  peptide (1)..(735): Ceres Seq. ID no. 12599863
  misc_feature (170)..(718): Pfam Name: Pfam Description:  Hsp90 protein
  misc_feature (1)..(397): NCBI GI NO: 27803582 NR Description: heat shock protein gp96 [Xenopus laevis]
  misc_feature (407)..(734): NCBI GI NO: 27803582 NR Description: heat shock protein gp96 [Xenopus laevis]
  misc_feature (1)..(434): NCBI GI NO: 21357739 NR Description: Glycoprotein 93 CG5520-PA
  misc_feature (406)..(729): NCBI GI NO: 21357739 NR Description: Glycoprotein 93 CG5520-PA
  misc_feature (1)..(397): NCBI GI NO: 22086553 NR Description: heat shock protein Hsp90 [Achlya ambisexualis]
  misc_feature (407)..(707): NCBI GI NO: 22086553 NR Description: heat shock protein Hsp90 [Achlya ambisexualis]
  misc_feature (1)..(401): NCBI GI NO: 15228059 NR Description: putative heat shock protein; protein id: At2g04030
  misc_feature (410)..(730): NCBI GI NO: 15228059 NR Description: putative heat shock protein; protein id: At2g04030
  misc_feature (1)..(401): NCBI GI NO: 20453106 NR Description: At2g04030/F3C11.14 [Arabidopsis thaliana]
  misc_feature (410)..(730): NCBI GI NO: 20453106 NR Description: At2g04030/F3C11.14 [Arabidopsis thaliana]
MDIIINSLYSNKDIFLRELISNASDALDKIRFLALTDKDVLGEGDTAKLEIQIKLDKAKKILSIRDRGIGMTKEDLIKNLGTIAKSGTSAFVEKMQSSGDLNLIGQFGVGFYSAYLVADYIEVISKHNDDSQYVWESKANGKFAVSEDTWNEPLGRGTEIRLHLRDEAGEYLEESKLKELVKRYSEFINFPISLWASKEVETEVPVEEDESADEETETTSTEEEKEEDAEEEDGEKKQKTKKVKETVYEWELLNDVKAIWLRSPKEVTEEEYTKFYHSLSKDFTDEKPMAWSHFNAEGDVEFKAVLYVPPKAPHDLYESYYNSNKANLKLYVRRVFISDEFDELLPKYLSFLKGLVDSDTLPLNVSREMLQQHSSLKTIKKKLIRKALDMIRKLAEEDPDEIHDDEKKDVEKSGENDEKKGQYTKFWNEFGKSVKLGIIEDAANRNRLAKLLRFETTKSDGKLTSLDQYIKRMKKSQKDIFYITGSSKEQLEKSPFLERLIKKGYEVIFFTDPVDEYLMQYLMDYEDKKFQNVSKEGLKVGKDSKDKELKEAFKELTKWWKGNLASENVDDVKISNRLADTPCVVVTSKFGWSANMERIMQSQTLSDANKQAYMRGKRVLEINPRHPIIKELKDRIASDPEDESVKETAQLMYQTALIESGFILTDPKDFAARIYNSVKSGLNISPDAVADEEIEAAEEPETSEATETKSDDLAGGLNIEAEPVEQQEENTKDEL

SEQ ID NO: 3900 - DNA, 1453 bp, Arabidopsis thaliana
  misc_feature (1)..(1453): Ceres Seq. ID no. 13574966
gaaattttccccagaaacaacaacagttcgagcaacaaaaccctgaactctctgtttctgttaaactcgtaaagtctcaatctttacgatttgttcttaaaaattctttcatttaaagttcttaaattggtcaacagtgtttatttttcctccaagtttgttaataatttaagatttccccacatgcattgaatatttgtcttttcttcttctttcttccatttcaaagttgtgagatttgattcgatgcttatgcagattcacaattttatgagaaattggacaaaaccctgatgtcggattccgtcaaaacgacggtggatccgcttttgaaagatttggatgggaaaaaagagagtttcaggcggaacgttgtgtctatggcagctgagttaaagcaagtgagaggtcgtttggtttctcaagaacaattctttgttaaagaaagcttttgtagaaaagaagcagagaagaaagctaagaacatggaaatggagatctgtaaattgcagaagaagttggaagatagaaattgtgagcttgtagcttcaacttctgctgctgaaaagtttctagaagaagtggacgatctgagatcacagctagctttaacaaaggacattgcagaaacaagtgctgcttctgctcaatccgcacagcttcaatgctcagtgctaacagaacaacttgacgacaaaacacgttctctaagagaacacgaagaccgtgtaactcatctcggtcaccagcttgataatcttcagagagatttgaagacaagagaatgttctcaaaaacagctgagagaggaagttatgagaatcgagcgtgagataactgaagctgttgcaaagtctgggaaaggcacagaatgtgagctcaggaaacttcttgaagaggtttctccaaagaactttgagagaatgaacatgttattggcggtaaaagacgaagagattgcaaagttaaaagatgatgtgaagttaatgtcagctcattggaaactcaaaactaaggaacttgaatctcagttggagagacaaagaagagcagatcaagagttgaagaagaaggtactgaaactagagttttgcctgcaagaagctcgtagtcagacaagaaagctacagagggcgggggagagacgagacaaggcaatcaaagagctaagtgatcagattactggaaaacagttgaatgaatcggtttcaggggagaaacaaaacttctgggatacttcagggttcaagatcgttgtgtcaatgtcgatgttgatattagttattatctccaaaagatgagttcttttgtcttgaactctctttctttttgttggtgtgtaaatgcagtagttgcagatagtagtcagataatggtgcatattattactccttgaggtttagcgaagagaaatcttgcttccctttgttaagttataagtttgttcatgtgt

SEQ ID NO: 3901 - protein, 335 aa, Arabidopsis thaliana
  peptide (1)..(335): Ceres Seq. ID no. 13574967
  misc_feature (5)..(319): Pfam Name: Pfam Description:  Myosin tail
  misc_feature (1)..(335): NCBI GI NO: 18421042 NR Description: expressed protein [Arabidopsis thaliana]
  misc_feature (1)..(326): NCBI GI NO: 7485248 NR Description: hypothetical protein A_IG002P16
  misc_feature (1)..(335): NCBI GI NO: 18397379 NR Description: expressed protein [Arabidopsis thaliana]
  misc_feature (4)..(335): NCBI GI NO: 4097950 NR Description: plant IF-like protein [Arabidopsis thaliana]
  misc_feature (10)..(335): NCBI GI NO: 22329439 NR Description: hypothetical protein [Arabidopsis thaliana]
  misc_feature (10)..(280): NCBI GI NO: 25402551 NR Description: hypothetical protein
  misc_feature (232)..(325): NCBI GI NO: 22329441 NR Description: myosin heavy chain -related [Arabidopsis thaliana]
  misc_feature (82)..(335): NCBI GI NO: 34894370 NR Description: unnamed protein product
  misc_feature (5)..(319): NCBI GI NO: 4249699 NR Description: myosin heavy chain [Rana catesbeiana]
  misc_feature (1)..(310): NCBI GI NO: 1335313 NR Description: translated region (partial) [Homo sapiens]
MSDSVKTTVDPLLKDLDGKKESFRRNVVSMAAELKQVRGRLVSQEQFFVKESFCRKEAEKKAKNMEMEICKLQKKLEDRNCELVASTSAAEKFLEEVDDLRSQLALTKDIAETSAASAQSAQLQCSVLTEQLDDKTRSLREHEDRVTHLGHQLDNLQRDLKTRECSQKQLREEVMRIEREITEAVAKSGKGTECELRKLLEEVSPKNFERMNMLLAVKDEEIAKLKDDVKLMSAHWKLKTKELESQLERQRRADQELKKKVLKLEFCLQEARSQTRKLQRAGERRDKAIKELSDQITGKQLNESVSGEKQNFWDTSGFKIVVSMSMLILVIISKR

SEQ ID NO: 3902 - protein, 306 aa, Arabidopsis thaliana
  peptide (1)..(306): Ceres Seq. ID no. 13574968
  misc_feature (1)..(290): Pfam Name: Pfam Description:  Myosin tail
  misc_feature (1)..(306): NCBI GI NO: 18421042 NR Description: expressed protein [Arabidopsis thaliana]
  misc_feature (1)..(297): NCBI GI NO: 7485248 NR Description: hypothetical protein A_IG002P16
  misc_feature (1)..(306): NCBI GI NO: 18397379 NR Description: expressed protein [Arabidopsis thaliana]
  misc_feature (1)..(306): NCBI GI NO: 4097950 NR Description: plant IF-like protein [Arabidopsis thaliana]
  misc_feature (1)..(306): NCBI GI NO: 22329439 NR Description: hypothetical protein [Arabidopsis thaliana]
  misc_feature (1)..(251): NCBI GI NO: 25402551 NR Description: hypothetical protein
  misc_feature (203)..(296): NCBI GI NO: 22329441 NR Description: myosin heavy chain -related [Arabidopsis thaliana]
  misc_feature (53)..(306): NCBI GI NO: 34894370 NR Description: unnamed protein product
  misc_feature (1)..(290): NCBI GI NO: 4249699 NR Description: myosin heavy chain [Rana catesbeiana]
  misc_feature (1)..(281): NCBI GI NO: 1335313 NR Description: translated region (partial) [Homo sapiens]
MAAELKQVRGRLVSQEQFFVKESFCRKEAEKKAKNMEMEICKLQKKLEDRNCELVASTSAAEKFLEEVDDLRSQLALTKDIAETSAASAQSAQLQCSVLTEQLDDKTRSLREHEDRVTHLGHQLDNLQRDLKTRECSQKQLREEVMRIEREITEAVAKSGKGTECELRKLLEEVSPKNFERMNMLLAVKDEEIAKLKDDVKLMSAHWKLKTKELESQLERQRRADQELKKKVLKLEFCLQEARSQTRKLQRAGERRDKAIKELSDQITGKQLNESVSGEKQNFWDTSGFKIVVSMSMLILVIISKR

SEQ ID NO: 3903 - protein, 271 aa, Arabidopsis thaliana
  peptide (1)..(271): Ceres Seq. ID no. 13574969
  misc_feature (1)..(255): Pfam Name: Pfam Description:  Myosin tail
  misc_feature (1)..(271): NCBI GI NO: 18421042 NR Description: expressed protein [Arabidopsis thaliana]
  misc_feature (1)..(262): NCBI GI NO: 7485248 NR Description: hypothetical protein A_IG002P16
  misc_feature (1)..(271): NCBI GI NO: 18397379 NR Description: expressed protein [Arabidopsis thaliana]
  misc_feature (1)..(271): NCBI GI NO: 4097950 NR Description: plant IF-like protein [Arabidopsis thaliana]
  misc_feature (1)..(271): NCBI GI NO: 22329439 NR Description: hypothetical protein [Arabidopsis thaliana]
  misc_feature (1)..(216): NCBI GI NO: 25402551 NR Description: hypothetical protein
  misc_feature (168)..(261): NCBI GI NO: 22329441 NR Description: myosin heavy chain -related [Arabidopsis thaliana]
  misc_feature (18)..(271): NCBI GI NO: 34894370 NR Description: unnamed protein product
  misc_feature (1)..(255): NCBI GI NO: 4249699 NR Description: myosin heavy chain [Rana catesbeiana]
  misc_feature (1)..(246): NCBI GI NO: 1335313 NR Description: translated region (partial) [Homo sapiens]
MEMEICKLQKKLEDRNCELVASTSAAEKFLEEVDDLRSQLALTKDIAETSAASAQSAQLQCSVLTEQLDDKTRSLREHEDRVTHLGHQLDNLQRDLKTRECSQKQLREEVMRIEREITEAVAKSGKGTECELRKLLEEVSPKNFERMNMLLAVKDEEIAKLKDDVKLMSAHWKLKTKELESQLERQRRADQELKKKVLKLEFCLQEARSQTRKLQRAGERRDKAIKELSDQITGKQLNESVSGEKQNFWDTSGFKIVVSMSMLILVIISKR

SEQ ID NO: 3904 - DNA, 596 bp, Arabidopsis thaliana
  misc_feature (1)..(596): Ceres Seq. ID no. 12422420
atcacttacttaacatactaagagagttattagatcttgaaaaacatggcttccaaggctttgattctgttgggtctcttcgcaattcttctggtggtctccgaagtttctgccgcaaggcagtcgggcatggtgaagccagagagtgaggaaactgtgcaacctgaaggttatcacggaggacatggtggtcacggagggggaggccactacggaggaggaggccacgggcatggaggacacaacggaggagggggccacggacttaacggatacggaggaggacatggaggacactacggaggaggaggaggacactacggaggaggaggaggccacggtggtggtggacactatggaggtggaggacaccatggaggaggaggtcacgggctgaacgaacctgttcagacgaagccgggtgtttaaaagttataactatcaaataaattcaccatgcataattgcatctctatatacacttatgtcttatatgtatccatcaaaataaaccatggtgagtttgtaatgcagttccttcagaaatgtgtggaataatgtttcacaataataatagaatatctctgttgattctg

SEQ ID NO: 3905 - protein, 127 aa, Arabidopsis thaliana
  peptide (1)..(127): Ceres Seq. ID no. 12422421
  misc_feature (42)..(126): Pfam Name: LMP1 Pfam Description: Herpesvirus latent membrane protein 1
  misc_feature (1)..(127): NCBI GI NO: 15224547 NR Description: putative glycine-rich protein
  misc_feature (1)..(127): NCBI GI NO: 15224540 NR Description: putative glycine-rich protein
  misc_feature (1)..(127): NCBI GI NO: 21536606 NR Description: putative glycine-rich protein
  misc_feature (1)..(127): NCBI GI NO: 30678191 NR Description: glycine-rich protein [Arabidopsis thaliana]
  misc_feature (1)..(127): NCBI GI NO: 9957568 NR Description: antimicrobial peptide shep-GRP
  misc_feature (1)..(116): NCBI GI NO: 15224548 NR Description: putative glycine-rich protein
  misc_feature (4)..(116): NCBI GI NO: 7488799 NR Description: dormancy-associated protein 2 - garden pea
  misc_feature (1)..(114): NCBI GI NO: 259447 NR Description: glycine-rich protein; atGRP [Arabidopsis thaliana]
  misc_feature (1)..(114): NCBI GI NO: 81625 NR Description: glycine-rich protein 3 precursor
  misc_feature (1)..(126): NCBI GI NO: 18266043 NR Description: glycine-rich protein [Brassica oleracea]
MASKALILLGLFAILLVVSEVSAARQSGMVKPESEETVQPEGYHGGHGGHGGGGHYGGGGHGHGGHNGGGGHGLNGYGGGHGGHYGGGGGHYGGGGGHGGGGHYGGGGHHGGGGHGLNEPVQTKPGV

SEQ ID NO: 3906 - protein, 99 aa, Arabidopsis thaliana
  peptide (1)..(99): Ceres Seq. ID no. 12422422
  misc_feature (14)..(98): Pfam Name: LMP1 Pfam Description: Herpesvirus latent membrane protein 1
  misc_feature (1)..(99): NCBI GI NO: 15224547 NR Description: putative glycine-rich protein
  misc_feature (1)..(99): NCBI GI NO: 15224540 NR Description: putative glycine-rich protein
  misc_feature (1)..(99): NCBI GI NO: 21536606 NR Description: putative glycine-rich protein
  misc_feature (1)..(99): NCBI GI NO: 30678191 NR Description: glycine-rich protein [Arabidopsis thaliana]
  misc_feature (1)..(99): NCBI GI NO: 9957568 NR Description: antimicrobial peptide shep-GRP
  misc_feature (1)..(88): NCBI GI NO: 15224548 NR Description: putative glycine-rich protein
  misc_feature (1)..(88): NCBI GI NO: 7488799 NR Description: dormancy-associated protein 2 - garden pea
  misc_feature (1)..(86): NCBI GI NO: 259447 NR Description: glycine-rich protein; atGRP [Arabidopsis thaliana]
  misc_feature (1)..(86): NCBI GI NO: 81625 NR Description: glycine-rich protein 3 precursor
  misc_feature (1)..(98): NCBI GI NO: 18266043 NR Description: glycine-rich protein [Brassica oleracea]
MVKPESEETVQPEGYHGGHGGHGGGGHYGGGGHGHGGHNGGGGHGLNGYGGGHGGHYGGGGGHYGGGGGHGGGGHYGGGGHHGGGGHGLNEPVQTKPGV

SEQ ID NO: 3907 - protein, 70 aa, Arabidopsis thaliana
  peptide (1)..(70): Ceres Seq. ID no. 12422423
  misc_feature (1)..(64): Pfam Name: Pfam Description:  ELM2 domain
MVVTEGEATTEEEATGMEDTTEEGATDLTDTEEDMEDTTEEEEDTTEEEEATVVVDTMEVEDTMEEEVTG

SEQ ID NO: 3908 - DNA, 1248 bp, Arabidopsis thaliana
  misc_feature (1)..(1248): Ceres Seq. ID no. 13492921
accaactcctctaataagcttcttctttctatccctcacttttacaaacaaagggagaccaaaaatgggtctaagcaaaactattcccttagtgttactcccgattttgatgtttggggttttgagtaacgctcagcttacctctgatttttactccacgacatgccctaacgtcacagccattgctcggggactgatcgagcgagcaagccgtaacgacgtcagactcactgctaaagtcatgcgtcttcactttcatgactgtttcgtgaacgggtgcgatggttcggtactattggacgctgctccagcggatggggtagagggtgaaaaggaggctttccaaaacgcgggttctcttgatggattcgaagtgatcgatgatatcaaaaccgccctcgagaatgtttgtcccggagttgtctcttgtgctgatatcctcgctatcgcagctgaaatctctgttgcactggcgggagggccgtcattggacgtattgctaggaaggagagatggccggacagcgatccgtgcggacgcagtggctgcacttccactaggacctgattctctcgagattcttacttccaaattctccgtacataatcttgacactaccgatctcgtcgctttatctggtgctcataccttcgggagggttcagtgtggagtgataaacaatcgtctacacaactttagtggtaacagcggacagtccgacccaagtatcgaaccggagttcttgcaaacgttacgacgacaatgcccgcaaggcggagatctcaccgcaagggcgaatcttgatcctacgagccccgactcatttgataacgactatttcaagaaccttcaaaacaaccgcggagtgattgaatcagatcaaatcttgttctcttcgacaggagcgcctactgtgtctttggtgaatcgttttgctgagaaccaaaatgagttctttacaaattttgcgagatcaatgatcaagatgggaaatgtgaggattctcacaggacgtgagggagagatacgtagagactacagacgcgtcaattaataagttttgcatggttaaatgatcaaacgtaacttattgttattcatgaaataagtgttctttagtttgtgcttctccacaattaattgtttttcttcttttgattttatttactgttaagcatgccattgttacttgtaattgtaaatcttatataatatttttctttttgaaaaaatccactatcatgtctg

SEQ ID NO: 3909 - protein, 350 aa, Arabidopsis thaliana
  peptide (1)..(350): Ceres Seq. ID no. 13492922
  misc_feature (62)..(314): Pfam Name: Pfam Description:  Peroxidase
  misc_feature (22)..(350): NCBI GI NO: 26451205 NR Description: putative peroxidase [Arabidopsis thaliana]
  misc_feature (22)..(350): NCBI GI NO: 15241208 NR Description: peroxidase, putative [Arabidopsis thaliana]
  misc_feature (22)..(350): NCBI GI NO: 21536505 NR Description: peroxidase [Arabidopsis thaliana]
  misc_feature (29)..(350): NCBI GI NO: 421924 NR Description: peroxidase (EC 1.11.1.7) - tomato
  misc_feature (29)..(350): NCBI GI NO: 6723685 NR Description: peroxidase [Lycopersicon esculentum]
  misc_feature (22)..(350): NCBI GI NO: 7433042 NR Description: peroxidase (EC 1.11.1.7) - common tobacco
  misc_feature (24)..(350): NCBI GI NO: 478389 NR Description: peroxidase (EC 1
  misc_feature (33)..(350): NCBI GI NO: 8546851 NR Description: peroxidase [Ipomoea batatas]
  misc_feature (22)..(350): NCBI GI NO: 18072039 NR Description: anionic peroxidase [Nicotiana tomentosiformis]
  misc_feature (28)..(350): NCBI GI NO: 21593262 NR Description: peroxidase [Arabidopsis thaliana]
PTPLISFFFLSLTFTNKGRPKMGLSKTIPLVLLPILMFGVLSNAQLTSDFYSTTCPNVTAIARGLIERASRNDVRLTAKVMRLHFHDCFVNGCDGSVLLDAAPADGVEGEKEAFQNAGSLDGFEVIDDIKTALENVCPGVVSCADILAIAAEISVALAGGPSLDVLLGRRDGRTAIRADAVAALPLGPDSLEILTSKFSVHNLDTTDLVALSGAHTFGRVQCGVINNRLHNFSGNSGQSDPSIEPEFLQTLRRQCPQGGDLTARANLDPTSPDSFDNDYFKNLQNNRGVIESDQILFSSTGAPTVSLVNRFAENQNEFFTNFARSMIKMGNVRILTGREGEIRRDYRRVN

SEQ ID NO: 3910 - protein, 329 aa, Arabidopsis thaliana
  peptide (1)..(329): Ceres Seq. ID no. 13492923
  misc_feature (41)..(293): Pfam Name: Pfam Description:  Peroxidase
  misc_feature (1)..(329): NCBI GI NO: 26451205 NR Description: putative peroxidase [Arabidopsis thaliana]
  misc_feature (1)..(329): NCBI GI NO: 15241208 NR Description: peroxidase, putative [Arabidopsis thaliana]
  misc_feature (1)..(329): NCBI GI NO: 21536505 NR Description: peroxidase [Arabidopsis thaliana]
  misc_feature (8)..(329): NCBI GI NO: 421924 NR Description: peroxidase (EC 1.11.1.7) - tomato
  misc_feature (8)..(329): NCBI GI NO: 6723685 NR Description: peroxidase [Lycopersicon esculentum]
  misc_feature (1)..(329): NCBI GI NO: 7433042 NR Description: peroxidase (EC 1.11.1.7) - common tobacco
  misc_feature (3)..(329): NCBI GI NO: 478389 NR Description: peroxidase (EC 1
  misc_feature (12)..(329): NCBI GI NO: 8546851 NR Description: peroxidase [Ipomoea batatas]
  misc_feature (1)..(329): NCBI GI NO: 18072039 NR Description: anionic peroxidase [Nicotiana tomentosiformis]
  misc_feature (7)..(329): NCBI GI NO: 21593262 NR Description: peroxidase [Arabidopsis thaliana]
MGLSKTIPLVLLPILMFGVLSNAQLTSDFYSTTCPNVTAIARGLIERASRNDVRLTAKVMRLHFHDCFVNGCDGSVLLDAAPADGVEGEKEAFQNAGSLDGFEVIDDIKTALENVCPGVVSCADILAIAAEISVALAGGPSLDVLLGRRDGRTAIRADAVAALPLGPDSLEILTSKFSVHNLDTTDLVALSGAHTFGRVQCGVINNRLHNFSGNSGQSDPSIEPEFLQTLRRQCPQGGDLTARANLDPTSPDSFDNDYFKNLQNNRGVIESDQILFSSTGAPTVSLVNRFAENQNEFFTNFARSMIKMGNVRILTGREGEIRRDYRRVN

SEQ ID NO: 3911 - protein, 314 aa, Arabidopsis thaliana
  peptide (1)..(314): Ceres Seq. ID no. 13492924
  misc_feature (26)..(278): Pfam Name: Pfam Description:  Peroxidase
  misc_feature (1)..(314): NCBI GI NO: 26451205 NR Description: putative peroxidase [Arabidopsis thaliana]
  misc_feature (1)..(314): NCBI GI NO: 15241208 NR Description: peroxidase, putative [Arabidopsis thaliana]
  misc_feature (1)..(314): NCBI GI NO: 21536505 NR Description: peroxidase [Arabidopsis thaliana]
  misc_feature (1)..(314): NCBI GI NO: 421924 NR Description: peroxidase (EC 1.11.1.7) - tomato
  misc_feature (1)..(314): NCBI GI NO: 6723685 NR Description: peroxidase [Lycopersicon esculentum]
  misc_feature (1)..(314): NCBI GI NO: 7433042 NR Description: peroxidase (EC 1.11.1.7) - common tobacco
  misc_feature (1)..(314): NCBI GI NO: 478389 NR Description: peroxidase (EC 1
  misc_feature (1)..(314): NCBI GI NO: 8546851 NR Description: peroxidase [Ipomoea batatas]
  misc_feature (1)..(314): NCBI GI NO: 18072039 NR Description: anionic peroxidase [Nicotiana tomentosiformis]
  misc_feature (1)..(314): NCBI GI NO: 21593262 NR Description: peroxidase [Arabidopsis thaliana]
MFGVLSNAQLTSDFYSTTCPNVTAIARGLIERASRNDVRLTAKVMRLHFHDCFVNGCDGSVLLDAAPADGVEGEKEAFQNAGSLDGFEVIDDIKTALENVCPGVVSCADILAIAAEISVALAGGPSLDVLLGRRDGRTAIRADAVAALPLGPDSLEILTSKFSVHNLDTTDLVALSGAHTFGRVQCGVINNRLHNFSGNSGQSDPSIEPEFLQTLRRQCPQGGDLTARANLDPTSPDSFDNDYFKNLQNNRGVIESDQILFSSTGAPTVSLVNRFAENQNEFFTNFARSMIKMGNVRILTGREGEIRRDYRRVN

SEQ ID NO: 3912 - DNA, 1401 bp, Arabidopsis thaliana
  misc_feature (1)..(1401): Ceres Seq. ID no. 12482593
agaagaagtagacgatgttggaagaacaatagaggaagagactgtgtttgaaaaaagagaaagaggagaggaagctgaaacattgactccatgggagcaacactccagcatcataagcatccctcgattcggctacaaagctccctcttctctgcttcatcattctcattccggattcctcgtcacctgcaacatcaaaagggagaaaagtgctactaaagaggtcatgtccatccttggaaaggtatcgtcacaattctccatcattagtgaggcaaaagtttggatttttgttccttcatttagaagataactcagagtgattgataaccaattgtggtagagaaacactatatttgaaacgaaagtgattataagtgcagtggtgggggttctctaatgttcagcttgtctcacggaaatcaaacttttgatttgttcagtatattgggtccatgcatgaggagaaacctgaagttctaaactctactgcatccaaaaaacaaaaagtttgtgcacaagagacagaggaaggcggagagaagactgtacctcttgagaatgatgccttgcaggaaacaggtgaaaatccaaatgttgaggatcttaaattagcaaatgaagaacacaattctctcatgtcattggttaagctaacaaagagtggcttgcttctctttactttccctgttgaaaactctcccaatacaacgaatatcgtatcacgagtcttccagtctatggaatctggagctttgaaggcaccaatctggtgccatcggatattcccagttcaagctacttgtggtttgacagagaaagaacttcgggaaacagtatcaaagcttgttcagcggtttgtcaatgataaagacaatacactatcaaaacctgtgaagtttgcagctgggtatcaacgtagaggtgcggaggagacgaaaggaaagattcggaaagacgcttcagatgttctagttcaatgtccgttgctggaccgcattaaatgctttgaaactgtggcagctggagtgaaagacattgtaccagattcagttgtggatctcaaatctccagagttatgtgttctggtggaactgttaccgctctctagaatatcaagtggctcctttgtagctgctgtttcagtgcttccacatagactcgttagcacaaagccgaaactctgcatcaagcctctagtccctgaatccaaacacaaaaagggaccaaactgacaggtgcaaaggctgatcgctgcattcgattttcgagagccaaagatatcaatagaagttgtaatctctctgtttttgtttagatatgtcttttgctttcagtatctctaatggagttaacaacaatgtctgacctatgttattcaagagaacaaagataaaccct

SEQ ID NO: 3913 - protein, 259 aa, Arabidopsis thaliana
  peptide (1)..(259): Ceres Seq. ID no. 12482594
  misc_feature (1)..(259): NCBI GI NO: 14334964 NR Description: unknown protein [Arabidopsis thaliana]
  misc_feature (1)..(259): NCBI GI NO: 24030215 NR Description: unknown protein [Arabidopsis thaliana]
  misc_feature (1)..(157): NCBI GI NO: 15220918 NR Description: hypothetical protein; protein id: At1g09290.1
  misc_feature (1)..(157): NCBI GI NO: 25372975 NR Description: hypothetical protein
MHEEKPEVLNSTASKKQKVCAQETEEGGEKTVPLENDALQETGENPNVEDLKLANEEHNSLMSLVKLTKSGLLLFTFPVENSPNTTNIVSRVFQSMESGALKAPIWCHRIFPVQATCGLTEKELRETVSKLVQRFVNDKDNTLSKPVKFAAGYQRRGAEETKGKIRKDASDVLVQCPLLDRIKCFETVAAGVKDIVPDSVVDLKSPELCVLVELLPLSRISSGSFVAAVSVLPHRLVSTKPKLCIKPLVPESKHKKGPN

SEQ ID NO: 3914 - protein, 198 aa, Arabidopsis thaliana
  peptide (1)..(198): Ceres Seq. ID no. 12482595
  misc_feature (1)..(198): NCBI GI NO: 14334964 NR Description: unknown protein [Arabidopsis thaliana]
  misc_feature (1)..(198): NCBI GI NO: 24030215 NR Description: unknown protein [Arabidopsis thaliana]
  misc_feature (1)..(96): NCBI GI NO: 15220918 NR Description: hypothetical protein; protein id: At1g09290.1
  misc_feature (1)..(96): NCBI GI NO: 25372975 NR Description: hypothetical protein
MSLVKLTKSGLLLFTFPVENSPNTTNIVSRVFQSMESGALKAPIWCHRIFPVQATCGLTEKELRETVSKLVQRFVNDKDNTLSKPVKFAAGYQRRGAEETKGKIRKDASDVLVQCPLLDRIKCFETVAAGVKDIVPDSVVDLKSPELCVLVELLPLSRISSGSFVAAVSVLPHRLVSTKPKLCIKPLVPESKHKKGPN

SEQ ID NO: 3915 - protein, 164 aa, Arabidopsis thaliana
  peptide (1)..(164): Ceres Seq. ID no. 12482596
  misc_feature (1)..(164): NCBI GI NO: 14334964 NR Description: unknown protein [Arabidopsis thaliana]
  misc_feature (1)..(164): NCBI GI NO: 24030215 NR Description: unknown protein [Arabidopsis thaliana]
  misc_feature (1)..(62): NCBI GI NO: 15220918 NR Description: hypothetical protein; protein id: At1g09290.1
  misc_feature (1)..(62): NCBI GI NO: 25372975 NR Description: hypothetical protein
MESGALKAPIWCHRIFPVQATCGLTEKELRETVSKLVQRFVNDKDNTLSKPVKFAAGYQRRGAEETKGKIRKDASDVLVQCPLLDRIKCFETVAAGVKDIVPDSVVDLKSPELCVLVELLPLSRISSGSFVAAVSVLPHRLVSTKPKLCIKPLVPESKHKKGPN

SEQ ID NO: 3916 - DNA, 1234 bp, Arabidopsis thaliana
  misc_feature (1)..(1234): Ceres Seq. ID no. 12562567
aagattgtcgctttagcttctccggtttttaagcaaagaagggtatatgagtttgttggagatgggtggagatatgatggaagatgattgggaatttgcgtcatcatcaaaccctaaaagaaccctagttcttgtgggccgtactggaaacggaaagagtgcgacaggtaacagtatccttgggaggaaagcttttaggtcaagagctagaactgtaggagtgacaagcacgtgcgagtcacagagagttgttcaagaagatggtgatatcattaatgttgttgatactcctggtttgtttgatttgtctactgcagctgattttattggtaaagagattgtgaggtgtataagtttggcagaagatgggattcatgcgatcttgttggtattctctgtgaggcggcttgctgaagaggaacaaactgtgcttagtttcttgcaagcgttattcggcagtaagatcgctgactatatgatcgttgtttttaccggtggtgatgagttggaagagaatgaggagacattggaggagtatttggctgactattgccctgagtttcttaaagaaattcttgggatatgtgacaatcggttggtgttgtttaataacaagactactgataatgtcaaaaaggctgagcaagttcagaagcttctctcgcttgttgaatctgttgtcaaacagaacaatggaaaaccgtattcagatgagttgttccatgagctacaggaagaggctatcaagctaagggaccagaaaaaggaggttgagttacttcagggttactctaataatgagatagatgagttcaagaagcaaatcgatatgtcctatgacaggcagcttagccgcatcaccgagatggtggagactaagctgagagacactgctaagagactagagcagcaactaggtgaagagcaagctgcaagacttgaagcggagaagagggcaaacgaagttcagaagcggtcaagcgatgagattaagaaactcagagagaatctggagagggcggagaaagagacgaaggaactccagaagaaactgggaaagtgcatcaatctatgatatattgagatgttgtagctccagtgaaatctgataagattattcatgtcaagttttttatgtagtttattttttcttttggttttttaacaatatggttttattaaagacagtgtgttataaggtttgcttaaatcatactaccccttaaatcttccc

SEQ ID NO: 3917 - protein, 342 aa, Arabidopsis thaliana
  peptide (1)..(342): Ceres Seq. ID no. 12562568
  misc_feature (25)..(239): Pfam Name: Pfam Description:  AIG1 family
  misc_feature (1)..(342): NCBI GI NO: 18399081 NR Description: expressed protein; protein id: At1g33970
  misc_feature (6)..(342): NCBI GI NO: 25373414 NR Description: hypothetical protein F12G12
  misc_feature (6)..(342): NCBI GI NO: 24417378 NR Description: unknown [Arabidopsis thaliana]
  misc_feature (49)..(342): NCBI GI NO: 12324509 NR Description: AIG1-like protein, 5' partial; 1-1205
  misc_feature (5)..(333): NCBI GI NO: 4097585 NR Description: NTGP4 [Nicotiana tabacum]
  misc_feature (8)..(330): NCBI GI NO: 15234855 NR Description: AIG1-like protein; protein id: At4g09940.1
  misc_feature (11)..(338): NCBI GI NO: 15234871 NR Description: AIG1-like protein; protein id: At4g09950.1
  misc_feature (16)..(335): NCBI GI NO: 15217731 NR Description: AIG1; protein id: At1g33960
  misc_feature (16)..(335): NCBI GI NO: 10092442 NR Description: disease resistance protein AIG1; 916-2572
  misc_feature (11)..(314): NCBI GI NO: 15217719 NR Description: AIG1-like protein; protein id: At1g33900.1
MSLLEMGGDMMEDDWEFASSSNPKRTLVLVGRTGNGKSATGNSILGRKAFRSRARTVGVTSTCESQRVVQEDGDIINVVDTPGLFDLSTAADFIGKEIVRCISLAEDGIHAILLVFSVRRLAEEEQTVLSFLQALFGSKIADYMIVVFTGGDELEENEETLEEYLADYCPEFLKEILGICDNRLVLFNNKTTDNVKKAEQVQKLLSLVESVVKQNNGKPYSDELFHELQEEAIKLRDQKKEVELLQGYSNNEIDEFKKQIDMSYDRQLSRITEMVETKLRDTAKRLEQQLGEEQAARLEAEKRANEVQKRSSDEIKKLRENLERAEKETKELQKKLGKCINL

SEQ ID NO: 3918 - protein, 337 aa, Arabidopsis thaliana
  peptide (1)..(337): Ceres Seq. ID no. 12562569
  misc_feature (20)..(234): Pfam Name: Pfam Description:  AIG1 family
  misc_feature (1)..(337): NCBI GI NO: 18399081 NR Description: expressed protein; protein id: At1g33970
  misc_feature (1)..(337): NCBI GI NO: 25373414 NR Description: hypothetical protein F12G12
  misc_feature (1)..(337): NCBI GI NO: 24417378 NR Description: unknown [Arabidopsis thaliana]
  misc_feature (44)..(337): NCBI GI NO: 12324509 NR Description: AIG1-like protein, 5' partial; 1-1205
  misc_feature (1)..(328): NCBI GI NO: 4097585 NR Description: NTGP4 [Nicotiana tabacum]
  misc_feature (3)..(325): NCBI GI NO: 15234855 NR Description: AIG1-like protein; protein id: At4g09940.1
  misc_feature (6)..(333): NCBI GI NO: 15234871 NR Description: AIG1-like protein; protein id: At4g09950.1
  misc_feature (11)..(330): NCBI GI NO: 15217731 NR Description: AIG1; protein id: At1g33960
  misc_feature (11)..(330): NCBI GI NO: 10092442 NR Description: disease resistance protein AIG1; 916-2572
  misc_feature (6)..(309): NCBI GI NO: 15217719 NR Description: AIG1-like protein; protein id: At1g33900.1
MGGDMMEDDWEFASSSNPKRTLVLVGRTGNGKSATGNSILGRKAFRSRARTVGVTSTCESQRVVQEDGDIINVVDTPGLFDLSTAADFIGKEIVRCISLAEDGIHAILLVFSVRRLAEEEQTVLSFLQALFGSKIADYMIVVFTGGDELEENEETLEEYLADYCPEFLKEILGICDNRLVLFNNKTTDNVKKAEQVQKLLSLVESVVKQNNGKPYSDELFHELQEEAIKLRDQKKEVELLQGYSNNEIDEFKKQIDMSYDRQLSRITEMVETKLRDTAKRLEQQLGEEQAARLEAEKRANEVQKRSSDEIKKLRENLERAEKETKELQKKLGKCINL

SEQ ID NO: 3919 - protein, 333 aa, Arabidopsis thaliana
  peptide (1)..(333): Ceres Seq. ID no. 12562570
  misc_feature (16)..(230): Pfam Name: Pfam Description:  AIG1 family
  misc_feature (1)..(333): NCBI GI NO: 18399081 NR Description: expressed protein; protein id: At1g33970
  misc_feature (1)..(333): NCBI GI NO: 25373414 NR Description: hypothetical protein F12G12
  misc_feature (1)..(333): NCBI GI NO: 24417378 NR Description: unknown [Arabidopsis thaliana]
  misc_feature (40)..(333): NCBI GI NO: 12324509 NR Description: AIG1-like protein, 5' partial; 1-1205
  misc_feature (1)..(324): NCBI GI NO: 4097585 NR Description: NTGP4 [Nicotiana tabacum]
  misc_feature (1)..(321): NCBI GI NO: 15234855 NR Description: AIG1-like protein; protein id: At4g09940.1
  misc_feature (2)..(329): NCBI GI NO: 15234871 NR Description: AIG1-like protein; protein id: At4g09950.1
  misc_feature (7)..(326): NCBI GI NO: 15217731 NR Description: AIG1; protein id: At1g33960
  misc_feature (7)..(326): NCBI GI NO: 10092442 NR Description: disease resistance protein AIG1; 916-2572
  misc_feature (2)..(305): NCBI GI NO: 15217719 NR Description: AIG1-like protein; protein id: At1g33900.1
MMEDDWEFASSSNPKRTLVLVGRTGNGKSATGNSILGRKAFRSRARTVGVTSTCESQRVVQEDGDIINVVDTPGLFDLSTAADFIGKEIVRCISLAEDGIHAILLVFSVRRLAEEEQTVLSFLQALFGSKIADYMIVVFTGGDELEENEETLEEYLADYCPEFLKEILGICDNRLVLFNNKTTDNVKKAEQVQKLLSLVESVVKQNNGKPYSDELFHELQEEAIKLRDQKKEVELLQGYSNNEIDEFKKQIDMSYDRQLSRITEMVETKLRDTAKRLEQQLGEEQAARLEAEKRANEVQKRSSDEIKKLRENLERAEKETKELQKKLGKCINL

SEQ ID NO: 3920 - DNA, 1204 bp, Arabidopsis thaliana
  misc_feature (1)..(1204): Ceres Seq. ID no. 12371447
atttttgccctctcccatttttgtcgccgaaaccctaaatctcgacctcaaaccctgaaccatggctgaaggactcgtgttgaaaggcacaatgtgtgcccacactgatatggtcaccgccattgctacaccggtcgataactccgacgtgattgtaacttcgtcgcgtgacaaatcaatcatcctctggaaactcacaaaggaagacaagtcatacggtgttgctcagcggaggatgactggtcactctcacttcgttcaagacgttgttctctcctccgatggacaattcgctctctccggatcttgggacggtgagcttcgtctctgggatctcgctaccggagaatctactcgtcgtttcgttggtcacacgaaagatgttctctctgttgctttctctaccgataaccgtcagatcgtctctgcttctcgtgatcgtacgattaagctttggaacacgcttggtgagtgtaagtataccatctctgaagctgatggtcacaaggaatgggttagttgtgttaggtttagtcctaatactcttgtgccaactattgtatctgcttcttgggataaaactgtgaaggtctggaatcttcagaattgtaagcttaggaacactcttgctggtcactctggttacttgaacactgtggctgtgtcacctgatggttcgttgtgtgccagtggtggcaaagatggtgtgatcttgctttgggatttggctgaagggaagaagttgtattctcttgaagctggctctattattcattcactttgcttcagtcccaataggtactggttgtgtgcagcaacagagaatagcattaggatttgggatctcgagagtaagtctgttgttgaggatttgaaggttgatcttaaggctgaggctgaaaagactgatggttctactggaatcggaaacaagaccaaggtgatctactgcacaagcttgaactggagtgcagatggaaacactttgttcagtggatacactgatggagttatcagggtttggggtattggtcgttactagagagacaagaagtttctttattctctccaaatttttccatcgactctaaagtcttctcttctgaattagtgttttgaggatttattttttgttcttttctattttcagaatccacaaatgtgatattttgatacattgattttgtttcatatttgttttctt

SEQ ID NO: 3921 - protein, 326 aa, Arabidopsis thaliana [sequence omitted]

SEQ ID NO: 3922 - protein, 316 aa, Arabidopsis thaliana
  peptide (1)..(316): Ceres Seq. ID no. 12371449
  misc_feature (1)..(316): NCBI GI NO: 15221916 NR Description: guanine nucleotide-binding protein, putative
  misc_feature (1)..(316): NCBI GI NO: 21593440 NR Description: guanine nucleotide-binding protein, putative
  misc_feature (1)..(316): NCBI GI NO: 15229589 NR Description: protein kinase C-receptor/G-protein, putative
  misc_feature (1)..(316): NCBI GI NO: 15220941 NR Description: G-protein beta family; protein id: At1g18080
  misc_feature (1)..(316): NCBI GI NO: 2289095 NR Description: WD-40 repeat protein [Arabidopsis thaliana]
  misc_feature (1)..(316): NCBI GI NO: 3023857 NR Description: GUANINE NUCLEOTIDE-BINDING PROTEIN BETA SUBUNIT-LIKEPROTEIN
  misc_feature (1)..(316): NCBI GI NO: 3023858 NR Description: GUANINE NUCLEOTIDE-BINDING PROTEIN BETA SUBUNIT-LIKEPROTEIN
  misc_feature (1)..(316): NCBI GI NO: 3023847 NR Description: GUANINE NUCLEOTIDE-BINDING PROTEIN BETA SUBUNIT-LIKEPROTEIN
  misc_feature (1)..(316): NCBI GI NO: 7446126 NR Description: GTP-binding protein beta chain homolog
  misc_feature (1)..(316): NCBI GI NO: 4589834 NR Description: LeArcA1 protein [Lycopersicon esculentum]
MCAHTDMVTAIATPVDNSDVIVTSSRDKSIILWKLTKEDKSYGVAQRRMTGHSHFVQDVVLSSDGQFALSGSWDGELRLWDLATGESTRRFVGHTKDVLSVAFSTDNRQIVSASRDRTIKLWNTLGECKYTISEADGHKEWVSCVRFSPNTLVPTIVSASWDKTVKVWNLQNCKLRNTLAGHSGYLNTVAVSPDGSLCASGGKDGVILLWDLAEGKKLYSLEAGSIIHSLCFSPNRYWLCAATENSIRIWDLESKSVVEDLKVDLKAEAEKTDGSTGIGNKTKVIYCTSLNWSADGNTLFSGYTDGVIRVWGIGRY

SEQ ID NO: 3923 - protein, 310 aa, Arabidopsis thaliana
  peptide (1)..(310): Ceres Seq. ID no. 12371450
  misc_feature (1)..(310): NCBI GI NO: 15221916 NR Description: guanine nucleotide-binding protein, putative
  misc_feature (1)..(310): NCBI GI NO: 21593440 NR Description: guanine nucleotide-binding protein, putative
  misc_feature (1)..(310): NCBI GI NO: 15229589 NR Description: protein kinase C-receptor/G-protein, putative
  misc_feature (1)..(310): NCBI GI NO: 15220941 NR Description: G-protein beta family; protein id: At1g18080
  misc_feature (1)..(310): NCBI GI NO: 2289095 NR Description: WD-40 repeat protein [Arabidopsis thaliana]
  misc_feature (1)..(310): NCBI GI NO: 3023857 NR Description: GUANINE NUCLEOTIDE-BINDING PROTEIN BETA SUBUNIT-LIKEPROTEIN
  misc_feature (1)..(310): NCBI GI NO: 3023858 NR Description: GUANINE NUCLEOTIDE-BINDING PROTEIN BETA SUBUNIT-LIKEPROTEIN
  misc_feature (1)..(310): NCBI GI NO: 3023847 NR Description: GUANINE NUCLEOTIDE-BINDING PROTEIN BETA SUBUNIT-LIKEPROTEIN
  misc_feature (1)..(310): NCBI GI NO: 7446126 NR Description: GTP-binding protein beta chain homolog
  misc_feature (1)..(310): NCBI GI NO: 4589834 NR Description: LeArcA1 protein [Lycopersicon esculentum]
MVTAIATPVDNSDVIVTSSRDKSIILWKLTKEDKSYGVAQRRMTGHSHFVQDVVLSSDGQFALSGSWDGELRLWDLATGESTRRFVGHTKDVLSVAFSTDNRQIVSASRDRTIKLWNTLGECKYTISEADGHKEWVSCVRFSPNTLVPTIVSASWDKTVKVWNLQNCKLRNTLAGHSGYLNTVAVSPDGSLCASGGKDGVILLWDLAEGKKLYSLEAGSIIHSLCFSPNRYWLCAATENSIRIWDLESKSVVEDLKVDLKAEAEKTDGSTGIGNKTKVIYCTSLNWSADGNTLFSGYTDGVIRVWGIGRY

SEQ ID NO: 3924 - DNA, 1164 bp, Arabidopsis thaliana
  misc_feature (1)..(1164): Ceres Seq. ID no. 12395652
cagattctttcgaatccggagtttcttgctgaaggaactgctatcgctgatctttttaaccctgaccgtgttttgatcggagggcgagaaacacctgaaggattcaaagctgttcagacacttaaagaggtttatgctaattgggttcctgaaggtcagatcatcacaactaatctctggtctgctgagctttctaagctagctgcaaatgctttcttggctcagaggatttcatcagtcaatgccatgtctgctctttgtgaatccactggtgctgatgttactcaagtgtcttacgctgttggtactgattcaagaatcggttccaaattcttgaacgctagtgttggatttggcggttcttgtttccagaaggacattctgaatcttgtctacatctgtcaatcaacggacttccagaagtggcggaatactggaaacaagtgatcaagatcaacgattaccaaaagaaccggttcgtgaacagaatcgtgtcctctatgttcaacactgtctccaacaagaaggttgcgattcttggattcgcattcaagaaagacactggtgacacaagggaaacacctgccattgatgtgtgtaaaggtctattaggagacaaagcacagatcagtatctatgatcctcaagtcacagaggaacatattcagagagatctctcgatgaaaaagttcgactgggaccatcctcttcacttgcagccaatgagtccaaccacagtgaaacaagtgagtgtgacttgggacgcatatgaagctacaaaagacgcacacgcggtttgcgttttgactgagtgggacgagtttaagtcgttagattaccagaagatcttcgacaacatgcagaaaccggcttttatcttcgacggaagaaacattatgaatgttaacaagttaagagagattggtttcattgtttactccattggtaagccacttgacccatggctcaaggacatgcctgcctttgtctaatcacaaggcaaaacctggttgattcttgtttcttactttcattgtttgtgcttttttgctttcgttttcatataaattttagtctcaagattcgatttgtgaagtcttgaagagttgtttcttacattttacaatgtgtttcttatgctaagctcttataattttgtgttcc

SEQ ID NO: 3925 - protein, 163 aa, Arabidopsis thaliana
  peptide (1)..(163): Ceres Seq. ID no. 12395653
  misc_feature (11)..(135): Pfam Name: Pfam Description:  UDP-glucose/GDP-mannose dehydrogenase family
  misc_feature (1)..(163): NCBI GI NO: 15241704 NR Description: UDP-glucose dehydrogenase-like protein
  misc_feature (1)..(163): NCBI GI NO: 30102540 NR Description: At5g39320 [Arabidopsis thaliana]
  misc_feature (1)..(161): NCBI GI NO: 21618158 NR Description: UDP-glucose dehydrogenase, putative
  misc_feature (1)..(161): NCBI GI NO: 15228687 NR Description: UDP-glucose dehydrogenase, putative
  misc_feature (1)..(161): NCBI GI NO: 15983404 NR Description: AT3g29360/MUO10_6 [Arabidopsis thaliana]
  misc_feature (1)..(161): NCBI GI NO: 6136119 NR Description: UDP-GLUCOSE 6-DEHYDROGENASE
  misc_feature (1)..(161): NCBI GI NO: 29028306 NR Description: UDP-glucose dehydrogenase [Colocasia esculenta]
  misc_feature (1)..(161): NCBI GI NO: 15242316 NR Description: UDP-glucose dehydrogenase-like protein
  misc_feature (1)..(161): NCBI GI NO: 13236672 NR Description: putative UDP-glucose dehydrogenase [Oryza sativa]
  misc_feature (1)..(161): NCBI GI NO: 6164591 NR Description: UDP-glucose dehydrogenase
MFNTVSNKKVAILGFAFKKDTGDTRETPAIDVCKGLLGDKAQISIYDPQVTEEHIQRDLSMKKFDWDHPLHLQPMSPTTVKQVSVTWDAYEATKDAHAVCVLTEWDEFKSLDYQKIFDNMQKPAFIFDGRNIMNVNKLREIGFIVYSIGKPLDPWLKDMPAFV

SEQ ID NO: 3926 - protein, 148 aa, Arabidopsis thaliana
  peptide (1)..(148): Ceres Seq. ID no. 12395654
  misc_feature (59)..(135): Pfam Name: Pfam Description:  UDP-glucose/GDP-mannose dehydrogenase family
  misc_feature (1)..(135): NCBI GI NO: 15241704 NR Description: UDP-glucose dehydrogenase-like protein
  misc_feature (1)..(135): NCBI GI NO: 30102540 NR Description: At5g39320 [Arabidopsis thaliana]
  misc_feature (1)..(135): NCBI GI NO: 21618158 NR Description: UDP-glucose dehydrogenase, putative
  misc_feature (1)..(135): NCBI GI NO: 15228687 NR Description: UDP-glucose dehydrogenase, putative
  misc_feature (1)..(135): NCBI GI NO: 15983404 NR Description: AT3g29360/MUO10_6 [Arabidopsis thaliana]
  misc_feature (1)..(135): NCBI GI NO: 6136119 NR Description: UDP-GLUCOSE 6-DEHYDROGENASE
  misc_feature (1)..(135): NCBI GI NO: 29028306 NR Description: UDP-glucose dehydrogenase [Colocasia esculenta]
  misc_feature (1)..(135): NCBI GI NO: 15242316 NR Description: UDP-glucose dehydrogenase-like protein
  misc_feature (1)..(135): NCBI GI NO: 13236672 NR Description: putative UDP-glucose dehydrogenase [Oryza sativa]
  misc_feature (1)..(135): NCBI GI NO: 6164591 NR Description: UDP-glucose dehydrogenase
QILSNPEFLAEGTAIADLFNPDRVLIGGRETPEGFKAVQTLKEVYANWVPEGQIITTNLWSAELSKLAANAFLAQRISSVNAMSALCESTGADVTQVSYAVGTDSRIGSKFLNASVGFGGSCFQKDILNLVYICQSTDFQKWRNTGNK

SEQ ID NO: 3927 - protein, 103 aa, Arabidopsis thaliana
  peptide (1)..(103): Ceres Seq. ID no. 12395655
  misc_feature (1)..(75): Pfam Name: Pfam Description:  UDP-glucose/GDP-mannose dehydrogenase family
  misc_feature (1)..(103): NCBI GI NO: 15241704 NR Description: UDP-glucose dehydrogenase-like protein
  misc_feature (1)..(103): NCBI GI NO: 30102540 NR Description: At5g39320 [Arabidopsis thaliana]
  misc_feature (1)..(101): NCBI GI NO: 21618158 NR Description: UDP-glucose dehydrogenase, putative
  misc_feature (1)..(101): NCBI GI NO: 15228687 NR Description: UDP-glucose dehydrogenase, putative
  misc_feature (1)..(101): NCBI GI NO: 15983404 NR Description: AT3g29360/MUO10_6 [Arabidopsis thaliana]
  misc_feature (1)..(101): NCBI GI NO: 6136119 NR Description: UDP-GLUCOSE 6-DEHYDROGENASE
  misc_feature (1)..(101): NCBI GI NO: 29028306 NR Description: UDP-glucose dehydrogenase [Colocasia esculenta]
  misc_feature (1)..(101): NCBI GI NO: 15242316 NR Description: UDP-glucose dehydrogenase-like protein
  misc_feature (1)..(101): NCBI GI NO: 13236672 NR Description: putative UDP-glucose dehydrogenase [Oryza sativa]
  misc_feature (1)..(101): NCBI GI NO: 6164591 NR Description: UDP-glucose dehydrogenase
MKKFDWDHPLHLQPMSPTTVKQVSVTWDAYEATKDAHAVCVLTEWDEFKSLDYQKIFDNMQKPAFIFDGRNIMNVNKLREIGFIVYSIGKPLDPWLKDMPAFV

SEQ ID NO: 3928 - DNA, 1378 bp, Arabidopsis thaliana
  misc_feature (1)..(1378): Ceres Seq. ID no. 12323175
attagtctttttcttcgtgagaccctttgaaacgaggacggaggaagtttcctttgaataatgcagcattttcaacatagaaaattctccaaacgcaacgcagaaatgacctctgctttctccaacgtcaaacttgtttagttttatctatgtcatctctctaattctcttgtaaatctcaataatacctcttcacttaatctttttaatatttttcttttggatggtgaggatttgtgttttcatggttttcttgttgttcttcgctccttctccagtctccgctggtttctatacaaactcctcagccattccgccgcagcttctccgaaacgccaccgggaacccctggaactcattcttgaatttcactggatgtcacgccggcaagaagtacgatggtctctatatgctcaaacaatattttcaacattttggctacatcaccgaaactaatctctccggaaacttcactgacgacttcgacgatattctcaagaacgccgtcgaaatgtaccagagaaacttccagctaaacgtcaccggagtactcgacgagctcactctcaaacacgttgtgatcccacgttgcggcaaccccgacgtagtcaacggcacctcaactatgcatagcggtaggaaaaccttcgaggtttccttcgccgggcggggacaacgcttccacgccgttaaacactactctttcttccccggagagccacggtggccgagaaatcgtcgtgatctaacctacgctttcgacccgcgaaacgcgttgaccgaagaggtcaagagcgtgttctcacgcgctttcactcgttgggaggaggtgactccactaacgttcacacgcgtggagaggttctcgacctctgacatcagcatcggattctactccggagagcacggagacggagaaccgttcgacggcccaatgagaacgctagcacatgcgttctcgcccccgacgggacacttccatctagacggagaagagaactggatcgtctccggcgaaggaggcgacggttttatctccgtgtctgaggctgttgatctagaatcggtggctgttcacgagattggacatcttctagggttaggccattcctcggtagaaggttcgatcatgtatccaaccatcaggacgggtaggcgtaaagttgatttaacgaccgatgacgtggaaggagtccaatatttgtacggtgcgaatcctaacttcaatggttctagatctccaccaccgtccactcaacaacgagacactggcgattctggtgctcctggtagaagcgacggttctagatcggttttgactaatctacttcagtattatttttggattatatttggattatttttgtatttagtgtag

SEQ ID NO: 3929 - protein, 384 aa, Arabidopsis thaliana
  peptide (1)..(384): Ceres Seq. ID no. 12323176
  misc_feature (161)..(265): Pfam Name: Pfam Description:  Matrixin
  misc_feature (1)..(384): NCBI GI NO: 30688744 NR Description: metallo proteinase -related [Arabidopsis thaliana]
  misc_feature (8)..(384): NCBI GI NO: 7488435 NR Description: zinc metalloproteinase homolog F3I6
  misc_feature (2)..(369): NCBI GI NO: 15223067 NR Description: matrix metalloproteinase, putative
  misc_feature (2)..(352): NCBI GI NO: 15218963 NR Description: metalloproteinase, putative; protein id: At1g59970
  misc_feature (37)..(383): NCBI GI NO: 15235820 NR Description: proteinase like protein; protein id: At4g16640
  misc_feature (37)..(383): NCBI GI NO: 28393482 NR Description: putative proteinase [Arabidopsis thaliana]
  misc_feature (37)..(383): NCBI GI NO: 21553383 NR Description: proteinase like protein [Arabidopsis thaliana]
  misc_feature (40)..(369): NCBI GI NO: 37536782 NR Description: putative metalloproteinase
  misc_feature (24)..(328): NCBI GI NO: 7159629 NR Description: matrix metalloproteinase [Cucumis sativus]
  misc_feature (88)..(373): NCBI GI NO: 15225398 NR Description: putative metalloproteinase; protein id: At2g45040
MVRICVFMVFLLFFAPSPVSAGFYTNSSAIPPQLLRNATGNPWNSFLNFTGCHAGKKYDGLYMLKQYFQHFGYITETNLSGNFTDDFDDILKNAVEMYQRNFQLNVTGVLDELTLKHVVIPRCGNPDVVNGTSTMHSGRKTFEVSFAGRGQRFHAVKHYSFFPGEPRWPRNRRDLTYAFDPRNALTEEVKSVFSRAFTRWEEVTPLTFTRVERFSTSDISIGFYSGEHGDGEPFDGPMRTLAHAFSPPTGHFHLDGEENWIVSGEGGDGFISVSEAVDLESVAVHEIGHLLGLGHSSVEGSIMYPTIRTGRRKVDLTTDDVEGVQYLYGANPNFNGSRSPPPSTQQRDTGDSGAPGRSDGSRSVLTNLLQYYFWIIFGLFLYLV

SEQ ID NO: 3930 - protein, 377 aa, Arabidopsis thaliana
  peptide (1)..(377): Ceres Seq. ID no. 12323177
  misc_feature (154)..(258): Pfam Name: Pfam Description:  Matrixin
  misc_feature (1)..(377): NCBI GI NO: 30688744 NR Description: metallo proteinase -related [Arabidopsis thaliana]
  misc_feature (1)..(377): NCBI GI NO: 7488435 NR Description: zinc metalloproteinase homolog F3I6
  misc_feature (1)..(362): NCBI GI NO: 15223067 NR Description: matrix metalloproteinase, putative
  misc_feature (1)..(345): NCBI GI NO: 15218963 NR Description: metalloproteinase, putative; protein id: At1g59970
  misc_feature (30)..(376): NCBI GI NO: 15235820 NR Description: proteinase like protein; protein id: At4g16640
  misc_feature (30)..(376): NCBI GI NO: 28393482 NR Description: putative proteinase [Arabidopsis thaliana]
  misc_feature (30)..(376): NCBI GI NO: 21553383 NR Description: proteinase like protein [Arabidopsis thaliana]
  misc_feature (33)..(362): NCBI GI NO: 37536782 NR Description: putative metalloproteinase
  misc_feature (17)..(321): NCBI GI NO: 7159629 NR Description: matrix metalloproteinase [Cucumis sativus]
  misc_feature (81)..(366): NCBI GI NO: 15225398 NR Description: putative metalloproteinase; protein id: At2g45040
MVFLLFFAPSPVSAGFYTNSSAIPPQLLRNATGNPWNSFLNFTGCHAGKKYDGLYMLKQYFQHFGYITETNLSGNFTDDFDDILKNAVEMYQRNFQLNVTGVLDELTLKHVVIPRCGNPDVVNGTSTMHSGRKTFEVSFAGRGQRFHAVKHYSFFPGEPRWPRNRRDLTYAFDPRNALTEEVKSVFSRAFTRWEEVTPLTFTRVERFSTSDISIGFYSGEHGDGEPFDGPMRTLAHAFSPPTGHFHLDGEENWIVSGEGGDGFISVSEAVDLESVAVHEIGHLLGLGHSSVEGSIMYPTIRTGRRKVDLTTDDVEGVQYLYGANPNFNGSRSPPPSTQQRDTGDSGAPGRSDGSRSVLTNLLQYYFWIIFGLFLYLV

SEQ ID NO: 3931 - protein, 322 aa, Arabidopsis thaliana
  peptide (1)..(322): Ceres Seq. ID no. 12323178
  misc_feature (99)..(203): Pfam Name: Pfam Description:  Matrixin
  misc_feature (1)..(322): NCBI GI NO: 30688744 NR Description: metallo proteinase -related [Arabidopsis thaliana]
  misc_feature (1)..(322): NCBI GI NO: 7488435 NR Description: zinc metalloproteinase homolog F3I6
  misc_feature (1)..(307): NCBI GI NO: 15223067 NR Description: matrix metalloproteinase, putative
  misc_feature (1)..(290): NCBI GI NO: 15218963 NR Description: metalloproteinase, putative; protein id: At1g59970
  misc_feature (1)..(321): NCBI GI NO: 15235820 NR Description: proteinase like protein; protein id: At4g16640
  misc_feature (1)..(321): NCBI GI NO: 28393482 NR Description: putative proteinase [Arabidopsis thaliana]
  misc_feature (1)..(321): NCBI GI NO: 21553383 NR Description: proteinase like protein [Arabidopsis thaliana]
  misc_feature (1)..(307): NCBI GI NO: 37536782 NR Description: putative metalloproteinase
  misc_feature (1)..(266): NCBI GI NO: 7159629 NR Description: matrix metalloproteinase [Cucumis sativus]
  misc_feature (26)..(311): NCBI GI NO: 15225398 NR Description: putative metalloproteinase; protein id: At2g45040
MLKQYFQHFGYITETNLSGNFTDDFDDILKNAVEMYQRNFQLNVTGVLDELTLKHVVIPRCGNPDVVNGTSTMHSGRKTFEVSFAGRGQRFHAVKHYSFFPGEPRWPRNRRDLTYAFDPRNALTEEVKSVFSRAFTRWEEVTPLTFTRVERFSTSDISIGFYSGEHGDGEPFDGPMRTLAHAFSPPTGHFHLDGEENWIVSGEGGDGFISVSEAVDLESVAVHEIGHLLGLGHSSVEGSIMYPTIRTGRRKVDLTTDDVEGVQYLYGANPNFNGSRSPPPSTQQRDTGDSGAPGRSDGSRSVLTNLLQYYFWIIFGLFLYLV

SEQ ID NO: 3932 - DNA, 850 bp, Arabidopsis thaliana
  misc_feature (1)..(850): Ceres Seq. ID no. 13487193
tctttacctttttcattccaaaatatctctccttctctctctctttctctggctcgggaagaagatgtcacgtagttgctcacagtgtggaaacaacggccacaactctcgcacatgtccgacggacataactaccaccggtgacaacaacgacaaaggcggcggggagaaagccatcatgctttttggcgtccgcgtcacggaagcttcatcatcttgttttagaaaaagtgttagtatgaacaatctctctcaattcgatcaaactcctgatcccaacccaaccgatgacggtggttacgcttcagacgacgtcgttcacgcctccggtagaaaccgtgaacgcaaacgaggaactccatggacagaggaagaacatagattgtttcttactggattgcataaagttggaaaaggtgattggagaggaatctctagaaactttgttaaaactcgaacacctactcaggtagcgagtcatgctcagaaatattttctccggcggactaatcagaatcgtcgtcgtcgtagatcaagcctcttcgatatcactcccgattcgtttataggatcatcaaaagaagagaatcagttacagactccattggagctaatccgtccagttccgattcctattccgattccaccgtcgcggaagatggctgatttgaatcttaacaagaaaaaaactccagcgacaacggagatgtttccgctgtcgctgaatttgcagaggccgtcttcgtcgacatcgtcatcgtccaatgaacagaaggcacgtggctcacgtgcctcctcggggttcgaggcgatgtcgagtaatggagatagtataatgggagtggcttga

SEQ ID NO: 3933 - protein, 282 aa, Arabidopsis thaliana
  peptide (1)..(282): Ceres Seq. ID no. 13487194
  misc_feature (118)..(165): Pfam Name: Pfam Description:  Myb-like DNA-binding domain
  misc_feature (22)..(282): NCBI GI NO: 15222521 NR Description: DNA binding protein MybSt1 -related
  misc_feature (79)..(200): NCBI GI NO: 15228185 NR Description: myb family transcription factor
  misc_feature (22)..(84): NCBI GI NO: 15228185 NR Description: myb family transcription factor
  misc_feature (22)..(266): NCBI GI NO: 15238083 NR Description: Myb-related transcription activator-like
  misc_feature (79)..(200): NCBI GI NO: 2062176 NR Description: Myb-related transcription activator
  misc_feature (22)..(84): NCBI GI NO: 2062176 NR Description: Myb-related transcription activator
  misc_feature (53)..(222): NCBI GI NO: 28629811 NR Description: transcription factor Myb1 [Malus xiaojinensis]
  misc_feature (22)..(235): NCBI GI NO: 37536856 NR Description: putative Myb-related protein
  misc_feature (22)..(235): NCBI GI NO: 24850307 NR Description: transcription factor MYBS3
  misc_feature (99)..(183): NCBI GI NO: 34906444 NR Description: P0671B11.14
LYLFHSKISLLLSLFLWLGKKMSRSCSQCGNNGHNSRTCPTDITTTGDNNDKGGGEKAIMLFGVRVTEASSSCFRKSVSMNNLSQFDQTPDPNPTDDGGYASDDVVHASGRNRERKRGTPWTEEEHRLFLTGLHKVGKGDWRGISRNFVKTRTPTQVASHAQKYFLRRTNQNRRRRRSSLFDITPDSFIGSSKEENQLQTPLELIRPVPIPIPIPPSRKMADLNLNKKKTPATTEMFPLSLNLQRPSSSTSSSSNEQKARGSRASSGFEAMSSNGDSIMGVA

SEQ ID NO: 3934 - protein, 261 aa, Arabidopsis thaliana
  peptide (1)..(261): Ceres Seq. ID no. 13487195
  misc_feature (97)..(144): Pfam Name: Pfam Description:  Myb-like DNA-binding domain
  misc_feature (1)..(261): NCBI GI NO: 15222521 NR Description: DNA binding protein MybSt1 -related
  misc_feature (58)..(179): NCBI GI NO: 15228185 NR Description: myb family transcription factor
  misc_feature (1)..(63): NCBI GI NO: 15228185 NR Description: myb family transcription factor
  misc_feature (1)..(245): NCBI GI NO: 15238083 NR Description: Myb-related transcription activator-like
  misc_feature (58)..(179): NCBI GI NO: 2062176 NR Description: Myb-related transcription activator
  misc_feature (1)..(63): NCBI GI NO: 2062176 NR Description: Myb-related transcription activator
  misc_feature (32)..(201): NCBI GI NO: 28629811 NR Description: transcription factor Myb1 [Malus xiaojinensis]
  misc_feature (1)..(214): NCBI GI NO: 37536856 NR Description: putative Myb-related protein
  misc_feature (1)..(214): NCBI GI NO: 24850307 NR Description: transcription factor MYBS3
  misc_feature (78)..(162): NCBI GI NO: 34906444 NR Description: P0671B11.14
MSRSCSQCGNNGHNSRTCPTDITTTGDNNDKGGGEKAIMLFGVRVTEASSSCFRKSVSMNNLSQFDQTPDPNPTDDGGYASDDVVHASGRNRERKRGTPWTEEEHRLFLTGLHKVGKGDWRGISRNFVKTRTPTQVASHAQKYFLRRTNQNRRRRRSSLFDITPDSFIGSSKEENQLQTPLELIRPVPIPIPIPPSRKMADLNLNKKKTPATTEMFPLSLNLQRPSSSTSSSSNEQKARGSRASSGFEAMSSNGDSIMGVA

SEQ ID NO: 3935 - protein, 223 aa, Arabidopsis thaliana
  peptide (1)..(223): Ceres Seq. ID no. 13487196
  misc_feature (59)..(106): Pfam Name: Pfam Description:  Myb-like DNA-binding domain
  misc_feature (1)..(223): NCBI GI NO: 15222521 NR Description: DNA binding protein MybSt1 -related
  misc_feature (20)..(141): NCBI GI NO: 15228185 NR Description: myb family transcription factor
  misc_feature (1)..(25): NCBI GI NO: 15228185 NR Description: myb family transcription factor
  misc_feature (1)..(207): NCBI GI NO: 15238083 NR Description: Myb-related transcription activator-like
  misc_feature (20)..(141): NCBI GI NO: 2062176 NR Description: Myb-related transcription activator
  misc_feature (1)..(25): NCBI GI NO: 2062176 NR Description: Myb-related transcription activator
  misc_feature (1)..(163): NCBI GI NO: 28629811 NR Description: transcription factor Myb1 [Malus xiaojinensis]
  misc_feature (1)..(176): NCBI GI NO: 37536856 NR Description: putative Myb-related protein
  misc_feature (1)..(176): NCBI GI NO: 24850307 NR Description: transcription factor MYBS3
  misc_feature (40)..(124): NCBI GI NO: 34906444 NR Description: P0671B11.14
MLFGVRVTEASSSCFRKSVSMNNLSQFDQTPDPNPTDDGGYASDDVVHASGRNRERKRGTPWTEEEHRLFLTGLHKVGKGDWRGISRNFVKTRTPTQVASHAQKYFLRRTNQNRRRRRSSLFDITPDSFIGSSKEENQLQTPLELIRPVPIPIPIPPSRKMADLNLNKKKTPATTEMFPLSLNLQRPSSSTSSSSNEQKARGSRASSGFEAMSSNGDSIMGVA

SEQ ID NO: 3936 - DNA, 1368 bp, Arabidopsis thaliana
  misc_feature (1)..(1368): Ceres Seq. ID no. 13574974
taggatcctctacacctatcaataagagatatattttagagtttcactttggtgcacaaacaaagctcgtacaacattcttcgtatatggctcttcgtcgctgcttacctcaatattcaacaacttcatcttatctctccaagatctggggatttcgtatgcatgggaccaaggcagcagcttctgttgtagaagaacatgtctcgggggcagaacgtgaggatgaagaatatgctgatgtagattgggacaaccttggattcagtcttgtacggacagatttcatgttcgccaccaaaagttgcagagacggaaacttcgaacagggttaccttagccgttacggcaacatcgagctcaaccctgctgctggaattctcaactatggccagggactaatagaggggatgaaagcgtacagaggagaagacggtagggttcttctcttccgtccagagctaaacgcgatgcgtatgaagataggagctgagagaatgtgtatgcattctccttctgttcatcagtttattgaaggtgttaagcagaccgttcttgcaaacaggcgttgggttcctcctccgggcaaaggctcgttgtatctcagaccgttgttgttcggaagtggagcaagcttgggtgtggctgcagcatcagagtacacgtttcttgtgtttggctctcctgttcaaaactacttcaaggaaggcacagcggcgttgaacctgtatgtggaggaggtgattccacgcgcttatcttggaggaactggtggtgtaaaggcaatatccaattacggtccagtgcttgaagtgatgagaagagcaaaatcaagagggttttcggatgttttgtatcttgatgcagatactgggaagaacatagaagaagtctctgctgctaatatattccttgtgaagggcaatacaatagtgacaccagctacgagcggaacgattctcggagggatcacacgtaagagcataatcgaaatcgcccttgatcttggttacaaagtggaagaacgaagtgttccggtagaagaactgaaggaagctgaagaagttttctgcactggaactgccgctggagttgcttctgttggaagcatcacttttaagaacacaaggactgagtacaaagttggagatgggattgttacacagcaacttcgatctattcttgtcggaatacaaactggttctatccaagacactaaagattgggttttgcagattgcctaagttactttcatatcctataaataatgttgcactctcttgatcacccatcaaaagcttttgaaatagtttttggtaaatttgtgacataaatttgtgatatatcaccacatcgtattagtatggatcc

SEQ ID NO: 3937 - protein, 412 aa, Arabidopsis thaliana
  peptide (1)..(412): Ceres Seq. ID no. 13574975
  misc_feature (29)..(412): NCBI GI NO: 30681524 NR Description: branched-chain amino acid aminotransferase -related
  misc_feature (29)..(324): NCBI GI NO: 18391105 NR Description: branched-chain amino acid aminotransferase -related
  misc_feature (51)..(411): NCBI GI NO: 15218409 NR Description: tat-binding protein -related
  misc_feature (74)..(411): NCBI GI NO: 14280354 NR Description: branched-chain amino acid aminotransferase
  misc_feature (76)..(411): NCBI GI NO: 6319167 NR Description: branched-chain amino acid aminotransferase
  misc_feature (95)..(411): NCBI GI NO: 7450517 NR Description: branched-chain amino acid aminotransferase homolog T27I1
  misc_feature (67)..(412): NCBI GI NO: 26391655 NR Description: Branched-chain amino acid aminotransferase 5
  misc_feature (73)..(411): NCBI GI NO: 34902362 NR Description: Putative aminotransferase
  misc_feature (72)..(411): NCBI GI NO: 15222881 NR Description: branched-chain amino acid aminotransferase -related
  misc_feature (78)..(411): NCBI GI NO: 6319165 NR Description: branched-chain amino acid aminotransferase
GSSTPINKRYILEFHFGAQTKLVQHSSYMALRRCLPQYSTTSSYLSKIWGFRMHGTKAAASVVEEHVSGAEREDEEYADVDWDNLGFSLVRTDFMFATKSCRDGNFEQGYLSRYGNIELNPAAGILNYGQGLIEGMKAYRGEDGRVLLFRPELNAMRMKIGAERMCMHSPSVHQFIEGVKQTVLANRRWVPPPGKGSLYLRPLLFGSGASLGVAAASEYTFLVFGSPVQNYFKEGTAALNLYVEEVIPRAYLGGTGGVKAISNYGPVLEVMRRAKSRGFSDVLYLDADTGKNIEEVSAANIFLVKGNTIVTPATSGTILGGITRKSIIEIALDLGYKVEERSVPVEELKEAEEVFCTGTAAGVASVGSITFKNTRTEYKVGDGIVTQQLRSILVGIQTGSIQDTKDWVLQIA

SEQ ID NO: 3938 - protein, 384 aa, Arabidopsis thaliana
  peptide (1)..(384): Ceres Seq. ID no. 13574976
  misc_feature (1)..(384): NCBI GI NO: 30681524 NR Description: branched-chain amino acid aminotransferase -related
  misc_feature (1)..(296): NCBI GI NO: 18391105 NR Description: branched-chain amino acid aminotransferase -related
  misc_feature (23)..(383): NCBI GI NO: 15218409 NR Description: tat-binding protein -related
  misc_feature (46)..(383): NCBI GI NO: 14280354 NR Description: branched-chain amino acid aminotransferase
  misc_feature (48)..(383): NCBI GI NO: 6319167 NR Description: branched-chain amino acid aminotransferase
  misc_feature (67)..(383): NCBI GI NO: 7450517 NR Description: branched-chain amino acid aminotransferase homolog T27I1
  misc_feature (39)..(384): NCBI GI NO: 26391655 NR Description: Branched-chain amino acid aminotransferase 5
  misc_feature (45)..(383): NCBI GI NO: 34902362 NR Description: Putative aminotransferase
  misc_feature (44)..(383): NCBI GI NO: 15222881 NR Description: branched-chain amino acid aminotransferase -related
  misc_feature (50)..(383): NCBI GI NO: 6319165 NR Description: branched-chain amino acid aminotransferase
MALRRCLPQYSTTSSYLSKIWGFRMHGTKAAASVVEEHVSGAEREDEEYADVDWDNLGFSLVRTDFMFATKSCRDGNFEQGYLSRYGNIELNPAAGILNYGQGLIEGMKAYRGEDGRVLLFRPELNAMRMKIGAERMCMHSPSVHQFIEGVKQTVLANRRWVPPPGKGSLYLRPLLFGSGASLGVAAASEYTFLVFGSPVQNYFKEGTAALNLYVEEVIPRAYLGGTGGVKAISNYGPVLEVMRRAKSRGFSDVLYLDADTGKNIEEVSAANIFLVKGNTIVTPATSGTILGGITRKSIIEIALDLGYKVEERSVPVEELKEAEEVFCTGTAAGVASVGSITFKNTRTEYKVGDGIVTQQLRSILVGIQTGSIQDTKDWVLQIA

SEQ ID NO: 3939 - protein, 360 aa, Arabidopsis thaliana
  peptide (1)..(360): Ceres Seq. ID no. 13574977
  misc_feature (1)..(360): NCBI GI NO: 30681524 NR Description: branched-chain amino acid aminotransferase -related
  misc_feature (1)..(272): NCBI GI NO: 18391105 NR Description: branched-chain amino acid aminotransferase -related
  misc_feature (1)..(359): NCBI GI NO: 15218409 NR Description: tat-binding protein -related
  misc_feature (22)..(359): NCBI GI NO: 14280354 NR Description: branched-chain amino acid aminotransferase
  misc_feature (24)..(359): NCBI GI NO: 6319167 NR Description: branched-chain amino acid aminotransferase
  misc_feature (43)..(359): NCBI GI NO: 7450517 NR Description: branched-chain amino acid aminotransferase homolog T27I1
  misc_feature (15)..(360): NCBI GI NO: 26391655 NR Description: Branched-chain amino acid aminotransferase 5
  misc_feature (21)..(359): NCBI GI NO: 34902362 NR Description: Putative aminotransferase
  misc_feature (20)..(359): NCBI GI NO: 15222881 NR Description: branched-chain amino acid aminotransferase -related
  misc_feature (26)..(359): NCBI GI NO: 6319165 NR Description: branched-chain amino acid aminotransferase
MHGTKAAASVVEEHVSGAEREDEEYADVDWDNLGFSLVRTDFMFATKSCRDGNFEQGYLSRYGNIELNPAAGILNYGQGLIEGMKAYRGEDGRVLLFRPELNAMRMKIGAERMCMHSPSVHQFIEGVKQTVLANRRWVPPPGKGSLYLRPLLFGSGASLGVAAASEYTFLVFGSPVQNYFKEGTAALNLYVEEVIPRAYLGGTGGVKAISNYGPVLEVMRRAKSRGFSDVLYLDADTGKNIEEVSAANIFLVKGNTIVTPATSGTILGGITRKSIIEIALDLGYKVEERSVPVEELKEAEEVFCTGTAAGVASVGSITFKNTRTEYKVGDGIVTQQLRSILVGIQTGSIQDTKDWVLQIA

SEQ ID NO: 3940 - DNA, 1370 bp, Arabidopsis thaliana
  misc_feature (1)..(1370): Ceres Seq. ID no. 13574978
aaaactatattatataaacacatttttcgtttcttcacattcacaaaacatctctctctttcttctcccattcactcactatcttgctcctagaaaaagatggcgagaatgagtttgatgatcatgatgattatggttgctgtgaccatgattaacattgctaagagtgatcccattgcaccatgttacttcatatttggtgactctttggttgataatggcaacaataatcagcttcagtcattagctagagctaattactttccttacggtattgactttgctgccggtccaaccggtcggtttagcaacggcttaaccactgtcgatgttatcgctcagcttttgggtttcgaggactacattacaccttacgcttctgcaagaggacaagacattctccgaggagttaactatgcttccgctgctgccggaatccgagacgaaaccggcagacaattgggaggtcgaatagcatttgcagggcaagtagcaaatcacgtgaacactgtgtcacaagtagtgaacatacttggtgatcaaaacgaagcctcgaattacctcagcaaatgcatttactctatcggattaggcagtaacgattatcttaacaactacttcatgcctactttttactctaccggtaaccagttctcccccgaatcctatgccgacgatctcgttgcccgttacaccgaacaactcagggtactgtataccaatggagcgaggaagtttgcgttgataggagtcggggcaatcggttgcagcccgaacgagctagctcaaaacagcagagacggaagaacgtgtgacgaaagaatcaactcagcgaacagaatctttaacagcaaactcatatctatagtcgacgcttttaaccagaacacaccagatgcaaaattcacttacatcaacgcttatggcatcttccaagacattattacaaaccctgctcgctacgggtttagagtgacaaatgcaggatgttgtggagttgggaggaacaatggacagataacttgtcttccaggtcaagcaccatgtctaaataggaatgagtatgtgttttgggatgcgtttcatcccggtgaagctgcgaatattgttattggaagacgatcttttaagcgagaagctgcttctgatgctcatccttatgatattcagcagctagcatctctctaaagagagaaagatcttttggttgtctaagtattttgatagttcttcaatggcagctgagttttggactcaagaagaagtgatttggtttgtgttgtgtgatgtcataactgtttatgtaatgatttggagttactgtttatctctttttctcttaacagttttataaatttgattctttcact

SEQ ID NO: 3941 - protein, 362 aa, Arabidopsis thaliana
  peptide (1)..(362): Ceres Seq. ID no. 13574979
  misc_feature (30)..(342): Pfam Name: Pfam Description:  GDSL-like Lipase/Acylhydrolase
  misc_feature (1)..(362): NCBI GI NO: 15242458 NR Description: GDSL-motif lipase/hydrolase protein
  misc_feature (1)..(362): NCBI GI NO: 21553940 NR Description: GDSL-motif lipase/hydrolase-like protein
  misc_feature (1)..(362): NCBI GI NO: 7485419 NR Description: hypothetical protein F13C5
  misc_feature (1)..(362): NCBI GI NO: 18415211 NR Description: GDSL-motif lipase/hydrolase protein
  misc_feature (1)..(362): NCBI GI NO: 21618199 NR Description: GDSL-motif lipase/hydrolase-like protein
  misc_feature (1)..(362): NCBI GI NO: 15220514 NR Description: GDSL-motif lipase/hydrolase protein
  misc_feature (1)..(362): NCBI GI NO: 21592417 NR Description: lipase/hydrolase, putative [Arabidopsis thaliana]
  misc_feature (10)..(362): NCBI GI NO: 15220512 NR Description: GDSL-motif lipase/hydrolase protein
  misc_feature (10)..(362): NCBI GI NO: 21594055 NR Description: lipase/hydrolase, putative [Arabidopsis thaliana]
  misc_feature (1)..(362): NCBI GI NO: 34910808 NR Description: GDSL-motif lipase/hydrolase-like protein
MARMSLMIMMIMVAVTMINIAKSDPIAPCYFIFGDSLVDNGNNNQLQSLARANYFPYGIDFAAGPTGRFSNGLTTVDVIAQLLGFEDYITPYASARGQDILRGVNYASAAAGIRDETGRQLGGRIAFAGQVANHVNTVSQVVNILGDQNEASNYLSKCIYSIGLGSNDYLNNYFMPTFYSTGNQFSPESYADDLVARYTEQLRVLYTNGARKFALIGVGAIGCSPNELAQNSRDGRTCDERINSANRIFNSKLISIVDAFNQNTPDAKFTYINAYGIFQDIITNPARYGFRVTNAGCCGVGRNNGQITCLPGQAPCLNRNEYVFWDAFHPGEAANIVIGRRSFKREAASDAHPYDIQQLASL

SEQ ID NO: 3942 - protein, 359 aa, Arabidopsis thaliana
  peptide (1)..(359): Ceres Seq. ID no. 13574980
  misc_feature (27)..(339): Pfam Name: Pfam Description:  GDSL-like Lipase/Acylhydrolase
  misc_feature (1)..(359): NCBI GI NO: 15242458 NR Description: GDSL-motif lipase/hydrolase protein
  misc_feature (1)..(359): NCBI GI NO: 21553940 NR Description: GDSL-motif lipase/hydrolase-like protein
  misc_feature (1)..(359): NCBI GI NO: 7485419 NR Description: hypothetical protein F13C5
  misc_feature (1)..(359): NCBI GI NO: 18415211 NR Description: GDSL-motif lipase/hydrolase protein
  misc_feature (1)..(359): NCBI GI NO: 21618199 NR Description: GDSL-motif lipase/hydrolase-like protein
  misc_feature (1)..(359): NCBI GI NO: 15220514 NR Description: GDSL-motif lipase/hydrolase protein
  misc_feature (1)..(359): NCBI GI NO: 21592417 NR Description: lipase/hydrolase, putative [Arabidopsis thaliana]
  misc_feature (7)..(359): NCBI GI NO: 15220512 NR Description: GDSL-motif lipase/hydrolase protein
  misc_feature (7)..(359): NCBI GI NO: 21594055 NR Description: lipase/hydrolase, putative [Arabidopsis thaliana]
  misc_feature (1)..(359): NCBI GI NO: 34910808 NR Description: GDSL-motif lipase/hydrolase-like protein
MSLMIMMIMVAVTMINIAKSDPIAPCYFIFGDSLVDNGNNNQLQSLARANYFPYGIDFAAGPTGRFSNGLTTVDVIAQLLGFEDYITPYASARGQDILRGVNYASAAAGIRDETGRQLGGRIAFAGQVANHVNTVSQVVNILGDQNEASNYLSKCIYSIGLGSNDYLNNYFMPTFYSTGNQFSPESYADDLVARYTEQLRVLYTNGARKFALIGVGAIGCSPNELAQNSRDGRTCDERINSANRIFNSKLISIVDAFNQNTPDAKFTYINAYGIFQDIITNPARYGFRVTNAGCCGVGRNNGQITCLPGQAPCLNRNEYVFWDAFHPGEAANIVIGRRSFKREAASDAHPYDIQQLASL

SEQ ID NO: 3943 - protein, 356 aa, Arabidopsis thaliana
  peptide (1)..(356): Ceres Seq. ID no. 13574981
  misc_feature (24)..(336): Pfam Name: Pfam Description:  GDSL-like Lipase/Acylhydrolase
  misc_feature (1)..(356): NCBI GI NO: 15242458 NR Description: GDSL-motif lipase/hydrolase protein
  misc_feature (1)..(356): NCBI GI NO: 21553940 NR Description: GDSL-motif lipase/hydrolase-like protein
  misc_feature (1)..(356): NCBI GI NO: 7485419 NR Description: hypothetical protein F13C5
  misc_feature (1)..(356): NCBI GI NO: 18415211 NR Description: GDSL-motif lipase/hydrolase protein
  misc_feature (1)..(356): NCBI GI NO: 21618199 NR Description: GDSL-motif lipase/hydrolase-like protein
  misc_feature (1)..(356): NCBI GI NO: 15220514 NR Description: GDSL-motif lipase/hydrolase protein
  misc_feature (1)..(356): NCBI GI NO: 21592417 NR Description: lipase/hydrolase, putative [Arabidopsis thaliana]
  misc_feature (4)..(356): NCBI GI NO: 15220512 NR Description: GDSL-motif lipase/hydrolase protein
  misc_feature (4)..(356): NCBI GI NO: 21594055 NR Description: lipase/hydrolase, putative [Arabidopsis thaliana]
  misc_feature (1)..(356): NCBI GI NO: 34910808 NR Description: GDSL-motif lipase/hydrolase-like protein
MIMMIMVAVTMINIAKSDPIAPCYFIFGDSLVDNGNNNQLQSLARANYFPYGIDFAAGPTGRFSNGLTTVDVIAQLLGFEDYITPYASARGQDILRGVNYASAAAGIRDETGRQLGGRIAFAGQVANHVNTVSQVVNILGDQNEASNYLSKCIYSIGLGSNDYLNNYFMPTFYSTGNQFSPESYADDLVARYTEQLRVLYTNGARKFALIGVGAIGCSPNELAQNSRDGRTCDERINSANRIFNSKLISIVDAFNQNTPDAKFTYINAYGIFQDIITNPARYGFRVTNAGCCGVGRNNGQITCLPGQAPCLNRNEYVFWDAFHPGEAANIVIGRRSFKREAASDAHPYDIQQLASL

SEQ ID NO: 3944 - DNA, 1110 bp, Arabidopsis thaliana
  misc_feature (1)..(1110): Ceres Seq. ID no. 12338109
acattctgagaagaagaagaagaaaataagaaaaaacaaaagatgaaaaccattatcctttttgtaacatttcttgctctttcttcttcatctctagccgatgagacagagactgaatttcattacaaacccggtgagatagccgatccctcgaaatggagcagtatcaaggctgaatggaaaatttgcgggacagggaagaggcaatcgccaatcaatcttactccaaaaatagctcgcattgttcacaattctacacagattcttcagacatattacaaacctgtagaggctattcttaagaaccgtggattcgacatgaaggttaagtgggaagacgatgcagggaagatcgtgatcaatgataccgactataaattggttcaaagccactggcacgcaccttcagagcattttctcgatggacagaggttggcaatggaacttcacatggtacacaaaagtgtagaagggcacttggcagtgattggagttctcttcagagaaggagaaccaaatgctttcatttcgcggatcatggacaagatccataagatcgcagacgtacaagatggagaggtcagcatcggaaagatagatccaagagaatttggatgggatcttacaaagttttatgaatacagaggttctctcactactcctccttgcacggaagatgtcatgtggaccatcatcaacaaggtggggactgtttcacgtgagcaaattgatgtattgacagatgctcgtcgcggtggttatgagaagaacgcgagaccagctcaacctctgaacggacgtctggtttatttaaacgagcagtccagtccaagtccaactccacggctaagaataccacgagttggtccggtctaagacagtcttataggacaaggcaactccgagccctaatttccatacaaagaaaattcggaaaagaattttgaagatgtatgaaaattgggagccataactatttttttttaactattcttttgattaaaagataaaactacgcaatattatatgcataaagtttttcttttatacatgtattccaataaacaagatgtaataatatccaaccataatgagttgtttgattatttt

SEQ ID NO: 3945 - protein, 277 aa, Arabidopsis thaliana
  peptide (1)..(277): Ceres Seq. ID no. 12338110
  misc_feature (31)..(259): Pfam Name: Pfam Description:  Eukaryotic-type carbonic anhydrase
  misc_feature (1)..(277): NCBI GI NO: 15237646 NR Description: carbonate dehydratase - like protein
  misc_feature (1)..(256): NCBI GI NO: 15233471 NR Description: carbonic anhydrase -like protein
  misc_feature (21)..(262): NCBI GI NO: 25291473 NR Description: probable carbonic anhydrase
  misc_feature (4)..(257): NCBI GI NO: 15223122 NR Description: storage protein, putative; protein id: At1g08080.1
  misc_feature (3)..(258): NCBI GI NO: 29468280 NR Description: nectarin III
  misc_feature (21)..(223): NCBI GI NO: 30683808 NR Description: carbonic anhydrase -related [Arabidopsis thaliana]
  misc_feature (2)..(221): NCBI GI NO: 15233474 NR Description: carbonic anhydrase - like protein
  misc_feature (8)..(257): NCBI GI NO: 37806288 NR Description: putative dioscorin
  misc_feature (23)..(264): NCBI GI NO: 2147328 NR Description: dioscorin class B - Dioscorea cayenensis
  misc_feature (4)..(257): NCBI GI NO: 25407021 NR Description: protein T6D22.16 [imported] - Arabidopsis thaliana
MKTIILFVTFLALSSSSLADETETEFHYKPGEIADPSKWSSIKAEWKICGTGKRQSPINLTPKIARIVHNSTQILQTYYKPVEAILKNRGFDMKVKWEDDAGKIVINDTDYKLVQSHWHAPSEHFLDGQRLAMELHMVHKSVEGHLAVIGVLFREGEPNAFISRIMDKIHKIADVQDGEVSIGKIDPREFGWDLTKFYEYRGSLTTPPCTEDVMWTIINKVGTVSREQIDVLTDARRGGYEKNARPAQPLNGRLVYLNEQSSPSPTPRLRIPRVGPV

SEQ ID NO: 3946 - protein, 185 aa, Arabidopsis thaliana; identical to SEQ ID NO: 3554
  peptide (1)..(185): Ceres Seq. ID no. 12338111
  misc_feature (1)..(167): Pfam Name: Pfam Description:  Eukaryotic-type carbonic anhydrase
  misc_feature (1)..(185): NCBI GI NO: 15237646 NR Description: carbonate dehydratase - like protein
  misc_feature (1)..(164): NCBI GI NO: 15233471 NR Description: carbonic anhydrase -like protein
  misc_feature (1)..(170): NCBI GI NO: 25291473 NR Description: probable carbonic anhydrase
  misc_feature (1)..(165): NCBI GI NO: 15223122 NR Description: storage protein, putative; protein id: At1g08080.1
  misc_feature (1)..(166): NCBI GI NO: 29468280 NR Description: nectarin III
  misc_feature (1)..(131): NCBI GI NO: 30683808 NR Description: carbonic anhydrase -related [Arabidopsis thaliana]
  misc_feature (1)..(129): NCBI GI NO: 15233474 NR Description: carbonic anhydrase - like protein
  misc_feature (1)..(165): NCBI GI NO: 37806288 NR Description: putative dioscorin
  misc_feature (1)..(172): NCBI GI NO: 2147328 NR Description: dioscorin class B - Dioscorea cayenensis
  misc_feature (1)..(165): NCBI GI NO: 25407021 NR Description: protein T6D22.16 [imported] - Arabidopsis thaliana

SEQ ID NO: 3947 - protein, 145 aa, Arabidopsis thaliana; identical to SEQ ID NO: 3555
  peptide (1)..(145): Ceres Seq. ID no. 12338112
  misc_feature (1)..(127): Pfam Name: Pfam Description:  Eukaryotic-type carbonic anhydrase
  misc_feature (1)..(145): NCBI GI NO: 15237646 NR Description: carbonate dehydratase - like protein
  misc_feature (1)..(124): NCBI GI NO: 15233471 NR Description: carbonic anhydrase -like protein
  misc_feature (1)..(130): NCBI GI NO: 25291473 NR Description: probable carbonic anhydrase
  misc_feature (1)..(125): NCBI GI NO: 15223122 NR Description: storage protein, putative; protein id: At1g08080.1
  misc_feature (1)..(126): NCBI GI NO: 29468280 NR Description: nectarin III
  misc_feature (1)..(91): NCBI GI NO: 30683808 NR Description: carbonic anhydrase -related [Arabidopsis thaliana]
  misc_feature (1)..(89): NCBI GI NO: 15233474 NR Description: carbonic anhydrase - like protein
  misc_feature (1)..(125): NCBI GI NO: 37806288 NR Description: putative dioscorin
  misc_feature (1)..(132): NCBI GI NO: 2147328 NR Description: dioscorin class B - Dioscorea cayenensis
  misc_feature (1)..(125): NCBI GI NO: 25407021 NR Description: protein T6D22.16 [imported] - Arabidopsis thaliana

SEQ ID NO: 3948 - DNA, 1586 bp, Arabidopsis thaliana
  misc_feature (1)..(1586): Ceres Seq. ID no. 13492196
aatgaaatctgtcattttcacagaggaaaaaaacttacaaagacaaaatccattgcaaaagagcgagcaacaacgacgaaatttcgaaatgccatcgccaccgacgacgacttctctctcggtgacacagaccataaacggatcacacagcttcacaatcaaaggctattctttggctaaaggaatcgggatcggaaaacacatcgccagcgatactttcaccgtcgggggttatcaatgggctatctatttctatcctgatggcaagaatcctgaggataattcggcttatgtctccgttttcattgctttagctagcgatggtaccgatgttagggctctttttgagctttctttgcttgatcagagtggtaaagggaagcataaggttcatagccacttcgatcgtgctcttgagagcggtccttatactctcaagtatcgtggcagcatgtggggctacaagcgcttttttcgaagacttatgctggaaacatctgattttctgaaggatgattgtctgaaaattaattgcaccgtgggagttgtggtctcagaaatagattgcccacggttacattctattcatgtccctgcatctgatattggatctcatttcgggatgcttctagagaacgaggacggttcagatataacttttaacgtctctggtgaaaagttccgtgctcacaggttagtattggctgctcgatctcctgtctttgaaagcgagttcctcgatgttacgggagaagaagatcgtgatatcgaagttactgacatggagcctaaggttttcaaggctttgctccactacatatacaaggatgctctcattgaagatgcagagtcatcatcatcttccggttcatctgttggtccatctgcctcagacacattagctgcaaagctactaggagccgctgataaatacaagttgcctagattaagtctaatgtgcgagtcagtgctctgcaaggatatatcagtagattccgttgcaaatattttggcgcttgctgaccgttacaatgcttccgccttgaaatccgtttgtctgaaattcgcagcagaaaatctcatcgctgttatgaggtcagatgggtttgattatctaagggaacactgcccgtcacttcagtctgagcttctgaaaacagttgcgggttgcgaagaggagttaagcggaggaggagggaagacgagaagcgtatggggccaattctcagacggtggagctgagacaaacggaagacaagcacagacttggggagatatcaatggaggagcagagagaagccagagtgtttgggtcgaagttgtgaacgctaatggaagcggtagaaacaataatgacaacaataacagtgatgacccaatggcagaactagaagattgagcaaataaaaggtaataaaaaagccaaaggacaatccgagtaagctgaagttaggatcagacatcatgaagcggagatcttgtaacttagtgtttccactgtcgaatactatgtggatcataggagacgatttagtattgttgttgtaatacgctttccgtgtaataattggagttactagtatgat

SEQ ID NO: 3949 - protein, 465 aa, Arabidopsis thaliana
  peptide (1)..(465): Ceres Seq. ID no. 13492197
  misc_feature (206)..(328): Pfam Name: Pfam Description:  BTB/POZ domain
  misc_feature (1)..(465): NCBI GI NO: 30678912 NR Description: expressed protein [Arabidopsis thaliana]
  misc_feature (30)..(465): NCBI GI NO: 21536509 NR Description: unknown [Arabidopsis thaliana]
  misc_feature (29)..(421): NCBI GI NO: 34900034 NR Description: OJ1641_C04.24
  misc_feature (30)..(421): NCBI GI NO: 28269444 NR Description: unknown protein
  misc_feature (36)..(421): NCBI GI NO: 15242126 NR Description: expressed protein [Arabidopsis thaliana]
  misc_feature (36)..(421): NCBI GI NO: 21536843 NR Description: unknown [Arabidopsis thaliana]
  misc_feature (29)..(421): NCBI GI NO: 11282376 NR Description: hypothetical protein F23N14
  misc_feature (29)..(421): NCBI GI NO: 30691638 NR Description: expressed protein [Arabidopsis thaliana]
  misc_feature (36)..(413): NCBI GI NO: 14596183 NR Description: Unknown protein [Arabidopsis thaliana]
  misc_feature (32)..(421): NCBI GI NO: 23617108 NR Description: contains ESTs AU056959
MKSVIFTEEKNLQRQNPLQKSEQQRRNFEMPSPPTTTSLSVTQTINGSHSFTIKGYSLAKGIGIGKHIASDTFTVGGYQWAIYFYPDGKNPEDNSAYVSVFIALASDGTDVRALFELSLLDQSGKGKHKVHSHFDRALESGPYTLKYRGSMWGYKRFFRRLMLETSDFLKDDCLKINCTVGVVVSEIDCPRLHSIHVPASDIGSHFGMLLENEDGSDITFNVSGEKFRAHRLVLAARSPVFESEFLDVTGEEDRDIEVTDMEPKVFKALLHYIYKDALIEDAESSSSSGSSVGPSASDTLAAKLLGAADKYKLPRLSLMCESVLCKDISVDSVANILALADRYNASALKSVCLKFAAENLIAVMRSDGFDYLREHCPSLQSELLKTVAGCEEELSGGGGKTRSVWGQFSDGGAETNGRQAQTWGDINGGAERSQSVWVEVVNANGSGRNNNDNNNSDDPMAELED

SEQ ID NO: 3950 - protein, 436 aa, Arabidopsis thaliana
  peptide (1)..(436): Ceres Seq. ID no. 13492198
  misc_feature (177)..(299): Pfam Name: Pfam Description:  BTB/POZ domain
  misc_feature (1)..(436): NCBI GI NO: 30678912 NR Description: expressed protein [Arabidopsis thaliana]
  misc_feature (1)..(436): NCBI GI NO: 21536509 NR Description: unknown [Arabidopsis thaliana]
  misc_feature (1)..(392): NCBI GI NO: 34900034 NR Description: OJ1641_C04.24
  misc_feature (1)..(392): NCBI GI NO: 28269444 NR Description: unknown protein
  misc_feature (7)..(392): NCBI GI NO: 15242126 NR Description: expressed protein [Arabidopsis thaliana]
  misc_feature (7)..(392): NCBI GI NO: 21536843 NR Description: unknown [Arabidopsis thaliana]
  misc_feature (1)..(392): NCBI GI NO: 11282376 NR Description: hypothetical protein F23N14
  misc_feature (1)..(392): NCBI GI NO: 30691638 NR Description: expressed protein [Arabidopsis thaliana]
  misc_feature (7)..(384): NCBI GI NO: 14596183 NR Description: Unknown protein [Arabidopsis thaliana]
  misc_feature (3)..(392): NCBI GI NO: 23617108 NR Description: contains ESTs AU056959
MPSPPTTTSLSVTQTINGSHSFTIKGYSLAKGIGIGKHIASDTFTVGGYQWAIYFYPDGKNPEDNSAYVSVFIALASDGTDVRALFELSLLDQSGKGKHKVHSHFDRALESGPYTLKYRGSMWGYKRFFRRLMLETSDFLKDDCLKINCTVGVVVSEIDCPRLHSIHVPASDIGSHFGMLLENEDGSDITFNVSGEKFRAHRLVLAARSPVFESEFLDVTGEEDRDIEVTDMEPKVFKALLHYIYKDALIEDAESSSSSGSSVGPSASDTLAAKLLGAADKYKLPRLSLMCESVLCKDISVDSVANILALADRYNASALKSVCLKFAAENLIAVMRSDGFDYLREHCPSLQSELLKTVAGCEEELSGGGGKTRSVWGQFSDGGAETNGRQAQTWGDINGGAERSQSVWVEVVNANGSGRNNNDNNNSDDPMAELED

SEQ ID NO: 3951 - protein, 315 aa, Arabidopsis thaliana
  peptide (1)..(315): Ceres Seq. ID no. 13492199
  misc_feature (56)..(178): Pfam Name: Pfam Description:  BTB/POZ domain
  misc_feature (1)..(315): NCBI GI NO: 30678912 NR Description: expressed protein [Arabidopsis thaliana]
  misc_feature (1)..(315): NCBI GI NO: 21536509 NR Description: unknown [Arabidopsis thaliana]
  misc_feature (1)..(271): NCBI GI NO: 34900034 NR Description: OJ1641_C04.24
  misc_feature (1)..(271): NCBI GI NO: 28269444 NR Description: unknown protein
  misc_feature (1)..(271): NCBI GI NO: 15242126 NR Description: expressed protein [Arabidopsis thaliana]
  misc_feature (1)..(271): NCBI GI NO: 21536843 NR Description: unknown [Arabidopsis thaliana]
  misc_feature (1)..(271): NCBI GI NO: 11282376 NR Description: hypothetical protein F23N14
  misc_feature (1)..(271): NCBI GI NO: 30691638 NR Description: expressed protein [Arabidopsis thaliana]
  misc_feature (1)..(263): NCBI GI NO: 14596183 NR Description: Unknown protein [Arabidopsis thaliana]
  misc_feature (1)..(271): NCBI GI NO: 23617108 NR Description: contains ESTs AU056959
MWGYKRFFRRLMLETSDFLKDDCLKINCTVGVVVSEIDCPRLHSIHVPASDIGSHFGMLLENEDGSDITFNVSGEKFRAHRLVLAARSPVFESEFLDVTGEEDRDIEVTDMEPKVFKALLHYIYKDALIEDAESSSSSGSSVGPSASDTLAAKLLGAADKYKLPRLSLMCESVLCKDISVDSVANILALADRYNASALKSVCLKFAAENLIAVMRSDGFDYLREHCPSLQSELLKTVAGCEEELSGGGGKTRSVWGQFSDGGAETNGRQAQTWGDINGGAERSQSVWVEVVNANGSGRNNNDNNNSDDPMAELED

SEQ ID NO: 3952 - DNA, 1171 bp, Arabidopsis thaliana
  misc_feature (1)..(1171): Ceres Seq. ID no. 13574986
atgtcatctctagccactgttgttgtctctttcctctgaatgcttagcagcgacagagctcgacgaagcagtaaaaccctagtagaataatggtgaagctcacggctgatttgatctggaaaagtcctcacttcttcaatgctatcaaggagcgagaattggatctacgaggtaacaagattcctgtaatcgaaaacttgggtgctactgaggaccagttcgataccattgatctgtctgataacgagatagttaagctagaaaacttcccatacctcaaccgtttaggaactttactcatcaataacaatcgtatcacccggataaatcctaaccttggagaattcctaccgaagcttcactctttggttcttacaaataacaggcttgtgaatttggttgagattgatccccttgcctccattcccaagctgcagtaccttagtttgttggataataatatcaccaaaaaggcaaattatcgcctttatgtgattcacaagctaaaatcacttcgagtactggatttcattaaaatcaaagccaaggagagagctgaagctgcatctttgttttcatccaaagaagcagaagaggaagttaaaaaggtttctcgggaggaggttaaaaaagtgtcagaaactgcagaaaatccagagactccgaaagtggtggcgccaacagcggagcaaatattagctatcaaggctgcaattatcaattctcagacgatagaagaaattgccagactcgaacaggctttgaagtttggacaggttcctgctggcctgataattcctgatccggccacaaatgactctgctcccatggaggaatagaaagcgtgactgttgcccctccaatcgttgtagctactgctccagaatgctcacagcaattgttttctctggcaatcctgtacggtttctgtcacttccttaggaactcatgcgcaacagttggaacctgtaaactatttactgctcgaggcatctgttttgaacccttaaaaagaatgccaaagaggattgtagtctttttaagtctctgcattggcatggagagcgagggtgcacacagaatttgcttatgctcttttcgcattagaatttcttcttagtattttgtatcttgtcactcaatatcatcaattaccgagaaactaatttag

SEQ ID NO: 3953 - protein, 249 aa, Arabidopsis thaliana
  peptide (1)..(249): Ceres Seq. ID no. 13574987
  misc_feature (1)..(249): NCBI GI NO: 15218274 NR Description: U2 small nuclear ribonucleoprotein A, putative
  misc_feature (1)..(249): NCBI GI NO: 322619 NR Description: U2 snRNP protein A' - Arabidopsis thaliana
  misc_feature (1)..(249): NCBI GI NO: 34857187 NR Description: similar to U2 small nuclear ribonucleoprotein polypeptide A
  misc_feature (1)..(249): NCBI GI NO: 31077165 NR Description: U2 small nuclear ribonucleoprotein A'
  misc_feature (1)..(249): NCBI GI NO: 4507121 NR Description: u2 small nuclear ribonucleoprotein polypeptide A'
  misc_feature (1)..(249): NCBI GI NO: 7263962 NR Description: bA395L14
  misc_feature (1)..(231): NCBI GI NO: 7021537 NR Description: U2 small nuclear ribonucleoprotein A'
  misc_feature (1)..(231): NCBI GI NO: 3955033 NR Description: U2 snRNP-specific A' protein [Salmo salar]
  misc_feature (1)..(226): NCBI GI NO: 3150128 NR Description: U2 snRNP-specific A' protein [Salmo salar]
  misc_feature (1)..(231): NCBI GI NO: 39595089 NR Description: Hypothetical protein CBG03669
MVKLTADLIWKSPHFFNAIKERELDLRGNKIPVIENLGATEDQFDTIDLSDNEIVKLENFPYLNRLGTLLINNNRITRINPNLGEFLPKLHSLVLTNNRLVNLVEIDPLASIPKLQYLSLLDNNITKKANYRLYVIHKLKSLRVLDFIKIKAKERAEAASLFSSKEAEEEVKKVSREEVKKVSETAENPETPKVVAPTAEQILAIKAAIINSQTIEEIARLEQALKFGQVPAGLIIPDPATNDSAPMEE

SEQ ID NO: 3954 - DNA, 1135 bp, Arabidopsis thaliana
  misc_feature (1)..(1135): Ceres Seq. ID no. 12559930
  misc_feature (1105)..(1105): n is a, c, t, g, unknown, or other
  misc_feature (1051)..(1051): n is a, c, t, g, unknown, or other
  misc_feature (1101)..(1101): n is a, c, t, g, unknown, or other
acgacactcgcaacttcttccttatcgacacctacactctcctgctacaatggcgactttcctaacaaatgttgtttcaatcaaacctacaatcttctcattccagtccgaatccttcactcctttgcatacacgggtcaatgtattctcctcgaaaccctttccttctctcgctggaactttctcccggagctctagaacgagattcattccttatgctgtaacggagacggaagaaaaacccgccgctttggaccctagttcagaagctgccaggcgtgtgtatatcggtaacatacccaggacggtgaccaatgagcagctcactaaacttgttgaagaacacggtgctgttgaaaaagttcaggtgatgtatgataagtattcaggaagaagccgtcgatttgggtttgctacaatgaaatcagttgaagatgctaatgctgtggttgagaaattgaatggcaataccgttgaagggcgtgagataaaggttaacattacagagaaacctatagcatcatcacctgatttatcagttcttcagtctgaggattcagcatttgtagatagcccttacaaagtgtatgttgggaatctagcaaagactgttacaaaagagatgcttgagaatttgttttctgagaaagggaaagtagtaagtgctaaggtttcaagagtacctggaacttccaaatccaccgggtttggattcgttacgttttcttctgaagaagatgtggaagcagccattgttgctcttaacaattcgttgctggaaggacagaagattcgggtgaataaggcttagcctattggatcataaagaatgtgaaaagaatcgctttgaagagtttttgtaatgcaaatcattagagcttagtgtatcatcttgtattcattctaagttgaaaatgaaaccatatcttttcaaaagcttatagttgtggtaatcttgtttctaggcagtgtaaacagagaactccaatgacatgaacaagtcatgctacatccaattcagaggtagggatgataatgaagatccccaagntaaatttatctccaccaagtttcctttccataaatgtatcatacaatgtnaaantgctacttgtgtgacttgtgagctttggcc

SEQ ID NO: 3955 - protein, 269 aa, Arabidopsis thaliana
  peptide (1)..(269): Ceres Seq. ID no. 12559931
  misc_feature (94)..(165): Pfam Name: a.k.a. RRM, RBD, or RNP domain Pfam Description: RNA recognition motif.
  misc_feature (17)..(269): NCBI GI NO: 30693595 NR Description: RNA recognition motif (RRM)-containing protein
  misc_feature (17)..(266): NCBI GI NO: 11357772 NR Description: hypothetical protein F4F15
  misc_feature (26)..(269): NCBI GI NO: 7578881 NR Description: plastid-specific ribosomal protein 2 precursor
  misc_feature (18)..(269): NCBI GI NO: 18921322 NR Description: putative ribonucleoprotein [Oryza sativa]
  misc_feature (76)..(269): NCBI GI NO: 15231200 NR Description: chloroplast RNA-binding protein cp33
  misc_feature (76)..(269): NCBI GI NO: 17064758 NR Description: ubiquitin / ribosomal protein CEP52
  misc_feature (66)..(269): NCBI GI NO: 34913270 NR Description: putative ribonucleoprotein
  misc_feature (76)..(269): NCBI GI NO: 681912 NR Description: cp33 [Arabidopsis thaliana]
  misc_feature (76)..(269): NCBI GI NO: 7446342 NR Description: RNA-binding protein precursor, 33K - wood tobacco
  misc_feature (76)..(269): NCBI GI NO: 1076509 NR Description: RNA-binding protein RNP1 precursor - kidney bean
RHSQLLPYRHLHSPATMATFLTNVVSIKPTIFSFQSESFTPLHTRVNVFSSKPFPSLAGTFSRSSRTRFIPYAVTETEEKPAALDPSSEAARRVYIGNIPRTVTNEQLTKLVEEHGAVEKVQVMYDKYSGRSRRFGFATMKSVEDANAVVEKLNGNTVEGREIKVNITEKPIASSPDLSVLQSEDSAFVDSPYKVYVGNLAKTVTKEMLENLFSEKGKVVSAKVSRVPGTSKSTGFGFVTFSSEEDVEAAIVALNNSLLEGQKIRVNKA

SEQ ID NO: 3956 - protein, 253 aa, Arabidopsis thaliana
  peptide (1)..(253): Ceres Seq. ID no. 12559932
  misc_feature (78)..(149): Pfam Name: a.k.a. RRM, RBD, or RNP domain Pfam Description: RNA recognition motif.
  misc_feature (1)..(253): NCBI GI NO: 30693595 NR Description: RNA recognition motif (RRM)-containing protein
  misc_feature (1)..(250): NCBI GI NO: 11357772 NR Description: hypothetical protein F4F15
  misc_feature (10)..(253): NCBI GI NO: 7578881 NR Description: plastid-specific ribosomal protein 2 precursor
  misc_feature (2)..(253): NCBI GI NO: 18921322 NR Description: putative ribonucleoprotein [Oryza sativa]
  misc_feature (60)..(253): NCBI GI NO: 15231200 NR Description: chloroplast RNA-binding protein cp33
  misc_feature (60)..(253): NCBI GI NO: 17064758 NR Description: ubiquitin / ribosomal protein CEP52
  misc_feature (50)..(253): NCBI GI NO: 34913270 NR Description: putative ribonucleoprotein
  misc_feature (60)..(253): NCBI GI NO: 681912 NR Description: cp33 [Arabidopsis thaliana]
  misc_feature (60)..(253): NCBI GI NO: 7446342 NR Description: RNA-binding protein precursor, 33K - wood tobacco
  misc_feature (60)..(253): NCBI GI NO: 1076509 NR Description: RNA-binding protein RNP1 precursor - kidney bean
MATFLTNVVSIKPTIFSFQSESFTPLHTRVNVFSSKPFPSLAGTFSRSSRTRFIPYAVTETEEKPAALDPSSEAARRVYIGNIPRTVTNEQLTKLVEEHGAVEKVQVMYDKYSGRSRRFGFATMKSVEDANAVVEKLNGNTVEGREIKVNITEKPIASSPDLSVLQSEDSAFVDSPYKVYVGNLAKTVTKEMLENLFSEKGKVVSAKVSRVPGTSKSTGFGFVTFSSEEDVEAAIVALNNSLLEGQKIRVNKA

SEQ ID NO: 3957 - protein, 146 aa, Arabidopsis thaliana
  peptide (1)..(146): Ceres Seq. ID no. 12559933
  misc_feature (72)..(143): Pfam Name: a.k.a. RRM, RBD, or RNP domain Pfam Description: RNA recognition motif.
  misc_feature (1)..(146): NCBI GI NO: 30693595 NR Description: RNA recognition motif (RRM)-containing protein
  misc_feature (1)..(143): NCBI GI NO: 11357772 NR Description: hypothetical protein F4F15
  misc_feature (1)..(146): NCBI GI NO: 7578881 NR Description: plastid-specific ribosomal protein 2 precursor
  misc_feature (1)..(146): NCBI GI NO: 18921322 NR Description: putative ribonucleoprotein [Oryza sativa]
  misc_feature (1)..(146): NCBI GI NO: 15231200 NR Description: chloroplast RNA-binding protein cp33
  misc_feature (1)..(146): NCBI GI NO: 17064758 NR Description: ubiquitin / ribosomal protein CEP52
  misc_feature (1)..(146): NCBI GI NO: 34913270 NR Description: putative ribonucleoprotein
  misc_feature (1)..(146): NCBI GI NO: 681912 NR Description: cp33 [Arabidopsis thaliana]
  misc_feature (1)..(146): NCBI GI NO: 7446342 NR Description: RNA-binding protein precursor, 33K - wood tobacco
  misc_feature (1)..(146): NCBI GI NO: 1076509 NR Description: RNA-binding protein RNP1 precursor - kidney bean
MYDKYSGRSRRFGFATMKSVEDANAVVEKLNGNTVEGREIKVNITEKPIASSPDLSVLQSEDSAFVDSPYKVYVGNLAKTVTKEMLENLFSEKGKVVSAKVSRVPGTSKSTGFGFVTFSSEEDVEAAIVALNNSLLEGQKIRVNKA

SEQ ID NO: 3958 - DNA, 1115 bp, Arabidopsis thaliana
  misc_feature (1)..(1115): Ceres Seq. ID no. 12339130
gttacaaacaaatattttaagaaaaatccccaaccccagagaaacccttcatcttccatcatctttcttattcaatctgcaaaaattccaagattcatggctacaacaagacttaacccctcttgccactttccagcgagcacaagactctcttgcgagagctatctcggtctgagaacgaccgggaggattagttatgcccgaaccctaactgctccacgtggctatcttgctgtaaaagcaaacggtggtcaagcttccgtggtgactgcggcggctataacggagaagcaacaaaagaagtatccaggagaatcaaagggttttgtggaggagatgagattcgtggcgatgagattgcatacgaaagatcaagcaagggaaggagaaaaagaatctagatctccagaggaaggtccggtggcgaaatgggagccgactgtggaaggatacttacattttcttgtggatagtaagttggtttacgacacgcttgaagggatcattgatggatccaatttcccaacttatgctggtttcaagaacacgggattagaaagagcagagagtttgcggaaagatttggagtggttcaaggaacaaggttatgagattccagagccaatggctcctggtaaaacatattctgagtatttaaaagatttagcagagaatgatcctcaagcattcatttgtcacttctacaacatttactttgctcatagcgccggtggccagatgattggaacaaaggtatctaagaagatactagataataaagaactcgagttctataaatgggacggtcaactttctcagttgttgcaaaatgtgaggcaaaaactgaacaaagttgcagagtggtggacaagagaagaaaagagtcattgcttggaagagactgagaaatcgtttaagttttcaggggagattcttcgactcatattgtcctgatttgattcataaaccttcagatcttcaatagtcaataaagccttctgctagtttcgtggaaccaatacgatttaagaggtttgtatgtgaaataactatgtgactattgtattaatgcgtaaaacatatcataataaccaaactataaaattattttcgtg

SEQ ID NO: 3959 - protein, 317 aa, Arabidopsis thaliana
  peptide (1)..(317): Ceres Seq. ID no. 12339132
  misc_feature (113)..(314): Pfam Name: Pfam Description:  Heme oxygenase
  misc_feature (33)..(317): NCBI GI NO: 15222425 NR Description: putative heme oxygenase; protein id: At1g69720
  misc_feature (77)..(317): NCBI GI NO: 15225771 NR Description: heme oxygenase 1 (HO1); protein id: At2g26670
  misc_feature (77)..(317): NCBI GI NO: 21450864 NR Description: putative heme oxygenase HO1 [Arabidopsis thaliana]
  misc_feature (88)..(317): NCBI GI NO: 14030647 NR Description: At2g26670/F18A8.4 [Arabidopsis thaliana]
  misc_feature (33)..(317): NCBI GI NO: 15217926 NR Description: plastid heme oxygenase, putative
  misc_feature (33)..(317): NCBI GI NO: 14485565 NR Description: heme oxygenase 4 [Arabidopsis thaliana]
  misc_feature (87)..(317): NCBI GI NO: 15076863 NR Description: putative heme oxygenase 1 precursor
  misc_feature (88)..(317): NCBI GI NO: 14485575 NR Description: heme oxygenase 1 [Lycopersicon esculentum]
  misc_feature (70)..(317): NCBI GI NO: 14485567 NR Description: heme oxygenase 1 [Glycine max]
  misc_feature (67)..(317): NCBI GI NO: 14485569 NR Description: heme oxygenase 3 [Glycine max]
VTNKYFKKNPQPQRNPSSSIIFLIQSAKIPRFMATTRLNPSCHFPASTRLSCESYLGLRTTGRISYARTLTAPRGYLAVKANGGQASVVTAAAITEKQQKKYPGESKGFVEEMRFVAMRLHTKDQAREGEKESRSPEEGPVAKWEPTVEGYLHFLVDSKLVYDTLEGIIDGSNFPTYAGFKNTGLERAESLRKDLEWFKEQGYEIPEPMAPGKTYSEYLKDLAENDPQAFICHFYNIYFAHSAGGQMIGTKVSKKILDNKELEFYKWDGQLSQLLQNVRQKLNKVAEWWTREEKSHCLEETEKSFKFSGEILRLILS

SEQ ID NO: 3960 - protein, 285 aa, Arabidopsis thaliana
  peptide (1)..(285): Ceres Seq. ID no. 12339133
  misc_feature (81)..(282): Pfam Name: Pfam Description:  Heme oxygenase
  misc_feature (1)..(285): NCBI GI NO: 15222425 NR Description: putative heme oxygenase; protein id: At1g69720
  misc_feature (45)..(285): NCBI GI NO: 15225771 NR Description: heme oxygenase 1 (HO1); protein id: At2g26670
  misc_feature (45)..(285): NCBI GI NO: 21450864 NR Description: putative heme oxygenase HO1 [Arabidopsis thaliana]
  misc_feature (56)..(285): NCBI GI NO: 14030647 NR Description: At2g26670/F18A8.4 [Arabidopsis thaliana]
  misc_feature (1)..(285): NCBI GI NO: 15217926 NR Description: plastid heme oxygenase, putative
  misc_feature (1)..(285): NCBI GI NO: 14485565 NR Description: heme oxygenase 4 [Arabidopsis thaliana]
  misc_feature (55)..(285): NCBI GI NO: 15076863 NR Description: putative heme oxygenase 1 precursor
  misc_feature (56)..(285): NCBI GI NO: 14485575 NR Description: heme oxygenase 1 [Lycopersicon esculentum]
  misc_feature (38)..(285): NCBI GI NO: 14485567 NR Description: heme oxygenase 1 [Glycine max]
  misc_feature (35)..(285): NCBI GI NO: 14485569 NR Description: heme oxygenase 3 [Glycine max]
MATTRLNPSCHFPASTRLSCESYLGLRTTGRISYARTLTAPRGYLAVKANGGQASVVTAAAITEKQQKKYPGESKGFVEEMRFVAMRLHTKDQAREGEKESRSPEEGPVAKWEPTVEGYLHFLVDSKLVYDTLEGIIDGSNFPTYAGFKNTGLERAESLRKDLEWFKEQGYEIPEPMAPGKTYSEYLKDLAENDPQAFICHFYNIYFAHSAGGQMIGTKVSKKILDNKELEFYKWDGQLSQLLQNVRQKLNKVAEWWTREEKSHCLEETEKSFKFSGEILRLILS

SEQ ID NO: 3961 - protein, 205 aa, Arabidopsis thaliana
  peptide (1)..(205): Ceres Seq. ID no. 12339134
  misc_feature (1)..(202): Pfam Name: Pfam Description:  Heme oxygenase
  misc_feature (1)..(205): NCBI GI NO: 15222425 NR Description: putative heme oxygenase; protein id: At1g69720
  misc_feature (1)..(205): NCBI GI NO: 15225771 NR Description: heme oxygenase 1 (HO1); protein id: At2g26670
  misc_feature (1)..(205): NCBI GI NO: 21450864 NR Description: putative heme oxygenase HO1 [Arabidopsis thaliana]
  misc_feature (1)..(205): NCBI GI NO: 14030647 NR Description: At2g26670/F18A8.4 [Arabidopsis thaliana]
  misc_feature (1)..(205): NCBI GI NO: 15217926 NR Description: plastid heme oxygenase, putative
  misc_feature (1)..(205): NCBI GI NO: 14485565 NR Description: heme oxygenase 4 [Arabidopsis thaliana]
  misc_feature (1)..(205): NCBI GI NO: 15076863 NR Description: putative heme oxygenase 1 precursor
  misc_feature (1)..(205): NCBI GI NO: 14485575 NR Description: heme oxygenase 1 [Lycopersicon esculentum]
  misc_feature (1)..(205): NCBI GI NO: 14485567 NR Description: heme oxygenase 1 [Glycine max]
  misc_feature (1)..(205): NCBI GI NO: 14485569 NR Description: heme oxygenase 3 [Glycine max]
MRFVAMRLHTKDQAREGEKESRSPEEGPVAKWEPTVEGYLHFLVDSKLVYDTLEGIIDGSNFPTYAGFKNTGLERAESLRKDLEWFKEQGYEIPEPMAPGKTYSEYLKDLAENDPQAFICHFYNIYFAHSAGGQMIGTKVSKKILDNKELEFYKWDGQLSQLLQNVRQKLNKVAEWWTREEKSHCLEETEKSFKFSGEILRLILS

SEQ ID NO: 3962 - DNA, 1048 bp, Arabidopsis thaliana
  misc_feature (1)..(1048): Ceres Seq. ID no. 12395524
aacacaccgaaaactgaatcaaatctcctagctcttctacgcaaaatcgagtgcatcgacaatggcggaacgtggtgtcgaacgtggtggagatcgcggcgatttcggacgtggattcggtggtcgcggcggtggaagaggtggtccgagaggtcgtggtcgccgtgcaggtcgtgctccagaggaggagaaatgggtgccagtgactaagcttggtcgtctcgtaaaggaaggtaagatcacaaagattgagcagatctacctccattctctcccagtcaaggagtaccagatcatagatttactcgtcggtccttcattgaaagacgaagtgatgaaaatcatgccggttcaaaaacaaaccagagccggtcagagaacgagattcaaggccttcatcgtcgtcggagatagtaacggtcacgtcggattaggagtcaaatgctccaaggaagttgcgacggcgatcagaggcgcgatcattctcgcgaaattgtctgtggttccgatacgaagaggttattggggtaacaagattggaaaaccacatacggttccgtgtaaggtaaccgggaaatgtggatctgttactgtacgtatggttccagctccgagaggttctggtattgtggcggctagagttcctaagaaggttcttcaattcgctggaattgatgatgtctttacttcttctagaggatccaccaaaactcttggaaacttcgtcaaggcaacatttgattgtctgcagaagacatacggattccttacaccggaattctggaaagagacgagattctcaaaatcaccataccaagagcacactgatttcttgcttatacctcctggcgtcaagatcagcgaggttgttgtagacaaaagcgtagagtaataccactttatcttgttacatgagacttgagtgttgtcaaaagctcaagtcagattttgttccaaccttggttttttgatttgtcggttataatgtctttagtaatctagatacgtatctgttttacactttgaattcaatcatacgaatcttctt

SEQ ID NO: 3963 - protein, 276 aa, Arabidopsis thaliana
  peptide (1)..(276): Ceres Seq. ID no. 12395525
  misc_feature (169)..(242): Pfam Name: Pfam Description:  Ribosomal protein S5, C-terminal domain
  misc_feature (1)..(276): NCBI GI NO: 15230312 NR Description: 40S ribosomal protein S2 homolog
  misc_feature (1)..(272): NCBI GI NO: 15217951 NR Description: ribosomal protein S2, putative
  misc_feature (1)..(272): NCBI GI NO: 21618011 NR Description: ribosomal protein S2, putative
  misc_feature (3)..(272): NCBI GI NO: 18406325 NR Description: ribosomal protein S2, putative
  misc_feature (3)..(272): NCBI GI NO: 25294520 NR Description: hypothetical protein RF12
  misc_feature (3)..(272): NCBI GI NO: 21539457 NR Description: ribosomal protein S2, putative
  misc_feature (3)..(258): NCBI GI NO: 15227443 NR Description: 40S ribosomal protein S2; protein id: At2g41840
  misc_feature (3)..(258): NCBI GI NO: 21553851 NR Description: 40S ribosomal protein S2 [Arabidopsis thaliana]
  misc_feature (1)..(276): NCBI GI NO: 30103021 NR Description: putative 40S ribosomal protein S2
  misc_feature (1)..(273): NCBI GI NO: 34393314 NR Description: putative 40S ribosomal protein S2
MAERGVERGGDRGDFGRGFGGRGGGRGGPRGRGRRAGRAPEEEKWVPVTKLGRLVKEGKITKIEQIYLHSLPVKEYQIIDLLVGPSLKDEVMKIMPVQKQTRAGQRTRFKAFIVVGDSNGHVGLGVKCSKEVATAIRGAIILAKLSVVPIRRGYWGNKIGKPHTVPCKVTGKCGSVTVRMVPAPRGSGIVAARVPKKVLQFAGIDDVFTSSRGSTKTLGNFVKATFDCLQKTYGFLTPEFWKETRFSKSPYQEHTDFLLIPPGVKISEVVVDKSVE

SEQ ID NO: 3964 - protein, 185 aa, Arabidopsis thaliana
  peptide (1)..(185): Ceres Seq. ID no. 12395526
  misc_feature (78)..(151): Pfam Name: Pfam Description:  Ribosomal protein S5, C-terminal domain
  misc_feature (1)..(185): NCBI GI NO: 15230312 NR Description: 40S ribosomal protein S2 homolog
  misc_feature (1)..(181): NCBI GI NO: 15217951 NR Description: ribosomal protein S2, putative
  misc_feature (1)..(181): NCBI GI NO: 21618011 NR Description: ribosomal protein S2, putative
  misc_feature (1)..(181): NCBI GI NO: 18406325 NR Description: ribosomal protein S2, putative
  misc_feature (1)..(181): NCBI GI NO: 25294520 NR Description: hypothetical protein RF12
  misc_feature (1)..(181): NCBI GI NO: 21539457 NR Description: ribosomal protein S2, putative
  misc_feature (1)..(167): NCBI GI NO: 15227443 NR Description: 40S ribosomal protein S2; protein id: At2g41840
  misc_feature (1)..(167): NCBI GI NO: 21553851 NR Description: 40S ribosomal protein S2 [Arabidopsis thaliana]
  misc_feature (1)..(185): NCBI GI NO: 30103021 NR Description: putative 40S ribosomal protein S2
  misc_feature (1)..(182): NCBI GI NO: 34393314 NR Description: putative 40S ribosomal protein S2
MKIMPVQKQTRAGQRTRFKAFIVVGDSNGHVGLGVKCSKEVATAIRGAIILAKLSVVPIRRGYWGNKIGKPHTVPCKVTGKCGSVTVRMVPAPRGSGIVAARVPKKVLQFAGIDDVFTSSRGSTKTLGNFVKATFDCLQKTYGFLTPEFWKETRFSKSPYQEHTDFLLIPPGVKISEVVVDKSVE

SEQ ID NO: 3965 - protein, 182 aa, Arabidopsis thaliana
  peptide (1)..(182): Ceres Seq. ID no. 12395527
  misc_feature (75)..(148): Pfam Name: Pfam Description:  Ribosomal protein S5, C-terminal domain
  misc_feature (1)..(182): NCBI GI NO: 15230312 NR Description: 40S ribosomal protein S2 homolog
  misc_feature (1)..(178): NCBI GI NO: 15217951 NR Description: ribosomal protein S2, putative
  misc_feature (1)..(178): NCBI GI NO: 21618011 NR Description: ribosomal protein S2, putative
  misc_feature (1)..(178): NCBI GI NO: 18406325 NR Description: ribosomal protein S2, putative
  misc_feature (1)..(178): NCBI GI NO: 25294520 NR Description: hypothetical protein RF12
  misc_feature (1)..(178): NCBI GI NO: 21539457 NR Description: ribosomal protein S2, putative
  misc_feature (1)..(164): NCBI GI NO: 15227443 NR Description: 40S ribosomal protein S2; protein id: At2g41840
  misc_feature (1)..(164): NCBI GI NO: 21553851 NR Description: 40S ribosomal protein S2 [Arabidopsis thaliana]
  misc_feature (1)..(182): NCBI GI NO: 30103021 NR Description: putative 40S ribosomal protein S2
  misc_feature (1)..(179): NCBI GI NO: 34393314 NR Description: putative 40S ribosomal protein S2
MPVQKQTRAGQRTRFKAFIVVGDSNGHVGLGVKCSKEVATAIRGAIILAKLSVVPIRRGYWGNKIGKPHTVPCKVTGKCGSVTVRMVPAPRGSGIVAARVPKKVLQFAGIDDVFTSSRGSTKTLGNFVKATFDCLQKTYGFLTPEFWKETRFSKSPYQEHTDFLLIPPGVKISEVVVDKSVE

SEQ ID NO: 3966 - DNA, 1546 bp, Arabidopsis thaliana
  misc_feature (1)..(1546): Ceres Seq. ID no. 13497314
ataaagaagtaaagctttgccggagatttagcaaacacaaacacaaaaaacaaaaccaactcagacgaatgtgattttttcttcttgagtgaattgttgtaaaaaaatgatgatcggagaatctcatcgtggttttaatccaacggttcatattcctccatggccactttctgaagatctaacggtgtctgatatttacggaagtccagacggaggaagtagtatgatggaagctttggctgagttacaacgttatcttccgtcaaacgaaccggatccggattcagatccggatctctcgggtccggattcaccaatcgatgcttatacatgcgatcattttcggatgtatgagtttaaagtgagacgttgtgctcgtggccggagccatgattggacggagtgtccttacgctcatcccggagaaaaagctcgccgtcgtgatccgaggaagtttcattactccggtacggcgtgtcctgagtttcgtaaaggttgttgcaagagaggagacgcatgtgagttttctcatggtgtttttgagtgttggcttcacccggcgcgttaccggactcagccgtgtaaagacggtggtaactgtcgccgtcgtgtttgtttctttgctcattcgccggatcagattagggttttgcctaatcaaagccctgatcgtgttgattcgttcgacgttttgtctcctacgattcgtagagcgtttcagttttcgatttctccgtcgtctaactcgccgccggtgagtccacgaggtgactcggactcgtcgtgttcgttactgagtcgttcactcgggtctaatctgggaaacgacgtcgttgcgtctctcaggaatctgcaacttaataaagtgaagtcttctctttcgtcgtcatacaacaatcaaatcggaggatacggatccggattcgggtcgcctcgtggatcggttttgggtcctggtttccgtagcttaccaactacaccgacccgacctggttttatgaacatttgggagaatggcttggaggaagaaccggcgatggaacgggtcgagtcgggtcgtgaactgcgagcgcagctgttcgagaagctgagcaaagagaattgcatgggtcggattgaaccggatccggatcagggagcgggtgatactcctgatgtcgggtgggtctctgacttggttatgtgatttgaaccggattcgtaaaccggagtgtctgaaatttctttgataaagattaattaaaggattattatcggcatgggaggttttttaatggatctcttcttaggaaaagaggagatttctctgcaagttttttttttgtatatttattatttcctaatttcgtataatctctgttccataatcgatgattcgagggagattcctcagtgtataggagttgcttaggatttttcattatgatggattcactaatattgatattgttggttattgttttttttatatattatgatgtaagatgcaagtcgcaatgtaattattaaatatcttatgaatgaaatgagaatgtaaattatttat

SEQ ID NO: 3967 - protein, 359 aa, Arabidopsis thaliana
  peptide (1)..(359): Ceres Seq. ID no. 13497315
  misc_feature (119)..(144): Pfam Name: and similar Pfam Description: Zinc finger C-x8-C-x5-C-x3-H type
  misc_feature (1)..(359): NCBI GI NO: 15224852 NR Description: CCCH-type zinc finger protein -related
  misc_feature (1)..(359): NCBI GI NO: 15233491 NR Description: expressed protein [Arabidopsis thaliana]
  misc_feature (1)..(219): NCBI GI NO: 15225213 NR Description: CCCH-type zinc finger protein -related
  misc_feature (1)..(219): NCBI GI NO: 21593538 NR Description: putative CCCH-type zinc finger protein
  misc_feature (1)..(223): NCBI GI NO: 34906436 NR Description: putative zinc finger transcription factor
  misc_feature (105)..(219): NCBI GI NO: 1800279 NR Description: putative Cys3His zinc finger protein ATCTH
  misc_feature (258)..(335): NCBI GI NO: 1800279 NR Description: putative Cys3His zinc finger protein ATCTH
  misc_feature (7)..(260): NCBI GI NO: 15219557 NR Description: expressed protein [Arabidopsis thaliana]
  misc_feature (7)..(260): NCBI GI NO: 26449538 NR Description: unknown protein [Arabidopsis thaliana]
  misc_feature (20)..(260): NCBI GI NO: 28273376 NR Description: unknown protein
MMIGESHRGFNPTVHIPPWPLSEDLTVSDIYGSPDGGSSMMEALAELQRYLPSNEPDPDSDPDLSGPDSPIDAYTCDHFRMYEFKVRRCARGRSHDWTECPYAHPGEKARRRDPRKFHYSGTACPEFRKGCCKRGDACEFSHGVFECWLHPARYRTQPCKDGGNCRRRVCFFAHSPDQIRVLPNQSPDRVDSFDVLSPTIRRAFQFSISPSSNSPPVSPRGDSDSSCSLLSRSLGSNLGNDVVASLRNLQLNKVKSSLSSSYNNQIGGYGSGFGSPRGSVLGPGFRSLPTTPTRPGFMNIWENGLEEEPAMERVESGRELRAQLFEKLSKENCMGRIEPDPDQGAGDTPDVGWVSDLVM

SEQ ID NO: 3968 - protein, 358 aa, Arabidopsis thaliana
  peptide (1)..(358): Ceres Seq. ID no. 13497316
  misc_feature (118)..(143): Pfam Name: and similar Pfam Description: Zinc finger C-x8-C-x5-C-x3-H type
  misc_feature (1)..(358): NCBI GI NO: 15224852 NR Description: CCCH-type zinc finger protein -related
  misc_feature (1)..(358): NCBI GI NO: 15233491 NR Description: expressed protein [Arabidopsis thaliana]
  misc_feature (1)..(218): NCBI GI NO: 15225213 NR Description: CCCH-type zinc finger protein -related
  misc_feature (1)..(218): NCBI GI NO: 21593538 NR Description: putative CCCH-type zinc finger protein
  misc_feature (1)..(222): NCBI GI NO: 34906436 NR Description: putative zinc finger transcription factor
  misc_feature (104)..(218): NCBI GI NO: 1800279 NR Description: putative Cys3His zinc finger protein ATCTH
  misc_feature (257)..(334): NCBI GI NO: 1800279 NR Description: putative Cys3His zinc finger protein ATCTH
  misc_feature (6)..(259): NCBI GI NO: 15219557 NR Description: expressed protein [Arabidopsis thaliana]
  misc_feature (6)..(259): NCBI GI NO: 26449538 NR Description: unknown protein [Arabidopsis thaliana]
  misc_feature (19)..(259): NCBI GI NO: 28273376 NR Description: unknown protein
MIGESHRGFNPTVHIPPWPLSEDLTVSDIYGSPDGGSSMMEALAELQRYLPSNEPDPDSDPDLSGPDSPIDAYTCDHFRMYEFKVRRCARGRSHDWTECPYAHPGEKARRRDPRKFHYSGTACPEFRKGCCKRGDACEFSHGVFECWLHPARYRTQPCKDGGNCRRRVCFFAHSPDQIRVLPNQSPDRVDSFDVLSPTIRRAFQFSISPSSNSPPVSPRGDSDSSCSLLSRSLGSNLGNDVVASLRNLQLNKVKSSLSSSYNNQIGGYGSGFGSPRGSVLGPGFRSLPTTPTRPGFMNIWENGLEEEPAMERVESGRELRAQLFEKLSKENCMGRIEPDPDQGAGDTPDVGWVSDLVM

SEQ ID NO: 3969 - protein, 320 aa, Arabidopsis thaliana
  peptide (1)..(320): Ceres Seq. ID no. 13497317
  misc_feature (80)..(105): Pfam Name: and similar Pfam Description: Zinc finger C-x8-C-x5-C-x3-H type
  misc_feature (1)..(320): NCBI GI NO: 15224852 NR Description: CCCH-type zinc finger protein -related
  misc_feature (1)..(320): NCBI GI NO: 15233491 NR Description: expressed protein [Arabidopsis thaliana]
  misc_feature (1)..(180): NCBI GI NO: 15225213 NR Description: CCCH-type zinc finger protein -related
  misc_feature (1)..(180): NCBI GI NO: 21593538 NR Description: putative CCCH-type zinc finger protein
  misc_feature (1)..(184): NCBI GI NO: 34906436 NR Description: putative zinc finger transcription factor
  misc_feature (66)..(180): NCBI GI NO: 1800279 NR Description: putative Cys3His zinc finger protein ATCTH
  misc_feature (219)..(296): NCBI GI NO: 1800279 NR Description: putative Cys3His zinc finger protein ATCTH
  misc_feature (1)..(221): NCBI GI NO: 15219557 NR Description: expressed protein [Arabidopsis thaliana]
  misc_feature (1)..(221): NCBI GI NO: 26449538 NR Description: unknown protein [Arabidopsis thaliana]
  misc_feature (1)..(221): NCBI GI NO: 28273376 NR Description: unknown protein
MMEALAELQRYLPSNEPDPDSDPDLSGPDSPIDAYTCDHFRMYEFKVRRCARGRSHDWTECPYAHPGEKARRRDPRKFHYSGTACPEFRKGCCKRGDACEFSHGVFECWLHPARYRTQPCKDGGNCRRRVCFFAHSPDQIRVLPNQSPDRVDSFDVLSPTIRRAFQFSISPSSNSPPVSPRGDSDSSCSLLSRSLGSNLGNDVVASLRNLQLNKVKSSLSSSYNNQIGGYGSGFGSPRGSVLGPGFRSLPTTPTRPGFMNIWENGLEEEPAMERVESGRELRAQLFEKLSKENCMGRIEPDPDQGAGDTPDVGWVSDLVM

SEQ ID NO: 3970 - DNA, 1212 bp, Arabidopsis thaliana
  misc_feature (1)..(1212): Ceres Seq. ID no. 12421334
atttttctgatattagaaatttagttgaaacattacctgcaaatttgcagttcttaactagatagcttgctcttttagcgatccttaaggtatctgaaattgggggactcttattataaaagatatgatgatttgttactctccaattacaacatgttctaggaatgctatcagtatcaagaggcatttaggctctcgcctctacggcgttgtggctcacggatcatctaaattctcctgctacagtcttttatcaggactttcaagaagacattataccggttttcgtgtatcggtctctaatagaccttctagttggcacgataaaggactttttgggtcagtattgatcaatcgaccaactgttgctcctaaggaaaagcttgaagtttctttcttgtcccctgaggctaatatgaaatgctcgaagatagaatctaacatgagaaatctctattgttattcaagatttgcatatacaggtgtgattgttagcttgcttgtttgttattcttcgacttcccaatcagcgtacgcagattcttcaagggataaagatgctaacaacgtgcatcatcattcgtctgatggtaaattccacaatgggaaaagagtttatactgattactctatcattggtattccgggggatggcagatgtttgtttcgttctgtagctcacggattctgcttacgctctgggaaactagctccaggcgagaagatgcagagagaactcgctgacgaattacgtaccagggttgctgatgagtttatccaaagaagacaggaaacagaatggttcgtggaaggagatttcgacacctacgtcagacaaattcgggatccacacgtgtggggaggtgaacctgaactcttcatggcttcacacgttctccagatgccaatcacagtgtatatgaaagacgataaagctggaggactgataagtattgcagaatatggtcaagaatacggtaaagacgacccaatccgagtcctataccatggttttggtcattacgatgcccttttgcttcacgagagtaaagcttcgattccaaaatctaaactttagtatacttagttttgcatctttgacttttgtcaggtgttgatgatgtttttgtttactgacacaaccactatctgtatgccttgtagaatgtaacctttttttaccttttactttgaataaaaattttcagtttc

SEQ ID NO: 3971 - protein, 317 aa, Arabidopsis thaliana
  peptide (1)..(317): Ceres Seq. ID no. 12421335
  misc_feature (174)..(300): Pfam Name: Pfam Description:  OTU-like cysteine protease
  misc_feature (1)..(317): NCBI GI NO: 18410816 NR Description: auxin-regulated protein; protein id: At3g57810
  misc_feature (1)..(317): NCBI GI NO: 11280708 NR Description: hypothetical protein T10K17
  misc_feature (168)..(287): NCBI GI NO: 34902010 NR Description: unknown protein
  misc_feature (171)..(213): NCBI GI NO: 34907704 NR Description: P0035F12.12
MMICYSPITTCSRNAISIKRHLGSRLYGVVAHGSSKFSCYSLLSGLSRRHYTGFRVSVSNRPSSWHDKGLFGSVLINRPTVAPKEKLEVSFLSPEANMKCSKIESNMRNLYCYSRFAYTGVIVSLLVCYSSTSQSAYADSSRDKDANNVHHHSSDGKFHNGKRVYTDYSIIGIPGDGRCLFRSVAHGFCLRSGKLAPGEKMQRELADELRTRVADEFIQRRQETEWFVEGDFDTYVRQIRDPHVWGGEPELFMASHVLQMPITVYMKDDKAGGLISIAEYGQEYGKDDPIRVLYHGFGHYDALLLHESKASIPKSKL

SEQ ID NO: 3972 - protein, 316 aa, Arabidopsis thaliana
  peptide (1)..(316): Ceres Seq. ID no. 12421336
  misc_feature (173)..(299): Pfam Name: Pfam Description:  OTU-like cysteine protease
  misc_feature (1)..(316): NCBI GI NO: 18410816 NR Description: auxin-regulated protein; protein id: At3g57810
  misc_feature (1)..(316): NCBI GI NO: 11280708 NR Description: hypothetical protein T10K17
  misc_feature (167)..(286): NCBI GI NO: 34902010 NR Description: unknown protein
  misc_feature (170)..(212): NCBI GI NO: 34907704 NR Description: P0035F12.12
MICYSPITTCSRNAISIKRHLGSRLYGVVAHGSSKFSCYSLLSGLSRRHYTGFRVSVSNRPSSWHDKGLFGSVLINRPTVAPKEKLEVSFLSPEANMKCSKIESNMRNLYCYSRFAYTGVIVSLLVCYSSTSQSAYADSSRDKDANNVHHHSSDGKFHNGKRVYTDYSIIGIPGDGRCLFRSVAHGFCLRSGKLAPGEKMQRELADELRTRVADEFIQRRQETEWFVEGDFDTYVRQIRDPHVWGGEPELFMASHVLQMPITVYMKDDKAGGLISIAEYGQEYGKDDPIRVLYHGFGHYDALLLHESKASIPKSKL

SEQ ID NO: 3973 - protein, 220 aa, Arabidopsis thaliana
  peptide (1)..(220): Ceres Seq. ID no. 12421337
  misc_feature (77)..(203): Pfam Name: Pfam Description:  OTU-like cysteine protease
  misc_feature (1)..(220): NCBI GI NO: 18410816 NR Description: auxin-regulated protein; protein id: At3g57810
  misc_feature (1)..(220): NCBI GI NO: 11280708 NR Description: hypothetical protein T10K17
  misc_feature (71)..(190): NCBI GI NO: 34902010 NR Description: unknown protein
  misc_feature (74)..(116): NCBI GI NO: 34907704 NR Description: P0035F12.12
MKCSKIESNMRNLYCYSRFAYTGVIVSLLVCYSSTSQSAYADSSRDKDANNVHHHSSDGKFHNGKRVYTDYSIIGIPGDGRCLFRSVAHGFCLRSGKLAPGEKMQRELADELRTRVADEFIQRRQETEWFVEGDFDTYVRQIRDPHVWGGEPELFMASHVLQMPITVYMKDDKAGGLISIAEYGQEYGKDDPIRVLYHGFGHYDALLLHESKASIPKSKL

SEQ ID NO: 3974 - DNA, 1289 bp, Arabidopsis thaliana
  misc_feature (1)..(1289): Ceres Seq. ID no. 12580406
gaaacagaaggcttaatatcaacatcttaaaatttactaaaaattgaaaacactaaagaggaaattaagtgaccaagtcttcttcttctttactctctcctttctgttaccgtcgaaaaaatcgagctaatgtccggtgataaccagatccgaatcggactcttaagctgcacaaacaaagtccgcaaactctctcgagctataaatctctctccaaacgctactatatccgccatagccaccacaagctccatcgaagaagcaaaatcatttgctaaatccaacaatttccctccgaatacaaagatccacagctcctacgagtcacttctagaagatcccgacgtcgacgccgtctatttccctatccccactcgcctccacgtcgagtgggctacactcgccgctattaagggtaaacatatactccttgataagcctgttgctttaaacgtagctgagtttgatcagatcgttgaagcttgtgaggttaatggtgttcaatttatggatggaactcagtggatgcataaccctagaacggataagattaaggaatttgtgaatgatttagagacttttggtcagattaaatctttgtttctcatttgctgcgagtgatgatttcttaaaacatgatattcgtgtaaagcctggtcttgatggacttggagctctcggtgatgctggatggtatacgatccaagcgattcttcttgttaacaactttaaacttccaaagaccgttactgctttgtcctgttctgttttaaacgatgcggggattgttctttcttgtggtgcgttgtttgattgggaagatggggtcaatgcaacgatttactgttctttcttggcgaatttgacgatggagataactgcgattggtacgaaaggtagccttcgggttcatgattttgttataccgtatatggaaaccgaggctgtgtttactacaagtggtggaggttgtgttagtgaacataaagttatgactgtgcttccacaagagacgtgtatggttatggagtttgctcggttggttggagaaattaaaaacagaggagctaaaccggatgggttttggatgaggtttagccggaatacgcagttgcttgttgatgctgtgaaagagtcgattgataataaccttgaacccgtgtttctctccggccggtgagaaagagcttagaagttagattagctttgtatttttctataaaaaaaatatcatgacacatgtcaacatttaatcgataaatttggcataaaatatcgaaaacaatttc

SEQ ID NO: 3975 - protein, 163 aa, Arabidopsis thaliana
  peptide (1)..(163): Ceres Seq. ID no. 12580407
  misc_feature (7)..(130): Pfam Name: Pfam Description:  Oxidoreductase family
  misc_feature (1)..(158): NCBI GI NO: 18399170 NR Description: expressed protein; protein id: At1g34200
  misc_feature (1)..(158): NCBI GI NO: 25518452 NR Description: hypothetical protein F23M19.12
  misc_feature (1)..(157): NCBI GI NO: 15233990 NR Description: AX110P -like protein; protein id: At4g09670
  misc_feature (25)..(157): NCBI GI NO: 21954073 NR Description: putative AX110P protein [Arabidopsis thaliana]
  misc_feature (7)..(162): NCBI GI NO: 7488933 NR Description: protein AX110P - carrot
  misc_feature (7)..(158): NCBI GI NO: 37534168 NR Description: putative oxidoreductase
  misc_feature (1)..(158): NCBI GI NO: 15218937 NR Description: oxidoreductase, putative; protein id: At1g66130.1
  misc_feature (8)..(157): NCBI GI NO: 17549134 NR Description: CONSERVED HYPOTHETICAL PROTEIN
  misc_feature (8)..(157): NCBI GI NO: 32474689 NR Description: putative oxidoreductase [Pirellula sp.]
  misc_feature (5)..(155): NCBI GI NO: 15616405 NR Description: oxidoreductase [Bacillus halodurans]
MSGDNQIRIGLLSCTNKVRKLSRAINLSPNATISAIATTSSIEEAKSFAKSNNFPPNTKIHSSYESLLEDPDVDAVYFPIPTRLHVEWATLAAIKGKHILLDKPVALNVAEFDQIVEACEVNGVQFMDGTQWMHNPRTDKIKEFVNDLETFGQIKSLFLICCE

SEQ ID NO: 3976 - protein, 103 aa, Arabidopsis thaliana
  peptide (1)..(103): Ceres Seq. ID no. 12580408
  misc_feature (1)..(103): NCBI GI NO: 18399170 NR Description: expressed protein; protein id: At1g34200
  misc_feature (1)..(103): NCBI GI NO: 25518452 NR Description: hypothetical protein F23M19.12
  misc_feature (1)..(103): NCBI GI NO: 15233990 NR Description: AX110P -like protein; protein id: At4g09670
  misc_feature (1)..(103): NCBI GI NO: 21954073 NR Description: putative AX110P protein [Arabidopsis thaliana]
  misc_feature (1)..(91): NCBI GI NO: 7488933 NR Description: protein AX110P - carrot
  misc_feature (1)..(56): NCBI GI NO: 37534168 NR Description: putative oxidoreductase
  misc_feature (1)..(100): NCBI GI NO: 15218937 NR Description: oxidoreductase, putative; protein id: At1g66130.1
  misc_feature (1)..(47): NCBI GI NO: 15218937 NR Description: oxidoreductase, putative; protein id: At1g66130.1
  misc_feature (1)..(98): NCBI GI NO: 17549134 NR Description: CONSERVED HYPOTHETICAL PROTEIN
  misc_feature (1)..(30): NCBI GI NO: 32474689 NR Description: putative oxidoreductase [Pirellula sp.]
MEITAIGTKGSLRVHDFVIPYMETEAVFTTSGGGCVSEHKVMTVLPQETCMVMEFARLVGEIKNRGAKPDGFWMRFSRNTQLLVDAVKESIDNNLEPVFLSGR

SEQ ID NO: 3977 - protein, 82 aa, Arabidopsis thaliana
  peptide (1)..(82): Ceres Seq. ID no. 12580409
  misc_feature (1)..(82): NCBI GI NO: 18399170 NR Description: expressed protein; protein id: At1g34200
  misc_feature (1)..(82): NCBI GI NO: 25518452 NR Description: hypothetical protein F23M19.12
  misc_feature (1)..(82): NCBI GI NO: 15233990 NR Description: AX110P -like protein; protein id: At4g09670
  misc_feature (1)..(82): NCBI GI NO: 21954073 NR Description: putative AX110P protein [Arabidopsis thaliana]
  misc_feature (1)..(70): NCBI GI NO: 7488933 NR Description: protein AX110P - carrot
  misc_feature (1)..(35): NCBI GI NO: 37534168 NR Description: putative oxidoreductase
  misc_feature (1)..(79): NCBI GI NO: 15218937 NR Description: oxidoreductase, putative; protein id: At1g66130.1
  misc_feature (1)..(26): NCBI GI NO: 15218937 NR Description: oxidoreductase, putative; protein id: At1g66130.1
  misc_feature (1)..(77): NCBI GI NO: 17549134 NR Description: CONSERVED HYPOTHETICAL PROTEIN
METEAVFTTSGGGCVSEHKVMTVLPQETCMVMEFARLVGEIKNRGAKPDGFWMRFSRNTQLLVDAVKESIDNNLEPVFLSGR

SEQ ID NO: 3978 - DNA, 1378 bp, Arabidopsis thaliana
  misc_feature (1)..(1378): Ceres Seq. ID no. 13574988
aagccgctgcattggatcatccgaacaaggaagacgttacccacgagaccgtaatcacacgtggcggattctcagatattctctctttttcttctttacccggaaaaataaagtttctgttcttcttttttcttctctgggtttgagaattggtgtaagagaaacgattgaggttttctcttattatctaaacccaccaagtctttcaggattttagccagagaagcttgagtctttgattagggacatgtcaacctccgccgcttccttgtgttgttcatcaacccaggtcaatgggtttggtcttaggcctgaaaggtcgcttctttaccaacccacttccttttctttctccagaaggagaactcatggaattgtcaaggcctcatctcgggttgataggttttcgaaaagtgatatcattgtttctccctctattctctcggctaatttcgccaaattaggcgagcaggtaaaagcagtggagttggcaggttgtgattggattcatgttgatgtcatggacggtcgttttgttcccaacattactatcggacctctcgtggttgatgctttgcgccctgtgacagatcttcctttggatgttcatctgatgatagtggaacccgagcagagagtaccggatttcatcaaagcaggtgcagatattgtcagtgtacattgtgaacagcaatccaccatccatttgcatcgtaccgtcaatcaaataaaaagcttaggggctaaagctggagttgttctaaaccctggaaccccattgagtgcaatagaatatgtcttggatatggtggatctggtcttgatcatgtcggtcaaccctggttttggtggacagagctttattgaaagccaagtaaagaaaatctcggacttgaggaaaatgtgtgcagagaagggagtaaacccatggattgaagttgatggtggtgtcactccagcgaatgcgtacaaggttattgaggctggagcaaatgctctagtggctggatcagctgtatttggagctaaggactacgcagaagctataaaaggaattaaggccagcaaacgaccagcagctgtagctgtgtaatgtgaagcaacagcaagcgaaaagactctgttaaacttaggaacagttaaaaagtgaatgacgatcaccagaagtcccagatgttgtcgttgtgtctccattcgccataacattcacaagaatcaaactcaatatcttcaaagtaggctcctctatactattctgtaccattgtcttgtaaattgaggatatgcagattccatacattttgcaatgaaacactgtgataagaaatatgttgttacatatgtgtttttgacttataataaagcatttcatttgtct

SEQ ID NO: 3979 - protein, 281 aa, Arabidopsis thaliana
  peptide (1)..(281): Ceres Seq. ID no. 13574989
  misc_feature (59)..(261): Pfam Name: Pfam Description:  Ribulose-phosphate 3 epimerase family
  misc_feature (1)..(281): NCBI GI NO: 15240250 NR Description: ribulose-5-phosphate-3-epimerase
  misc_feature (1)..(281): NCBI GI NO: 20339362 NR Description: ribulose-5-phosphate-3-epimerase [Pisum sativum]
  misc_feature (4)..(281): NCBI GI NO: 2833386 NR Description: Ribulose-phosphate 3-epimerase
  misc_feature (5)..(281): NCBI GI NO: 3264790 NR Description: ribulose-phosphate 3-epimerase transit form
  misc_feature (4)..(281): NCBI GI NO: 2499728 NR Description: Ribulose-phosphate 3-epimerase
  misc_feature (46)..(281): NCBI GI NO: 3264792 NR Description: ribulose-phosphate 3-epimerase mature form
  misc_feature (6)..(279): NCBI GI NO: 19071636 NR Description: ribulose-5-phosphate-3-epimerase
  misc_feature (6)..(279): NCBI GI NO: 6647761 NR Description: Ribulose-phosphate 3-epimerase
  misc_feature (48)..(276): NCBI GI NO: 4930130 NR Description: Chain A
  misc_feature (54)..(276): NCBI GI NO: 17228277 NR Description: ribulose-phosphate 3-epimerase
MSTSAASLCCSSTQVNGFGLRPERSLLYQPTSFSFSRRRTHGIVKASSRVDRFSKSDIIVSPSILSANFAKLGEQVKAVELAGCDWIHVDVMDGRFVPNITIGPLVVDALRPVTDLPLDVHLMIVEPEQRVPDFIKAGADIVSVHCEQQSTIHLHRTVNQIKSLGAKAGVVLNPGTPLSAIEYVLDMVDLVLIMSVNPGFGGQSFIESQVKKISDLRKMCAEKGVNPWIEVDGGVTPANAYKVIEAGANALVAGSAVFGAKDYAEAIKGIKASKRPAAVAV

SEQ ID NO: 3980 - protein, 190 aa, Arabidopsis thaliana
  peptide (1)..(190): Ceres Seq. ID no. 13574990
  misc_feature (1)..(170): Pfam Name: Pfam Description:  Ribulose-phosphate 3 epimerase family
  misc_feature (1)..(190): NCBI GI NO: 15240250 NR Description: ribulose-5-phosphate-3-epimerase
  misc_feature (1)..(190): NCBI GI NO: 20339362 NR Description: ribulose-5-phosphate-3-epimerase [Pisum sativum]
  misc_feature (1)..(190): NCBI GI NO: 2833386 NR Description: Ribulose-phosphate 3-epimerase
  misc_feature (1)..(190): NCBI GI NO: 3264790 NR Description: ribulose-phosphate 3-epimerase transit form
  misc_feature (1)..(190): NCBI GI NO: 2499728 NR Description: Ribulose-phosphate 3-epimerase
  misc_feature (1)..(190): NCBI GI NO: 3264792 NR Description: ribulose-phosphate 3-epimerase mature form
  misc_feature (1)..(188): NCBI GI NO: 19071636 NR Description: ribulose-5-phosphate-3-epimerase
  misc_feature (1)..(188): NCBI GI NO: 6647761 NR Description: Ribulose-phosphate 3-epimerase
  misc_feature (1)..(185): NCBI GI NO: 4930130 NR Description: Chain A
  misc_feature (1)..(185): NCBI GI NO: 17228277 NR Description: ribulose-phosphate 3-epimerase
MDGRFVPNITIGPLVVDALRPVTDLPLDVHLMIVEPEQRVPDFIKAGADIVSVHCEQQSTIHLHRTVNQIKSLGAKAGVVLNPGTPLSAIEYVLDMVDLVLIMSVNPGFGGQSFIESQVKKISDLRKMCAEKGVNPWIEVDGGVTPANAYKVIEAGANALVAGSAVFGAKDYAEAIKGIKASKRPAAVAV

SEQ ID NO: 3981 - protein, 159 aa, Arabidopsis thaliana
  peptide (1)..(159): Ceres Seq. ID no. 13574991
  misc_feature (1)..(139): Pfam Name: Pfam Description:  Ribulose-phosphate 3 epimerase family
  misc_feature (1)..(159): NCBI GI NO: 15240250 NR Description: ribulose-5-phosphate-3-epimerase
  misc_feature (1)..(159): NCBI GI NO: 20339362 NR Description: ribulose-5-phosphate-3-epimerase [Pisum sativum]
  misc_feature (1)..(159): NCBI GI NO: 2833386 NR Description: Ribulose-phosphate 3-epimerase
  misc_feature (1)..(159): NCBI GI NO: 3264790 NR Description: ribulose-phosphate 3-epimerase transit form
  misc_feature (1)..(159): NCBI GI NO: 2499728 NR Description: Ribulose-phosphate 3-epimerase
  misc_feature (1)..(159): NCBI GI NO: 3264792 NR Description: ribulose-phosphate 3-epimerase mature form
  misc_feature (1)..(157): NCBI GI NO: 19071636 NR Description: ribulose-5-phosphate-3-epimerase
  misc_feature (1)..(157): NCBI GI NO: 6647761 NR Description: Ribulose-phosphate 3-epimerase
  misc_feature (1)..(154): NCBI GI NO: 4930130 NR Description: Chain A
  misc_feature (1)..(154): NCBI GI NO: 17228277 NR Description: ribulose-phosphate 3-epimerase
MIVEPEQRVPDFIKAGADIVSVHCEQQSTIHLHRTVNQIKSLGAKAGVVLNPGTPLSAIEYVLDMVDLVLIMSVNPGFGGQSFIESQVKKISDLRKMCAEKGVNPWIEVDGGVTPANAYKVIEAGANALVAGSAVFGAKDYAEAIKGIKASKRPAAVAV

SEQ ID NO: 3982 - DNA, 1402 bp, Arabidopsis thaliana
  misc_feature (1)..(1402): Ceres Seq. ID no. 12328386
aaaactttgtctcatcgcatctttttccccaaattctcacaaaccttctcttctcaattccaccaaaccctcagattctcaatctccgatcgtcggaaattctcagcgatggccggagctggcgtcgatgatttcgttaaaggaaatgtttttccgaatggtgtcgctctcatcactctcgatcgaaccaaagctctcaacgccatgaatttagatatggatataaagtataaaagctttcttgatgaatgggaatctgatccgagagtgaaatgtgttatcgttgaaggaagcacatctagggccttttgtgcagggatggatattaaaggagttgctgcagaaatccaaaaggacaaaaacacacctcttgtgcaaaaggtatttacagcagagtatacactgatatgtgcaattgctgcgtacaaaaagccatatatttcattgatggatggtataacaatgggatttggtcttggtctttctggacatggtcgctaccgtgtgataacagagaggacggttcttgccatgccagaaaatggaattggcttgttccctgatgtcgggttttcatatatagcagctcatagccctggaggaggatctgttggtgcttatcttggtttgactggtaaaaggatctccgcgccatcagacgcactgttcgttggtcttgggacgcattatgtaccatctgaaaagctagcttcattaaaggaagccattttgtcagctaacctttctgaggatcctaatcaagacatccaagcaactttatcaaaatacagcagcaatcctgaatctgaggcccatctcaaatcacttttgcctcacatagagtcagcctttagctcaaataagtctattaaggaaacaatagaagagctcaaaaagtaccagcaaagcactgagtcttcagttgtagaatgggctaatgaggcactcaaaggtttggaaaaaggagcaccattttctctttacctaacacaaaagtatttctccaatgttgcatgtgccaagagtaaacccgaaaacgaattagcaacacttaatggcgtaatgaaaactgagtatcgcattgcactaagatctgccctgcgtggtgattttgctgaaggtgttagagcagttttgattgacaaggatcagaatccaaaatggaacccgacaagcattgaagaggtagacgaaaacgaagtggaagctctgtttaaaccattaagtccagaagtggaagagttaaaagtctgattctcattttgctttctctgtttaagaactgtccaccaaagtattctatgaataaaaacaaatctttagccatgtgttgaagaagcttgttactgtataacctattcaataaattggcactttttttgaaccgttgcagattatcttt

SEQ ID NO: 3983 - protein, 417 aa, Arabidopsis thaliana
  peptide (1)..(417): Ceres Seq. ID no. 12328387
  misc_feature (56)..(232): Pfam Name: Pfam Description:  Enoyl-CoA hydratase/isomerase family
  misc_feature (37)..(417): NCBI GI NO: 15235689 NR Description: 3-hydroxyisobutyryl-coenzyme A hydrolase
  misc_feature (4)..(417): NCBI GI NO: 11994698 NR Description: 3-hydroxyisobutyryl-coenzyme A hydrolase-like
  misc_feature (40)..(417): NCBI GI NO: 15230101 NR Description: 3-hydroxyisobutyryl-coenzyme A hydrolase, putative
  misc_feature (39)..(332): NCBI GI NO: 23013936 NR Description: hypothetical protein
  misc_feature (310)..(411): NCBI GI NO: 23013936 NR Description: hypothetical protein
  misc_feature (58)..(298): NCBI GI NO: 23016278 NR Description: hypothetical protein
  misc_feature (355)..(390): NCBI GI NO: 23016278 NR Description: hypothetical protein
  misc_feature (53)..(417): NCBI GI NO: 15239206 NR Description: 3-hydroxyisobutyryl-coenzyme A hydrolase
  misc_feature (19)..(260): NCBI GI NO: 15224539 NR Description: 3-hydroxyisobutyryl-coenzyme A hydrolase
  misc_feature (291)..(416): NCBI GI NO: 15224539 NR Description: 3-hydroxyisobutyryl-coenzyme A hydrolase
KTLSHRIFFPKFSQTFSSQFHQTLRFSISDRRKFSAMAGAGVDDFVKGNVFPNGVALITLDRTKALNAMNLDMDIKYKSFLDEWESDPRVKCVIVEGSTSRAFCAGMDIKGVAAEIQKDKNTPLVQKVFTAEYTLICAIAAYKKPYISLMDGITMGFGLGLSGHGRYRVITERTVLAMPENGIGLFPDVGFSYIAAHSPGGGSVGAYLGLTGKRISAPSDALFVGLGTHYVPSEKLASLKEAILSANLSEDPNQDIQATLSKYSSNPESEAHLKSLLPHIESAFSSNKSIKETIEELKKYQQSTESSVVEWANEALKGLEKGAPFSLYLTQKYFSNVACAKSKPENELATLNGVMKTEYRIALRSALRGDFAEGVRAVLIDKDQNPKWNPTSIEEVDENEVEALFKPLSPEVEELKV

SEQ ID NO: 3984 - protein, 381 aa, Arabidopsis thaliana
  peptide (1)..(381): Ceres Seq. ID no. 12328388
  misc_feature (20)..(196): Pfam Name: Pfam Description:  Enoyl-CoA hydratase/isomerase family
  misc_feature (1)..(381): NCBI GI NO: 15235689 NR Description: 3-hydroxyisobutyryl-coenzyme A hydrolase
  misc_feature (1)..(381): NCBI GI NO: 11994698 NR Description: 3-hydroxyisobutyryl-coenzyme A hydrolase-like
  misc_feature (4)..(381): NCBI GI NO: 15230101 NR Description: 3-hydroxyisobutyryl-coenzyme A hydrolase, putative
  misc_feature (3)..(296): NCBI GI NO: 23013936 NR Description: hypothetical protein
  misc_feature (274)..(375): NCBI GI NO: 23013936 NR Description: hypothetical protein
  misc_feature (22)..(262): NCBI GI NO: 23016278 NR Description: hypothetical protein
  misc_feature (319)..(354): NCBI GI NO: 23016278 NR Description: hypothetical protein
  misc_feature (17)..(381): NCBI GI NO: 15239206 NR Description: 3-hydroxyisobutyryl-coenzyme A hydrolase
  misc_feature (1)..(224): NCBI GI NO: 15224539 NR Description: 3-hydroxyisobutyryl-coenzyme A hydrolase
  misc_feature (255)..(380): NCBI GI NO: 15224539 NR Description: 3-hydroxyisobutyryl-coenzyme A hydrolase
MAGAGVDDFVKGNVFPNGVALITLDRTKALNAMNLDMDIKYKSFLDEWESDPRVKCVIVEGSTSRAFCAGMDIKGVAAEIQKDKNTPLVQKVFTAEYTLICAIAAYKKPYISLMDGITMGFGLGLSGHGRYRVITERTVLAMPENGIGLFPDVGFSYIAAHSPGGGSVGAYLGLTGKRISAPSDALFVGLGTHYVPSEKLASLKEAILSANLSEDPNQDIQATLSKYSSNPESEAHLKSLLPHIESAFSSNKSIKETIEELKKYQQSTESSVVEWANEALKGLEKGAPFSLYLTQKYFSNVACAKSKPENELATLNGVMKTEYRIALRSALRGDFAEGVRAVLIDKDQNPKWNPTSIEEVDENEVEALFKPLSPEVEELKV

SEQ ID NO: 3985 - protein, 349 aa, Arabidopsis thaliana
  peptide (1)..(349): Ceres Seq. ID no. 12328389
  misc_feature (1)..(164): Pfam Name: Pfam Description:  Enoyl-CoA hydratase/isomerase family
  misc_feature (1)..(349): NCBI GI NO: 15235689 NR Description: 3-hydroxyisobutyryl-coenzyme A hydrolase
  misc_feature (1)..(349): NCBI GI NO: 11994698 NR Description: 3-hydroxyisobutyryl-coenzyme A hydrolase-like
  misc_feature (1)..(349): NCBI GI NO: 15230101 NR Description: 3-hydroxyisobutyryl-coenzyme A hydrolase, putative
  misc_feature (1)..(264): NCBI GI NO: 23013936 NR Description: hypothetical protein
  misc_feature (242)..(343): NCBI GI NO: 23013936 NR Description: hypothetical protein
  misc_feature (1)..(230): NCBI GI NO: 23016278 NR Description: hypothetical protein
  misc_feature (287)..(322): NCBI GI NO: 23016278 NR Description: hypothetical protein
  misc_feature (1)..(349): NCBI GI NO: 15239206 NR Description: 3-hydroxyisobutyryl-coenzyme A hydrolase
  misc_feature (1)..(192): NCBI GI NO: 15224539 NR Description: 3-hydroxyisobutyryl-coenzyme A hydrolase
  misc_feature (223)..(348): NCBI GI NO: 15224539 NR Description: 3-hydroxyisobutyryl-coenzyme A hydrolase
MNLDMDIKYKSFLDEWESDPRVKCVIVEGSTSRAFCAGMDIKGVAAEIQKDKNTPLVQKVFTAEYTLICAIAAYKKPYISLMDGITMGFGLGLSGHGRYRVITERTVLAMPENGIGLFPDVGFSYIAAHSPGGGSVGAYLGLTGKRISAPSDALFVGLGTHYVPSEKLASLKEAILSANLSEDPNQDIQATLSKYSSNPESEAHLKSLLPHIESAFSSNKSIKETIEELKKYQQSTESSVVEWANEALKGLEKGAPFSLYLTQKYFSNVACAKSKPENELATLNGVMKTEYRIALRSALRGDFAEGVRAVLIDKDQNPKWNPTSIEEVDENEVEALFKPLSPEVEELKV

SEQ ID NO: 3986 - DNA, 1684 bp, Arabidopsis thaliana
  misc_feature (1)..(1684): Ceres Seq. ID no. 12331203
gtttgtcactaagctctctctctctctccttctttttcgcaattcttctttcttcttcgacttttttttttcttcctctcttctctttggttttttggtgttgggttttatctgggttcctgatttcttcaacgaggaaggaaggaagaagaagagaaaagggacaagcgagaattactcttttctccttcaatttccgatgggttgtttcggatgcagtaagaaatcgagcaaacgatccgagactaacaaagatactgtcataaatagaaaaattgtcggtggtactacgagcgttgctaagagtgataagcgagacgatcagactcagcccagttcagattcaacaaaagtcagtccatatagagatgtaaacaatgaaggaggagttggtaaggaagatcagttatctttggatgtgaagggtttgaatctaaatgaccaagtcacagggaagaaagcacagacttttacttttcaagaacttgcagaagctacgggaaactttagatcggattgttttcttggtgaaggaggtttcggaaaagttttcaagggaactatagagaaattggatcaggttgttgcaatcaagcaacttgatcgtaatggggttcaaggaatcagggaatttgtggttgaggtattgactctaagtcttgctgaccatccgaatcttgtgaagcttattgggttttgtgctgagggtgatcagagactactggtgtacgagtatatgccgcaaggatcccttgaagatcatctacatgttctcccttctggtaaaaagcctcttgactggaacacccggatgaaaatagcagctggtgcagcaagaggtttagagtatctgcatgacagaatgacgccccctgtgatttaccgagatcttaaatgttcgaatattttgcttggtgaagactatcaaccgaaactatctgactttgggttggctaaagtaggaccaagcggggataaaacccatgtctcgacaagggttatgggaacgtacggatactgtgctcctgactacgctatgacgggtcagctcacatttaaatccgatatatacagttttggagtagtccttctcgagcttatcaccggaaggaaagcgattgacaatacaaaaacgcgtaaagatcagaatttggttggatgggcacgaccattgttcaaagacaggaggaacttcccaaaaatggttgatccattgcttcagggacaatacccagttagaggactgtaccaagcactagcaatatcagcaatgtgcgttcaagagcagcctaccatgagaccagtggtatctgatgtagtattggctctcaacttcttagcctcttctaaatatgatccgaatagccctagcagcagcagcgggaagaacccttcttttcacagagacagagatgatgaagagaaaagaccacacctcgtcaaggaaactgaatgtgaagggtcctcataggatatccaataagagagtggtaaaaaatcaaatctaattttggcttcaccaagaaattggggaaaaatataaaaccaactcaggtacatttttaacatctattgtggatgtaaatcttgactcggcttctttgtatgtagaatgtttctgttctgtagaaaaggagaaaaaaaaaaaccattttgttttgggacatatatacatatattgaac

SEQ ID NO: 3987 - protein, 489 aa, Arabidopsis thaliana
  peptide (1)..(489): Ceres Seq. ID no. 12331204
  misc_feature (67)..(489): NCBI GI NO: 15223024 NR Description: protein kinase, putative
  misc_feature (67)..(465): NCBI GI NO: 7573596 NR Description: protein kinase 1 [Populus nigra]
  misc_feature (69)..(476): NCBI GI NO: 7573598 NR Description: protein kinase 2 [Populus nigra]
  misc_feature (67)..(475): NCBI GI NO: 15226901 NR Description: putative protein kinase; protein id: At2g28590.1
  misc_feature (115)..(472): NCBI GI NO: 15238886 NR Description: protein kinase -like protein
  misc_feature (95)..(455): NCBI GI NO: 34394036 NR Description: putative protein serine/threonine kinase BNK1
  misc_feature (102)..(471): NCBI GI NO: 34907210 NR Description: putative serine/threonine kinase PBS1 protein
  misc_feature (102)..(455): NCBI GI NO: 10445209 NR Description: protein serine/threonine kinase BNK1
  misc_feature (154)..(470): NCBI GI NO: 11259782 NR Description: protein kinase-like - Arabidopsis thaliana
  misc_feature (154)..(453): NCBI GI NO: 30679773 NR Description: protein kinase family [Arabidopsis thaliana]
FVTKLSLSLLLFRNSSFFFDFFFSSSLLFGFLVLGFIWVPDFFNEEGRKKKRKGTSENYSFLLQFPMGCFGCSKKSSKRSETNKDTVINRKIVGGTTSVAKSDKRDDQTQPSSDSTKVSPYRDVNNEGGVGKEDQLSLDVKGLNLNDQVTGKKAQTFTFQELAEATGNFRSDCFLGEGGFGKVFKGTIEKLDQVVAIKQLDRNGVQGIREFVVEVLTLSLADHPNLVKLIGFCAEGDQRLLVYEYMPQGSLEDHLHVLPSGKKPLDWNTRMKIAAGAARGLEYLHDRMTPPVIYRDLKCSNILLGEDYQPKLSDFGLAKVGPSGDKTHVSTRVMGTYGYCAPDYAMTGQLTFKSDIYSFGVVLLELITGRKAIDNTKTRKDQNLVGWARPLFKDRRNFPKMVDPLLQGQYPVRGLYQALAISAMCVQEQPTMRPVVSDVVLALNFLASSKYDPNSPSSSSGKNPSFHRDRDDEEKRPHLVKETECEGSS

SEQ ID NO: 3988 - protein, 423 aa, Arabidopsis thaliana
  peptide (1)..(423): Ceres Seq. ID no. 12331205
  misc_feature (1)..(423): NCBI GI NO: 15223024 NR Description: protein kinase, putative
  misc_feature (1)..(399): NCBI GI NO: 7573596 NR Description: protein kinase 1 [Populus nigra]
  misc_feature (3)..(410): NCBI GI NO: 7573598 NR Description: protein kinase 2 [Populus nigra]
  misc_feature (1)..(409): NCBI GI NO: 15226901 NR Description: putative protein kinase; protein id: At2g28590.1
  misc_feature (49)..(406): NCBI GI NO: 15238886 NR Description: protein kinase -like protein
  misc_feature (29)..(389): NCBI GI NO: 34394036 NR Description: putative protein serine/threonine kinase BNK1
  misc_feature (36)..(405): NCBI GI NO: 34907210 NR Description: putative serine/threonine kinase PBS1 protein
  misc_feature (36)..(389): NCBI GI NO: 10445209 NR Description: protein serine/threonine kinase BNK1
  misc_feature (88)..(404): NCBI GI NO: 11259782 NR Description: protein kinase-like - Arabidopsis thaliana
  misc_feature (88)..(387): NCBI GI NO: 30679773 NR Description: protein kinase family [Arabidopsis thaliana]
MGCFGCSKKSSKRSETNKDTVINRKIVGGTTSVAKSDKRDDQTQPSSDSTKVSPYRDVNNEGGVGKEDQLSLDVKGLNLNDQVTGKKAQTFTFQELAEATGNFRSDCFLGEGGFGKVFKGTIEKLDQVVAIKQLDRNGVQGIREFVVEVLTLSLADHPNLVKLIGFCAEGDQRLLVYEYMPQGSLEDHLHVLPSGKKPLDWNTRMKIAAGAARGLEYLHDRMTPPVIYRDLKCSNILLGEDYQPKLSDFGLAKVGPSGDKTHVSTRVMGTYGYCAPDYAMTGQLTFKSDIYSFGVVLLELITGRKAIDNTKTRKDQNLVGWARPLFKDRRNFPKMVDPLLQGQYPVRGLYQALAISAMCVQEQPTMRPVVSDVVLALNFLASSKYDPNSPSSSSGKNPSFHRDRDDEEKRPHLVKETECEGSS

SEQ ID NO: 3989 - protein, 244 aa, Arabidopsis thaliana
  peptide (1)..(244): Ceres Seq. ID no. 12331206
  misc_feature (1)..(244): NCBI GI NO: 15223024 NR Description: protein kinase, putative
  misc_feature (1)..(220): NCBI GI NO: 7573596 NR Description: protein kinase 1 [Populus nigra]
  misc_feature (1)..(231): NCBI GI NO: 7573598 NR Description: protein kinase 2 [Populus nigra]
  misc_feature (1)..(230): NCBI GI NO: 15226901 NR Description: putative protein kinase; protein id: At2g28590.1
  misc_feature (1)..(227): NCBI GI NO: 15238886 NR Description: protein kinase -like protein
  misc_feature (1)..(210): NCBI GI NO: 34394036 NR Description: putative protein serine/threonine kinase BNK1
  misc_feature (1)..(226): NCBI GI NO: 34907210 NR Description: putative serine/threonine kinase PBS1 protein
  misc_feature (1)..(210): NCBI GI NO: 10445209 NR Description: protein serine/threonine kinase BNK1
  misc_feature (1)..(225): NCBI GI NO: 11259782 NR Description: protein kinase-like - Arabidopsis thaliana
  misc_feature (1)..(208): NCBI GI NO: 30679773 NR Description: protein kinase family [Arabidopsis thaliana]
MPQGSLEDHLHVLPSGKKPLDWNTRMKIAAGAARGLEYLHDRMTPPVIYRDLKCSNILLGEDYQPKLSDFGLAKVGPSGDKTHVSTRVMGTYGYCAPDYAMTGQLTFKSDIYSFGVVLLELITGRKAIDNTKTRKDQNLVGWARPLFKDRRNFPKMVDPLLQGQYPVRGLYQALAISAMCVQEQPTMRPVVSDVVLALNFLASSKYDPNSPSSSSGKNPSFHRDRDDEEKRPHLVKETECEGSS

SEQ ID NO: 3990 - DNA, 640 bp, Arabidopsis thaliana
  misc_feature (1)..(640): Ceres Seq. ID no. 12652846
atcatccatcactacacacatctcctattgcaaacgaacataaaacactacctaagagatcaatatggctggagtgatgaagttggcatgcttgctcttggcctgcatgattgtggccggtccaatcacatcgaacgctgcgctaagctgtggctcagttaacagcaacttggcagcgtgcattggctacgtgctccaaggtggtgtcattcccccagcgtgttgctccggcgttaaaaacctcaacagcatagccaagacgaccccagaccgtcagcaagcttgcaattgcattcaaggtgccgctagagccttaggctctggtctcaacgctggccgtgcagctggaattcctaaggcatgtggagtcaatattccttacaaaatcagcaccagcaccaactgcaaaaccgtgaggtgatgagctagcaacggtgagatgatgctactaccggaagtttcgaatccttattatataatggatgagattaatattaaataagatgttcgaatgtttgtttttagagtttttaatttcttgtctttttctattgtggtgttcttgttatatgggtttgtctgtactatgttcgcaggcaacaacgttatatgaaatttcagagtacttgaagtttaagtt

SEQ ID NO: 3991 - protein, 118 aa, Arabidopsis thaliana
  peptide (1)..(118): Ceres Seq. ID no. 12652847
  misc_feature (29)..(114): Pfam Name: Pfam Description:  Protease inhibitor/seed storage/LTP family
  misc_feature (1)..(118): NCBI GI NO: 15224899 NR Description: putative nonspecific lipid-transfer protein
  misc_feature (1)..(118): NCBI GI NO: 2497738 NR Description: NONSPECIFIC LIPID-TRANSFER PROTEIN A PRECURSOR
  misc_feature (1)..(118): NCBI GI NO: 11273805 NR Description: lipid transfer protein [imported] - wild cabbage
  misc_feature (1)..(114): NCBI GI NO: 7438295 NR Description: lipid transfer protein wax9C - broccoli
  misc_feature (1)..(118): NCBI GI NO: 2497735 NR Description: NONSPECIFIC LIPID-TRANSFER PROTEIN 1 PRECURSOR
  misc_feature (1)..(118): NCBI GI NO: 2497739 NR Description: NONSPECIFIC LIPID-TRANSFER PROTEIN B PRECURSOR
  misc_feature (1)..(118): NCBI GI NO: 2497736 NR Description: NONSPECIFIC LIPID-TRANSFER PROTEIN 2 PRECURSOR
  misc_feature (1)..(118): NCBI GI NO: 2497737 NR Description: NONSPECIFIC LIPID-TRANSFER PROTEIN 3 PRECURSOR
  misc_feature (1)..(118): NCBI GI NO: 15224898 NR Description: putative nonspecific lipid-transfer protein
  misc_feature (1)..(118): NCBI GI NO: 5777389 NR Description: non-specific lipid transfer protein
MAGVMKLACLLLACMIVAGPITSNAALSCGSVNSNLAACIGYVLQGGVIPPACCSGVKNLNSIAKTTPDRQQACNCIQGAARALGSGLNAGRAAGIPKACGVNIPYKISTSTNCKTVR

SEQ ID NO: 3992 - protein, 114 aa, Arabidopsis thaliana
  peptide (1)..(114): Ceres Seq. ID no. 12652848
  misc_feature (25)..(110): Pfam Name: Pfam Description:  Protease inhibitor/seed storage/LTP family
  misc_feature (1)..(114): NCBI GI NO: 15224899 NR Description: putative nonspecific lipid-transfer protein
  misc_feature (1)..(114): NCBI GI NO: 2497738 NR Description: NONSPECIFIC LIPID-TRANSFER PROTEIN A PRECURSOR
  misc_feature (1)..(114): NCBI GI NO: 11273805 NR Description: lipid transfer protein [imported] - wild cabbage
  misc_feature (1)..(110): NCBI GI NO: 7438295 NR Description: lipid transfer protein wax9C - broccoli
  misc_feature (1)..(114): NCBI GI NO: 2497735 NR Description: NONSPECIFIC LIPID-TRANSFER PROTEIN 1 PRECURSOR
  misc_feature (1)..(114): NCBI GI NO: 2497739 NR Description: NONSPECIFIC LIPID-TRANSFER PROTEIN B PRECURSOR
  misc_feature (1)..(114): NCBI GI NO: 2497736 NR Description: NONSPECIFIC LIPID-TRANSFER PROTEIN 2 PRECURSOR
  misc_feature (1)..(114): NCBI GI NO: 2497737 NR Description: NONSPECIFIC LIPID-TRANSFER PROTEIN 3 PRECURSOR
  misc_feature (1)..(114): NCBI GI NO: 15224898 NR Description: putative nonspecific lipid-transfer protein
  misc_feature (1)..(114): NCBI GI NO: 5777389 NR Description: non-specific lipid transfer protein
MKLACLLLACMIVAGPITSNAALSCGSVNSNLAACIGYVLQGGVIPPACCSGVKNLNSIAKTTPDRQQACNCIQGAARALGSGLNAGRAAGIPKACGVNIPYKISTSTNCKTVR

SEQ ID NO: 3993 - protein, 104 aa, Arabidopsis thaliana
  peptide (1)..(104): Ceres Seq. ID no. 12652849
  misc_feature (15)..(100): Pfam Name: Pfam Description:  Protease inhibitor/seed storage/LTP family
  misc_feature (1)..(104): NCBI GI NO: 15224899 NR Description: putative nonspecific lipid-transfer protein
  misc_feature (1)..(104): NCBI GI NO: 2497738 NR Description: NONSPECIFIC LIPID-TRANSFER PROTEIN A PRECURSOR
  misc_feature (1)..(104): NCBI GI NO: 11273805 NR Description: lipid transfer protein [imported] - wild cabbage
  misc_feature (1)..(100): NCBI GI NO: 7438295 NR Description: lipid transfer protein wax9C - broccoli
  misc_feature (1)..(104): NCBI GI NO: 2497735 NR Description: NONSPECIFIC LIPID-TRANSFER PROTEIN 1 PRECURSOR
  misc_feature (1)..(104): NCBI GI NO: 2497739 NR Description: NONSPECIFIC LIPID-TRANSFER PROTEIN B PRECURSOR
  misc_feature (1)..(104): NCBI GI NO: 2497736 NR Description: NONSPECIFIC LIPID-TRANSFER PROTEIN 2 PRECURSOR
  misc_feature (1)..(104): NCBI GI NO: 2497737 NR Description: NONSPECIFIC LIPID-TRANSFER PROTEIN 3 PRECURSOR
  misc_feature (1)..(104): NCBI GI NO: 15224898 NR Description: putative nonspecific lipid-transfer protein
  misc_feature (1)..(104): NCBI GI NO: 5777389 NR Description: non-specific lipid transfer protein
MIVAGPITSNAALSCGSVNSNLAACIGYVLQGGVIPPACCSGVKNLNSIAKTTPDRQQACNCIQGAARALGSGLNAGRAAGIPKACGVNIPYKISTSTNCKTVR

SEQ ID NO: 3994 - DNA, 1230 bp, Arabidopsis thaliana
  misc_feature (1)..(1230): Ceres Seq. ID no. 12385150
tgatgaagtcaagaggctaaacgcagttcaatcccccttccaagacgctgaatcaatagcaaaagcgattggaaacgcgaccaaagttgttgttacggtcggggcaacagagaatggtccggacgcccaagtctcgacctcaaacgcattgctcgtggtccaagcagctgagctagccggcgtaagccacgtggcgatagtctacgacggcaccatcagcgggtctacatacaacgtgctcgacgggattacttcgtttttcggcaatcttttcgcaaaatctcagccattgactatctctgacctcatcgagaaagtagctcaaaccgacgtggcctacacactcataaagacgagtttgacggaggatttctctccggagaaagcttataacgtcgtcgtttcagctgaagggagtaacagcggcagtggcagtagttcgtccgaggcctacaaagttccgaagttgaagattgcgtcgctggtagcagacatttttgcgaatacggccgtggcagaaaataaggtggtggaagtttctacagatccatcagcaccatcgcggccagtggacgagcttttcagtgtaatcccggaagatgggaggagaaaagtgtacgcagatgcgatcgcaagggaaagagcagaggaagaagctaaagttgcagctgacaaagctcgagaggcagcagaagcagcgaaagagttcgagaaacaaatgcaaaagctctctgagaaagaagcagaagctgcaagcttagctgaggatgcgcagcagaaagcagatgccgtgggagtcacagtggacggtttatttaacaaggcgaaagatatcagctcaggtctctcctggaataaactcggctctcagttcgcaactgcgattcagaacgcttcagagacgcctaaagtacaggttgctacggtcagaggacaagcaaaagcgagaaacttgccacccaagaaagcagtggtgaagcagagaccatcatctccgtttgcatccaaaccgaaagaagaacgtccgaagaagccggagaaagaggtgaggaaagtgttcggaggattgtttaagcaagagaccatctacatcgacgatgattgaaaaggccatatgcgatgtcgttttgaagttccgtacagtttcctttttttctctttccttctgtttcaagttaaaattctgtaatcgtatgacaaaattatacataaaaaaccatcattctctcc

SEQ ID NO: 3995 - protein, 367 aa, Arabidopsis thaliana
  peptide (1)..(367): Ceres Seq. ID no. 12385151
  misc_feature (1)..(367): NCBI GI NO: 7487756 NR Description: hypothetical protein T6H20
  misc_feature (1)..(153): NCBI GI NO: 18408279 NR Description: putative protein; protein id: At3g46780
DEVKRLNAVQSPFQDAESIAKAIGNATKVVVTVGATENGPDAQVSTSNALLVVQAAELAGVSHVAIVYDGTISGSTYNVLDGITSFFGNLFAKSQPLTISDLIEKVAQTDVAYTLIKTSLTEDFSPEKAYNVVVSAEGSNSGSGSSSSEAYKVPKLKIASLVADIFANTAVAENKVVEVSTDPSAPSRPVDELFSVIPEDGRRKVYADAIARERAEEEAKVAADKAREAAEAAKEFEKQMQKLSEKEAEAASLAEDAQQKADAVGVTVDGLFNKAKDISSGLSWNKLGSQFATAIQNASETPKVQVATVRGQAKARNLPPKKAVVKQRPSSPFASKPKEERPKKPEKEVRKVFGGLFKQETIYIDDD

SEQ ID NO: 3996 - DNA, 1702 bp, Arabidopsis thaliana
  misc_feature (1)..(1702): Ceres Seq. ID no. 12330215
ctgttgtttgttttatcatctctccataattgcttcgatttctctccaaagacacaacacaaaaagtgctttttttaatcagatattttctgggcttcactttaactctcttcgtgcttggttttccgatcttagtcgttactaattgagtcggagactgttcatttcctgattctgaagaaagttttggagaaggagaagatgtcaactctgcgagtgagctagggtttagtgtgttttccgatttttgagctcttggggattgttgttttctcttaaagagtcgattttgaatggcggtggagtatgtatgttgcagcccaaacttctttatacatatagctgtgattgtgtttcttgtcttgttcgctggactcatgtctggcttaacattgggtcttatgtctttgagtctcgttgatcttgaagttctcgctaaatccggtacacctgaacatcgtaaatatgcagcaaagatattgccagtggtaaagaatcagcacttgttgcttgtcactttacttatatgcaatgcagctgctatggagacgcttcctatttttcttgatggccttgtgacggcatggggtgccattttgatttcagttacattgattcttctctttggtgagattatacctcagtcgatttgttcacgttatggtttagcgattggtgcaacagtggctccgtttgtccgtgtcctagtctttatctgcttacctgttgcatggccaataagcaagcgctttttcgaagagctgagctgaaaacacttgtggattttcatggaaatgaggctggaaagggtggggagttgactcatgacgaaacgacaatcattgcaggagctcttgaactctctgagaaaatggtcaaagatgcaatgacaccaatatcggatatctttgtgattgatatcaatgccaaactagacagagacttgatgaacttgattcttgagaaagggcatagcagagttccagtatactatgagcagccaactaacataatcggccttgttctggtgaagaacttattaactatcaacccagatgaagaaatacctgtcaagaatgtcacgataagaaggattccaagagttccagaaatcttgcctttatatgacatattgaacgaattccagaaaggactcagccacatggctgttgttgtaagacagtgtgacaaaatccacccattaccttctaaaaatgggagtgttaaggaagcccgagtggatgtggatagtgagggaactcctactcctcaggagagaatgttaaggacaaaaagatcgcttcaaaagtggaagagctttccgaatcgagcaagttcgtttaaaggagggtcaaagagcaagaagtggtcaaaagacaatgatgcagacatcctgcaattgaatggcaatccgctgcctaaacttgctgaggaagaagaagcagtcggaatcattacgatggaggatgtcattgaagaacttctgcaggaggagatctttgacgaaactgatcaccattttgaagactcctaacacagagtgcatgaccactgaactggttatgaatgtcgaaaactttagtctttgttttcaactttcaaactgtcacttgtccggcgaatgtgtatcaatgtaggcatgaacaacaactttttctatggtttcaagatgttttctctctatatatatatcattggtctc

SEQ ID NO: 3997 - protein, 267 aa, Arabidopsis thaliana
  peptide (1)..(267): Ceres Seq. ID no. 12330216
  misc_feature (53)..(108): Pfam Name: Pfam Description:  CBS domain
  misc_feature (1)..(267): NCBI GI NO: 22329131 NR Description: putative protein; protein id: At4g33700
  misc_feature (1)..(267): NCBI GI NO: 7487085 NR Description: hypothetical protein T16L1
  misc_feature (6)..(266): NCBI GI NO: 30679136 NR Description: CBS domain containing protein
  misc_feature (23)..(253): NCBI GI NO: 25411569 NR Description: hypothetical protein At2g14520
  misc_feature (6)..(266): NCBI GI NO: 40538933 NR Description: expressed protein
  misc_feature (7)..(163): NCBI GI NO: 22330087 NR Description: unknown protein; protein id: At1g47330
  misc_feature (221)..(263): NCBI GI NO: 22330087 NR Description: unknown protein; protein id: At1g47330
  misc_feature (1)..(170): NCBI GI NO: 15237264 NR Description: putative protein; protein id: At5g52790.1
  misc_feature (234)..(265): NCBI GI NO: 15237264 NR Description: putative protein; protein id: At5g52790.1
  misc_feature (6)..(100): NCBI GI NO: 12039276 NR Description: putative ancient conserved domain protein
MANKQALFRRAELKTLVDFHGNEAGKGGELTHDETTIIAGALELSEKMVKDAMTPISDIFVIDINAKLDRDLMNLILEKGHSRVPVYYEQPTNIIGLVLVKNLLTINPDEEIPVKNVTIRRIPRVPEILPLYDILNEFQKGLSHMAVVVRQCDKIHPLPSKNGSVKEARVDVDSEGTPTPQERMLRTKRSLQKWKSFPNRASSFKGGSKSKKWSKDNDADILQLNGNPLPKLAEEEEAVGIITMEDVIEELLQEEIFDETDHHFEDS

SEQ ID NO: 3998 - protein, 220 aa, Arabidopsis thaliana
  peptide (1)..(220): Ceres Seq. ID no. 12330217
  misc_feature (6)..(61): Pfam Name: Pfam Description:  CBS domain
  misc_feature (1)..(220): NCBI GI NO: 22329131 NR Description: putative protein; protein id: At4g33700
  misc_feature (1)..(220): NCBI GI NO: 7487085 NR Description: hypothetical protein T16L1
  misc_feature (1)..(219): NCBI GI NO: 30679136 NR Description: CBS domain containing protein
  misc_feature (1)..(206): NCBI GI NO: 25411569 NR Description: hypothetical protein At2g14520
  misc_feature (1)..(219): NCBI GI NO: 40538933 NR Description: expressed protein
  misc_feature (1)..(116): NCBI GI NO: 22330087 NR Description: unknown protein; protein id: At1g47330
  misc_feature (174)..(216): NCBI GI NO: 22330087 NR Description: unknown protein; protein id: At1g47330
  misc_feature (1)..(123): NCBI GI NO: 15237264 NR Description: putative protein; protein id: At5g52790.1
  misc_feature (187)..(218): NCBI GI NO: 15237264 NR Description: putative protein; protein id: At5g52790.1
  misc_feature (1)..(53): NCBI GI NO: 12039276 NR Description: putative ancient conserved domain protein
MVKDAMTPISDIFVIDINAKLDRDLMNLILEKGHSRVPVYYEQPTNIIGLVLVKNLLTINPDEEIPVKNVTIRRIPRVPEILPLYDILNEFQKGLSHMAVVVRQCDKIHPLPSKNGSVKEARVDVDSEGTPTPQERMLRTKRSLQKWKSFPNRASSFKGGSKSKKWSKDNDADILQLNGNPLPKLAEEEEAVGIITMEDVIEELLQEEIFDETDHHFEDS

SEQ ID NO: 3999 - protein, 215 aa, Arabidopsis thaliana
  peptide (1)..(215): Ceres Seq. ID no. 12330218
  misc_feature (1)..(56): Pfam Name: Pfam Description:  CBS domain
  misc_feature (1)..(215): NCBI GI NO: 22329131 NR Description: putative protein; protein id: At4g33700
  misc_feature (1)..(215): NCBI GI NO: 7487085 NR Description: hypothetical protein T16L1
  misc_feature (1)..(214): NCBI GI NO: 30679136 NR Description: CBS domain containing protein
  misc_feature (1)..(201): NCBI GI NO: 25411569 NR Description: hypothetical protein At2g14520
  misc_feature (1)..(214): NCBI GI NO: 40538933 NR Description: expressed protein
  misc_feature (1)..(111): NCBI GI NO: 22330087 NR Description: unknown protein; protein id: At1g47330
  misc_feature (169)..(211): NCBI GI NO: 22330087 NR Description: unknown protein; protein id: At1g47330
  misc_feature (1)..(118): NCBI GI NO: 15237264 NR Description: putative protein; protein id: At5g52790.1
  misc_feature (182)..(213): NCBI GI NO: 15237264 NR Description: putative protein; protein id: At5g52790.1
  misc_feature (1)..(48): NCBI GI NO: 12039276 NR Description: putative ancient conserved domain protein
MTPISDIFVIDINAKLDRDLMNLILEKGHSRVPVYYEQPTNIIGLVLVKNLLTINPDEEIPVKNVTIRRIPRVPEILPLYDILNEFQKGLSHMAVVVRQCDKIHPLPSKNGSVKEARVDVDSEGTPTPQERMLRTKRSLQKWKSFPNRASSFKGGSKSKKWSKDNDADILQLNGNPLPKLAEEEEAVGIITMEDVIEELLQEEIFDETDHHFEDS

SEQ ID NO: 4000 - DNA, 1391 bp, Arabidopsis thaliana
  misc_feature (1)..(1391): Ceres Seq. ID no. 13488285
gcactctatatcaaacatttcttttaaaaatgagaaagttgttggcatcgccgtttagttcattactcgccgtcgttttcatttccgtcatctccgtcgtcagatgctgctctcctaaagatcagacggctctcaatgctttcaagtcgtcactgagcgaaccaaacctcggtatcttcaacacttggtctgaaaacactgattgttgcaaggaatggtacggtatcagctgcgatcctgattcgggtcgggtcactgatatttctctccggggagaatctgaagacgccattttccaaaaggcaggccggtccggttatatgtccggttcgattgatccagcagtttgtgacttaaccgcactcacttccctcgttctcgccgactggaaaggaatcaccggagagattcctccgtgcattacttccctagcttcgctccgtatcctcgatctcgccggcaacaagatcaccggggagattcccgcggaaatcggcaaactctcgaaactcgctgttttaaacctcgccgagaatcaaatgtccggcgagattccggcgtcactgacgtcactcatcgagttgaagcatcttgaattgacggaaaatggaatcaccggcgtgatcccggccgatttcggatcgttgaagatgttgagcagagttttactgggccgtaacgaactaaccgggtcaattccagagtcgatctcgggtatggaacggttagcggatctggatctatccaaaaaccatatcgaaggtccgatacccgaatggatgggtaacatgaaggtactctcacttttgaatctcgattgcaattcgttaaccggtccaatccccggttcgcttcttagcaattccggtttagatgttgccaatttgagccgaaatgcgttggaaggaactatacccgacgttttcgggtcaaaaacgtatttagtttcgcttgatctgtcacacaatagtctatcgggtcggatcccggattcgttgtcgtcagctaagtttgtgggacatttggatattagccataacaagctttgtgggcgtattccaacgggttttccttttgatcaccttgaagctacgtcgtttagtgacaaccaatgtctctgcggtggccctttgacgacgtcatgttaataacaaggatatggtttctggttttactgaaccgggttattctttttgctgttgctcttgttcgttgtatcaaacttgtgatattttgcttttcatttcttcgtctttcagattttagtttctaaagctaagatatgttactggcaacggacaggtacaccgatccaatatggtttgcggtctatgtacaatgaatccggatgtaaaatcaaaagcaatgttatagaatttaatttcaagatc

SEQ ID NO: 4001 - protein, 381 aa, Arabidopsis thaliana
  peptide (1)..(381): Ceres Seq. ID no. 13488286
  misc_feature (241)..(264): Pfam Name: Pfam Description:  Leucine Rich Repeat
  misc_feature (10)..(381): NCBI GI NO: 15230539 NR Description: DNA-damage-repair/toleration protein, putative
  misc_feature (62)..(381): NCBI GI NO: 421844 NR Description: DRT100 protein precursor - Arabidopsis thaliana
  misc_feature (14)..(379): NCBI GI NO: 38566726 NR Description: leucine rich repeat protein [Cicer arietinum]
  misc_feature (20)..(377): NCBI GI NO: 15232373 NR Description: disease resistance protein family (LRR)
  misc_feature (24)..(377): NCBI GI NO: 21593689 NR Description: leucine rich repeat protein, putative
  misc_feature (24)..(377): NCBI GI NO: 14532722 NR Description: unknown protein [Arabidopsis thaliana]
  misc_feature (24)..(377): NCBI GI NO: 15239943 NR Description: leucine rich repeat protein family
  misc_feature (59)..(377): NCBI GI NO: 25004882 NR Description: polygalacturonase inhibitor-like protein
  misc_feature (18)..(347): NCBI GI NO: 15225296 NR Description: disease resistance protien-related (LRR)
  misc_feature (24)..(347): NCBI GI NO: 21536600 NR Description: putative disease resistance protein
TLYQTFLLKMRKLLASPFSSLLAVVFISVISVVRCCSPKDQTALNAFKSSLSEPNLGIFNTWSENTDCCKEWYGISCDPDSGRVTDISLRGESEDAIFQKAGRSGYMSGSIDPAVCDLTALTSLVLADWKGITGEIPPCITSLASLRILDLAGNKITGEIPAEIGKLSKLAVLNLAENQMSGEIPASLTSLIELKHLELTENGITGVIPADFGSLKMLSRVLLGRNELTGSIPESISGMERLADLDLSKNHIEGPIPEWMGNMKVLSLLNLDCNSLTGPIPGSLLSNSGLDVANLSRNALEGTIPDVFGSKTYLVSLDLSHNSLSGRIPDSLSSAKFVGHLDISHNKLCGRIPTGFPFDHLEATSFSDNQCLCGGPLTTSC

SEQ ID NO: 4002 - protein, 372 aa, Arabidopsis thaliana
  peptide (1)..(372): Ceres Seq. ID no. 13488287
  misc_feature (232)..(255): Pfam Name: Pfam Description:  Leucine Rich Repeat
  misc_feature (1)..(372): NCBI GI NO: 15230539 NR Description: DNA-damage-repair/toleration protein, putative
  misc_feature (53)..(372): NCBI GI NO: 421844 NR Description: DRT100 protein precursor - Arabidopsis thaliana
  misc_feature (5)..(370): NCBI GI NO: 38566726 NR Description: leucine rich repeat protein [Cicer arietinum]
  misc_feature (11)..(368): NCBI GI NO: 15232373 NR Description: disease resistance protein family (LRR)
  misc_feature (15)..(368): NCBI GI NO: 21593689 NR Description: leucine rich repeat protein, putative
  misc_feature (15)..(368): NCBI GI NO: 14532722 NR Description: unknown protein [Arabidopsis thaliana]
  misc_feature (15)..(368): NCBI GI NO: 15239943 NR Description: leucine rich repeat protein family
  misc_feature (50)..(368): NCBI GI NO: 25004882 NR Description: polygalacturonase inhibitor-like protein
  misc_feature (9)..(338): NCBI GI NO: 15225296 NR Description: disease resistance protien-related (LRR)
  misc_feature (15)..(338): NCBI GI NO: 21536600 NR Description: putative disease resistance protein
MRKLLASPFSSLLAVVFISVISVVRCCSPKDQTALNAFKSSLSEPNLGIFNTWSENTDCCKEWYGISCDPDSGRVTDISLRGESEDAIFQKAGRSGYMSGSIDPAVCDLTALTSLVLADWKGITGEIPPCITSLASLRILDLAGNKITGEIPAEIGKLSKLAVLNLAENQMSGEIPASLTSLIELKHLELTENGITGVIPADFGSLKMLSRVLLGRNELTGSIPESISGMERLADLDLSKNHIEGPIPEWMGNMKVLSLLNLDCNSLTGPIPGSLLSNSGLDVANLSRNALEGTIPDVFGSKTYLVSLDLSHNSLSGRIPDSLSSAKFVGHLDISHNKLCGRIPTGFPFDHLEATSFSDNQCLCGGPLTTSC

SEQ ID NO: 4003 - protein, 275 aa, Arabidopsis thaliana
  peptide (1)..(275): Ceres Seq. ID no. 13488288
  misc_feature (135)..(158): Pfam Name: Pfam Description:  Leucine Rich Repeat
  misc_feature (1)..(275): NCBI GI NO: 15230539 NR Description: DNA-damage-repair/toleration protein, putative
  misc_feature (1)..(275): NCBI GI NO: 421844 NR Description: DRT100 protein precursor - Arabidopsis thaliana
  misc_feature (1)..(273): NCBI GI NO: 38566726 NR Description: leucine rich repeat protein [Cicer arietinum]
  misc_feature (1)..(271): NCBI GI NO: 15232373 NR Description: disease resistance protein family (LRR)
  misc_feature (1)..(271): NCBI GI NO: 21593689 NR Description: leucine rich repeat protein, putative
  misc_feature (1)..(271): NCBI GI NO: 14532722 NR Description: unknown protein [Arabidopsis thaliana]
  misc_feature (1)..(271): NCBI GI NO: 15239943 NR Description: leucine rich repeat protein family
  misc_feature (1)..(271): NCBI GI NO: 25004882 NR Description: polygalacturonase inhibitor-like protein
  misc_feature (1)..(241): NCBI GI NO: 15225296 NR Description: disease resistance protien-related (LRR)
  misc_feature (1)..(241): NCBI GI NO: 21536600 NR Description: putative disease resistance protein
MSGSIDPAVCDLTALTSLVLADWKGITGEIPPCITSLASLRILDLAGNKITGEIPAEIGKLSKLAVLNLAENQMSGEIPASLTSLIELKHLELTENGITGVIPADFGSLKMLSRVLLGRNELTGSIPESISGMERLADLDLSKNHIEGPIPEWMGNMKVLSLLNLDCNSLTGPIPGSLLSNSGLDVANLSRNALEGTIPDVFGSKTYLVSLDLSHNSLSGRIPDSLSSAKFVGHLDISHNKLCGRIPTGFPFDHLEATSFSDNQCLCGGPLTTSC

SEQ ID NO: 4004 - DNA, 1720 bp, Arabidopsis thaliana
  misc_feature (1)..(1720): Ceres Seq. ID no. 12371256
actcttaatctttaaaaaaaagaaaaaaaaaaacagaacaatttcttcttcctctgggatccataagttttgaggtatgttgttgctgattttgtccttttatctctgcaaataacagagaagataaatgaggattttctcctaggttgaagttttatattttggtggtcagtgtctgatggagtgtaatgcaaagccaccgtttcaatgggaattggaaaacttgatatcttttggcacttctacagctgaagttcctagaaagctaaagccaatggagtgggaaattgatggatttgattgcacctctctgtattcttcaagctttgatgcagtagcttatggtggtagttcaggttctgatatagctcatgctttctctaaaagctcaaagtcaacttccattagctcttcatcaactgaagttagaacacacaattttacatcagaaactggtgaaagtcttcctggagaatttgcaaaggggattgatacttctccaactcttgaactttcttttggctctggtgatccggttctcggtttaaagcttggtaaacgaacgtactttgaagacttttgggaagtggagaatgctaaaggtttgggacttcccgtgagccttgcttcgtcttctgtttctccggtgaagaaatcgaaatccattcctcagaggttacaaactcctcactgtcaagttgaaggctgtaatcttgatctttcatcagctaaagactatcatcggaaacataggatttgtgaaaaccattcaaagtttcctaaagtcgttgtgagtggcgtagagcgtcggttctgccaacaatgtagcaggttccactgtctctccgagtttgatgagaagaaacgtagctgtcgccgacgtctctcagatcacaatgcaagacgtcgcaagccaaatcctggaaggacatatgatgggaaaccacaggtggattttgtatggaacagatttgcacttatccatccaagaagtgaggaaaagtttctatggcccagttcaaagcctgtaccatcaagagtcttaatgccgcagcctgcaaagaccgagatttccaataagctgttcaccgagcacagtagatttggattgttggaccccaaaacaaaatccgcaagagcggagttattcagtaaagaaaaggtcacaatctcttcacacatgggtgcttctcaagatcttgatggtgctctctctcttctgtcaaattcaacaacatgggtttcttcctctgaccaaccaagacgttttacccttgatcaccatccctcaagcaacctccaacccatagctaaccggtctgcggctcaactcagttcagtgtccggctattggcagccggacccacccgcagttgaaggcccgaccgctctgcatagaaatggggcaggccagtttaatgaaaactacttcagcttgaaccagttttataactgaaagctgtatgcctttaaatcctatttaggatcaagcaagctagtgataagttaagataggagctgtgaaacttgcaagacaccaaatcctctcttatttctttgtccaaatattttcatgggttagagagctttgacaattgtctttaatatcaactttatcgtgttatacattaggattataaatcttgatggtgtactacgaaattgatatatagcatgctaagtattatatgattagaattagaagtatttttcgtttggg

SEQ ID NO: 4005 - protein, 425 aa, Arabidopsis thaliana
  peptide (1)..(425): Ceres Seq. ID no. 12371257
  misc_feature (171)..(249): Pfam Name: Pfam Description:  SBP domain
  misc_feature (1)..(425): NCBI GI NO: 25456646 NR Description: squamosa promoter binding protein 2
  misc_feature (1)..(425): NCBI GI NO: 15239820 NR Description: squamosa promoter binding protein-like 2
  misc_feature (1)..(352): NCBI GI NO: 22329813 NR Description: putative squamosa-promoter binding protein 2
  misc_feature (1)..(352): NCBI GI NO: 18650611 NR Description: At1g27370/F17L21_16 [Arabidopsis thaliana]
  misc_feature (9)..(352): NCBI GI NO: 9802546 NR Description: F17L21.15 [Arabidopsis thaliana]
  misc_feature (1)..(352): NCBI GI NO: 18396302 NR Description: putative squamosa-promoter binding protein 2
  misc_feature (10)..(352): NCBI GI NO: 25403307 NR Description: protein F17L21.14
  misc_feature (116)..(356): NCBI GI NO: 25352584 NR Description: squamosa promoter binding protein-homolog 4
  misc_feature (98)..(256): NCBI GI NO: 5931778 NR Description: SBP-domain protein 1 [Zea mays]
  misc_feature (97)..(350): NCBI GI NO: 15028115 NR Description: putative squamosa-promoter binding protein
MECNAKPPFQWELENLISFGTSTAEVPRKLKPMEWEIDGFDCTSLYSSSFDAVAYGGSSGSDIAHAFSKSSKSTSISSSSTEVRTHNFTSETGESLPGEFAKGIDTSPTLELSFGSGDPVLGLKLGKRTYFEDFWEVENAKGLGLPVSLASSSVSPVKKSKSIPQRLQTPHCQVEGCNLDLSSAKDYHRKHRICENHSKFPKVVVSGVERRFCQQCSRFHCLSEFDEKKRSCRRRLSDHNARRRKPNPGRTYDGKPQVDFVWNRFALIHPRSEEKFLWPSSKPVPSRVLMPQPAKTEISNKLFTEHSRFGLLDPKTKSARAELFSKEKVTISSHMGASQDLDGALSLLSNSTTWVSSSDQPRRFTLDHHPSSNLQPIANRSAAQLSSVSGYWQPDPPAVEGPTALHRNGAGQFNENYFSLNQFYN

SEQ ID NO: 4006 - protein, 393 aa, Arabidopsis thaliana
  peptide (1)..(393): Ceres Seq. ID no. 12371258
  misc_feature (139)..(217): Pfam Name: Pfam Description:  SBP domain
  misc_feature (1)..(393): NCBI GI NO: 25456646 NR Description: squamosa promoter binding protein 2
  misc_feature (1)..(393): NCBI GI NO: 15239820 NR Description: squamosa promoter binding protein-like 2
  misc_feature (1)..(320): NCBI GI NO: 22329813 NR Description: putative squamosa-promoter binding protein 2
  misc_feature (1)..(320): NCBI GI NO: 18650611 NR Description: At1g27370/F17L21_16 [Arabidopsis thaliana]
  misc_feature (1)..(320): NCBI GI NO: 9802546 NR Description: F17L21.15 [Arabidopsis thaliana]
  misc_feature (1)..(320): NCBI GI NO: 18396302 NR Description: putative squamosa-promoter binding protein 2
  misc_feature (1)..(320): NCBI GI NO: 25403307 NR Description: protein F17L21.14
  misc_feature (84)..(324): NCBI GI NO: 25352584 NR Description: squamosa promoter binding protein-homolog 4
  misc_feature (66)..(224): NCBI GI NO: 5931778 NR Description: SBP-domain protein 1 [Zea mays]
  misc_feature (65)..(318): NCBI GI NO: 15028115 NR Description: putative squamosa-promoter binding protein
MEWEIDGFDCTSLYSSSFDAVAYGGSSGSDIAHAFSKSSKSTSISSSSTEVRTHNFTSETGESLPGEFAKGIDTSPTLELSFGSGDPVLGLKLGKRTYFEDFWEVENAKGLGLPVSLASSSVSPVKKSKSIPQRLQTPHCQVEGCNLDLSSAKDYHRKHRICENHSKFPKVVVSGVERRFCQQCSRFHCLSEFDEKKRSCRRRLSDHNARRRKPNPGRTYDGKPQVDFVWNRFALIHPRSEEKFLWPSSKPVPSRVLMPQPAKTEISNKLFTEHSRFGLLDPKTKSARAELFSKEKVTISSHMGASQDLDGALSLLSNSTTWVSSSDQPRRFTLDHHPSSNLQPIANRSAAQLSSVSGYWQPDPPAVEGPTALHRNGAGQFNENYFSLNQFYN

SEQ ID NO: 4007 - DNA, 1244 bp, Arabidopsis thaliana
  misc_feature (1)..(1244): Ceres Seq. ID no. 13491334
gctcagtttcctggtcaaatggctacctcagagactcgagtcttgttcttatctttgtgtctcatccttggcaaagtagttttgtctcagtttgatgagttatggctagtaggggacgatgatccactcaacgccttgcagacgaggcgtgaaagaagagaggagaggtgtgattactcggtggggaaatggacgttcgatgaaacgtatccgctctatgattcaagctgtccatatctgagttctgcactaagttgccaaagaaatggaagacccgactcttattaccagaaatggagatggatccctaaggcttgttcactaccaaggtttgacgcattgaaatttcttgggaaaatgagaggaaaaagaataatgctggttggagattcaatgatgagaaaccagtgggaatctcttgtctgcttagtacagtctgttcttcccactcatcgtaagaagctcacttacaatggtcctacgatgtctttccattctctggattttgagacatcaattgagttttgttgggctcctctgcttgtggaactcaagagaggagttgaccgtaaaagggtgttacatttggactcaatcgaagacaatgctagatattggcgtggtgtagatgttcttgtattcgattccgctcactggtggactcactctcagagatggagttcgtgggattattacatggatgggaataagatcttcaaagctatggacccaatggttgcttatgagagaggactaaccacatgggctaaatgggttgagataaatcttgatccatccaaaacaaaagtcattttccgcactgtctcaccgagagagagtggtcagatgtgctacaaccagaaacatcccttgccttctttatcttcttccaccaaaccccacgtgcctcaacagtcaagagtgttgaacaaagtgctaaggacaatgaaataccgagtgtatttatacgatatcacaacaatgtctgcgtatagaagagacggtcatccttcggtgttcaagagagcaatgcacgaggaagagaagcaccatcgtatcgctggaccttcatcagattgcagtcattggtgcttgcccggtgtcccggatatttggaatgagatgctttcttcaattatcttaaccaatgctgtatgagctataataagagtctgtttttactcatgaacaatggtgttacttatatgaatcagtggtttatatattacatatcctttcccagc

SEQ ID NO: 4008 - protein, 385 aa, Arabidopsis thaliana
  peptide (1)..(385): Ceres Seq. ID no. 13491335
  misc_feature (7)..(385): NCBI GI NO: 18410028 NR Description: expressed protein [Arabidopsis thaliana]
  misc_feature (111)..(385): NCBI GI NO: 11291878 NR Description: hypothetical protein F24B22
  misc_feature (7)..(110): NCBI GI NO: 11291878 NR Description: hypothetical protein F24B22
  misc_feature (57)..(378): NCBI GI NO: 15224585 NR Description: expressed protein [Arabidopsis thaliana]
  misc_feature (47)..(383): NCBI GI NO: 18406003 NR Description: expressed protein [Arabidopsis thaliana]
  misc_feature (57)..(378): NCBI GI NO: 30350855 NR Description: hypothetical protein At2g30900
  misc_feature (57)..(381): NCBI GI NO: 15237711 NR Description: expressed protein [Arabidopsis thaliana]
  misc_feature (57)..(381): NCBI GI NO: 21553643 NR Description: unknown [Arabidopsis thaliana]
  misc_feature (56)..(378): NCBI GI NO: 21593142 NR Description: unknown [Arabidopsis thaliana]
  misc_feature (56)..(378): NCBI GI NO: 28393769 NR Description: unknown protein [Arabidopsis thaliana]
AQFPGQMATSETRVLFLSLCLILGKVVLSQFDELWLVGDDDPLNALQTRRERREERCDYSVGKWTFDETYPLYDSSCPYLSSALSCQRNGRPDSYYQKWRWIPKACSLPRFDALKFLGKMRGKRIMLVGDSMMRNQWESLVCLVQSVLPTHRKKLTYNGPTMSFHSLDFETSIEFCWAPLLVELKRGVDRKRVLHLDSIEDNARYWRGVDVLVFDSAHWWTHSQRWSSWDYYMDGNKIFKAMDPMVAYERGLTTWAKWVEINLDPSKTKVIFRTVSPRESGQMCYNQKHPLPSLSSSTKPHVPQQSRVLNKVLRTMKYRVYLYDITTMSAYRRDGHPSVFKRAMHEEEKHHRIAGPSSDCSHWCLPGVPDIWNEMLSSIILTNAV

SEQ ID NO: 4009 - protein, 379 aa, Arabidopsis thaliana
  peptide (1)..(379): Ceres Seq. ID no. 13491336
  misc_feature (1)..(379): NCBI GI NO: 18410028 NR Description: expressed protein [Arabidopsis thaliana]
  misc_feature (105)..(379): NCBI GI NO: 11291878 NR Description: hypothetical protein F24B22
  misc_feature (1)..(104): NCBI GI NO: 11291878 NR Description: hypothetical protein F24B22
  misc_feature (51)..(372): NCBI GI NO: 15224585 NR Description: expressed protein [Arabidopsis thaliana]
  misc_feature (41)..(377): NCBI GI NO: 18406003 NR Description: expressed protein [Arabidopsis thaliana]
  misc_feature (51)..(372): NCBI GI NO: 30350855 NR Description: hypothetical protein At2g30900
  misc_feature (51)..(375): NCBI GI NO: 15237711 NR Description: expressed protein [Arabidopsis thaliana]
  misc_feature (51)..(375): NCBI GI NO: 21553643 NR Description: unknown [Arabidopsis thaliana]
  misc_feature (50)..(372): NCBI GI NO: 21593142 NR Description: unknown [Arabidopsis thaliana]
  misc_feature (50)..(372): NCBI GI NO: 28393769 NR Description: unknown protein [Arabidopsis thaliana]
MATSETRVLFLSLCLILGKVVLSQFDELWLVGDDDPLNALQTRRERREERCDYSVGKWTFDETYPLYDSSCPYLSSALSCQRNGRPDSYYQKWRWIPKACSLPRFDALKFLGKMRGKRIMLVGDSMMRNQWESLVCLVQSVLPTHRKKLTYNGPTMSFHSLDFETSIEFCWAPLLVELKRGVDRKRVLHLDSIEDNARYWRGVDVLVFDSAHWWTHSQRWSSWDYYMDGNKIFKAMDPMVAYERGLTTWAKWVEINLDPSKTKVIFRTVSPRESGQMCYNQKHPLPSLSSSTKPHVPQQSRVLNKVLRTMKYRVYLYDITTMSAYRRDGHPSVFKRAMHEEEKHHRIAGPSSDCSHWCLPGVPDIWNEMLSSIILTNAV

SEQ ID NO: 4010 - protein, 266 aa, Arabidopsis thaliana
  peptide (1)..(266): Ceres Seq. ID no. 13491337
  misc_feature (1)..(266): NCBI GI NO: 18410028 NR Description: expressed protein [Arabidopsis thaliana]
  misc_feature (1)..(266): NCBI GI NO: 11291878 NR Description: hypothetical protein F24B22
  misc_feature (1)..(259): NCBI GI NO: 15224585 NR Description: expressed protein [Arabidopsis thaliana]
  misc_feature (1)..(264): NCBI GI NO: 18406003 NR Description: expressed protein [Arabidopsis thaliana]
  misc_feature (1)..(259): NCBI GI NO: 30350855 NR Description: hypothetical protein At2g30900
  misc_feature (1)..(262): NCBI GI NO: 15237711 NR Description: expressed protein [Arabidopsis thaliana]
  misc_feature (1)..(262): NCBI GI NO: 21553643 NR Description: unknown [Arabidopsis thaliana]
  misc_feature (1)..(259): NCBI GI NO: 21593142 NR Description: unknown [Arabidopsis thaliana]
  misc_feature (1)..(259): NCBI GI NO: 28393769 NR Description: unknown protein [Arabidopsis thaliana]
  misc_feature (1)..(257): NCBI GI NO: 15228743 NR Description: expressed protein [Arabidopsis thaliana]
MRGKRIMLVGDSMMRNQWESLVCLVQSVLPTHRKKLTYNGPTMSFHSLDFETSIEFCWAPLLVELKRGVDRKRVLHLDSIEDNARYWRGVDVLVFDSAHWWTHSQRWSSWDYYMDGNKIFKAMDPMVAYERGLTTWAKWVEINLDPSKTKVIFRTVSPRESGQMCYNQKHPLPSLSSSTKPHVPQQSRVLNKVLRTMKYRVYLYDITTMSAYRRDGHPSVFKRAMHEEEKHHRIAGPSSDCSHWCLPGVPDIWNEMLSSIILTNAV

SEQ ID NO: 4011 - DNA, 1657 bp, Arabidopsis thaliana
  misc_feature (1)..(1657): Ceres Seq. ID no. 13492212
gatcttctcaaaaacttcacctttttttgtttttccagtttctcagaggagatcttccttcaaagctcaaatccttttgtctgaattgtgatactgctgtccccatttttctgcaagttgggaaatttctgtcaaagttttgtgggtctgttaaaaagatctgagctttgaacatggggagctcaatggaggagaaagtggtggctgtgatcatggtcggtggtccaaccaaaggcactcgatttcggccattgtcgctgaatattccaaagcctctgtttcctattgcgggacaaccaatggtgcatcatccaatttcagcttgtaaaagaattccaaatttagctcaaatatatcttgttggcttctatgaggaaagggaatttgcactttatgtttcagccatctctaatgaacttaaagttcctgttagatatctgcgagaagacaaaccacatggttcagctggtgggctgtatcactttagaaatcttattatggaagatagtccgtctcatatcttcctgcttaactgtgatgtttgctgcagtttccccttgcccaaaatgctcgaggctcacaggggatatggtggaattggaactcttcttgtgatcaaggtctctcctgaatcagccagccaatttggagaattggttgcagatccagttactaatgagctgcttcattacaccgagaaacccgaaacttttgtcagtgatcgaattaactgtggtgtttatgtatttacacctgaaatttttaatgccataggagatgtttctactcagaggaaagatagagcaactctaaaacgtgtttccagcttcgaagctcttcaaccggcaacaaggatcccgacagattttgtaagactggatcaagacatcctttcacctctagctgggaagaaacggctatatacttatgagactatggatttctgggagcaaatcaaatctcctgggatgtcgttgaggtgttcaggactctatctttcccaattccgcttgacatctccccaactgttggctagtggtgatggaacaaggagtgccattgtgattggtgatgtttacatacatccttctgcaaaagttcacccaactgcaaagattggtcccaacgtctcaatctctgcaaatgctcgtgttggaccgggcgtcaggcttatgagctgcatcatccttgacgatgttgagatcatggaaaatgcagtggtgactaacgcaattgttgggtggaaatcttctatcgggagatggtcccgcgtccaggctgagggagtctacaattcgaaactcggagttacaattctcggagactcggttgcagttgaagacgaggttgtggtgaccagcagtattgttcttccaaacaagacactgaacgtcagtgttcaagacgagatcattttgtaactgaaaaacggaagttgaaaaatggaaccaacccagtggggagcagccacactatctccctctgattcaatatctactggagaaccacataagcaaatatttgggaactaattcacatgtatcatttatttacaccaagaattttccaacattgtatcaattccattttctatactcacaacacagctactgtaaaaggcactgaatttttgcccagaataataaagcacttgtgc

SEQ ID NO: 4012 - protein, 415 aa, Arabidopsis thaliana
  peptide (1)..(415): Ceres Seq. ID no. 13492213
  misc_feature (10)..(246): Pfam Name: Pfam Description:  Nucleotidyl transferase
  misc_feature (1)..(415): NCBI GI NO: 15222037 NR Description: ADP-glucose pyrophosphorylase family
  misc_feature (5)..(415): NCBI GI NO: 5882732 NR Description: Similar to gb|AF135422 GDP-mannose pyrophosphorylase A
  misc_feature (1)..(369): NCBI GI NO: 30699056 NR Description: ADP-glucose pyrophosphorylase family
  misc_feature (6)..(415): NCBI GI NO: 22325477 NR Description: ADP-glucose pyrophosphorylase family
  misc_feature (6)..(415): NCBI GI NO: 17064890 NR Description: putative GDP-mannose pyrophosphorylase
  misc_feature (6)..(394): NCBI GI NO: 25411099 NR Description: probable GDP-mannose pyrophosphorylase
  misc_feature (3)..(394): NCBI GI NO: 26006499 NR Description: Putative GDP-mannose pyrophosphorylase
  misc_feature (11)..(415): NCBI GI NO: 33416563 NR Description: Unknown (protein for MGC:66135) [Danio rerio]
  misc_feature (11)..(415): NCBI GI NO: 28830182 NR Description: similar to Homo sapiens (Human)
  misc_feature (11)..(415): NCBI GI NO: 19526884 NR Description: RIKEN cDNA 1810012N01 [Mus musculus]
MGSSMEEKVVAVIMVGGPTKGTRFRPLSLNIPKPLFPIAGQPMVHHPISACKRIPNLAQIYLVGFYEEREFALYVSAISNELKVPVRYLREDKPHGSAGGLYHFRNLIMEDSPSHIFLLNCDVCCSFPLPKMLEAHRGYGGIGTLLVIKVSPESASQFGELVADPVTNELLHYTEKPETFVSDRINCGVYVFTPEIFNAIGDVSTQRKDRATLKRVSSFEALQPATRIPTDFVRLDQDILSPLAGKKRLYTYETMDFWEQIKSPGMSLRCSGLYLSQFRLTSPQLLASGDGTRSAIVIGDVYIHPSAKVHPTAKIGPNVSISANARVGPGVRLMSCIILDDVEIMENAVVTNAIVGWKSSIGRWSRVQAEGVYNSKLGVTILGDSVAVEDEVVVTSSIVLPNKTLNVSVQDEIIL

SEQ ID NO: 4013 - protein, 411 aa, Arabidopsis thaliana
  peptide (1)..(411): Ceres Seq. ID no. 13492214
  misc_feature (6)..(242): Pfam Name: Pfam Description:  Nucleotidyl transferase
  misc_feature (1)..(411): NCBI GI NO: 15222037 NR Description: ADP-glucose pyrophosphorylase family
  misc_feature (1)..(411): NCBI GI NO: 5882732 NR Description: Similar to gb|AF135422 GDP-mannose pyrophosphorylase A
  misc_feature (1)..(365): NCBI GI NO: 30699056 NR Description: ADP-glucose pyrophosphorylase family
  misc_feature (2)..(411): NCBI GI NO: 22325477 NR Description: ADP-glucose pyrophosphorylase family
  misc_feature (2)..(411): NCBI GI NO: 17064890 NR Description: putative GDP-mannose pyrophosphorylase
  misc_feature (2)..(390): NCBI GI NO: 25411099 NR Description: probable GDP-mannose pyrophosphorylase
  misc_feature (1)..(390): NCBI GI NO: 26006499 NR Description: Putative GDP-mannose pyrophosphorylase
  misc_feature (7)..(411): NCBI GI NO: 33416563 NR Description: Unknown (protein for MGC:66135) [Danio rerio]
  misc_feature (7)..(411): NCBI GI NO: 28830182 NR Description: similar to Homo sapiens (Human)
  misc_feature (7)..(411): NCBI GI NO: 19526884 NR Description: RIKEN cDNA 1810012N01 [Mus musculus]
MEEKVVAVIMVGGPTKGTRFRPLSLNIPKPLFPIAGQPMVHHPISACKRIPNLAQIYLVGFYEEREFALYVSAISNELKVPVRYLREDKPHGSAGGLYHFRNLIMEDSPSHIFLLNCDVCCSFPLPKMLEAHRGYGGIGTLLVIKVSPESASQFGELVADPVTNELLHYTEKPETFVSDRINCGVYVFTPEIFNAIGDVSTQRKDRATLKRVSSFEALQPATRIPTDFVRLDQDILSPLAGKKRLYTYETMDFWEQIKSPGMSLRCSGLYLSQFRLTSPQLLASGDGTRSAIVIGDVYIHPSAKVHPTAKIGPNVSISANARVGPGVRLMSCIILDDVEIMENAVVTNAIVGWKSSIGRWSRVQAEGVYNSKLGVTILGDSVAVEDEVVVTSSIVLPNKTLNVSVQDEIIL

SEQ ID NO: 4014 - protein, 402 aa, Arabidopsis thaliana
  peptide (1)..(402): Ceres Seq. ID no. 13492215
  misc_feature (1)..(233): Pfam Name: Pfam Description:  Nucleotidyl transferase
  misc_feature (1)..(402): NCBI GI NO: 15222037 NR Description: ADP-glucose pyrophosphorylase family
  misc_feature (1)..(402): NCBI GI NO: 5882732 NR Description: Similar to gb|AF135422 GDP-mannose pyrophosphorylase A
  misc_feature (1)..(356): NCBI GI NO: 30699056 NR Description: ADP-glucose pyrophosphorylase family
  misc_feature (1)..(402): NCBI GI NO: 22325477 NR Description: ADP-glucose pyrophosphorylase family
  misc_feature (1)..(402): NCBI GI NO: 17064890 NR Description: putative GDP-mannose pyrophosphorylase
  misc_feature (1)..(381): NCBI GI NO: 25411099 NR Description: probable GDP-mannose pyrophosphorylase
  misc_feature (1)..(381): NCBI GI NO: 26006499 NR Description: Putative GDP-mannose pyrophosphorylase
  misc_feature (1)..(402): NCBI GI NO: 33416563 NR Description: Unknown (protein for MGC:66135) [Danio rerio]
  misc_feature (1)..(402): NCBI GI NO: 28830182 NR Description: similar to Homo sapiens (Human)
  misc_feature (1)..(402): NCBI GI NO: 19526884 NR Description: RIKEN cDNA 1810012N01 [Mus musculus]
MVGGPTKGTRFRPLSLNIPKPLFPIAGQPMVHHPISACKRIPNLAQIYLVGFYEEREFALYVSAISNELKVPVRYLREDKPHGSAGGLYHFRNLIMEDSPSHIFLLNCDVCCSFPLPKMLEAHRGYGGIGTLLVIKVSPESASQFGELVADPVTNELLHYTEKPETFVSDRINCGVYVFTPEIFNAIGDVSTQRKDRATLKRVSSFEALQPATRIPTDFVRLDQDILSPLAGKKRLYTYETMDFWEQIKSPGMSLRCSGLYLSQFRLTSPQLLASGDGTRSAIVIGDVYIHPSAKVHPTAKIGPNVSISANARVGPGVRLMSCIILDDVEIMENAVVTNAIVGWKSSIGRWSRVQAEGVYNSKLGVTILGDSVAVEDEVVVTSSIVLPNKTLNVSVQDEIIL

SEQ ID NO: 4015 - DNA, 1679 bp, Arabidopsis thaliana
  misc_feature (1)..(1679): Ceres Seq. ID no. 13489356
acaaatcaaaacaacataattaacttacccaaacaagaaacccaagaatccaaaatggaaatgctcaacgcaataattctcatcctatttccaatcatagggtttgtattaatcttctcattcccaacaaaaaccctaaaagccaaaaccgcatcaccctctaatccgacatcgtaccaactcatcggctctattctctccttcaacaaaaaccgccaccgtcttctccaatggtacacagatctcctccgtctctctccgtctcaaaccatcaccgtcgatctcctcttcggtcgtcggactatcatcactgcaaaccctgaaaacgttgagcacattctcaaaacaaatttttataacttccctaaaggcaaacctttcaccgacctcctaggagatctactcggcggcggaatctttaattctgacggcgagttatggagctcacagcgtaaactcgcgagccacgagtttacaatgcgttctcttagggaattcactttcgaaatcctccgtgaagaagtccaaaaccgcctcattccggtgctttcctccgccgtggactgtggagagacggttgattttcaggaggttttgaagcgctttgctttcgatgttgtatgcaaagtgtcgttgggttgggatccggattgtttggatttgacccgacccgttccagaacttgttaaggcttttgatgtagcggcggagatcagcgctcgccgcgccacggagccggtttacgccgtgtggaaagtaaagcgtttcttgaacgtagggagcgagaagaggttgagagaagccatcaagaccgtacacttgtctgtgtctgagatcatccgggccaaaaagaaaagcctcgatatcggtggtgacgtgtcggacaagcaggacctgctgtcgaggtttctcgccgctggccacggggaagaagccgtgagggatagtgtaatcagctttattatggcgggaagggatacaacgtcggcagcgatgacgtggctgttttggttgttgagtcaaaatgatgacgtggagacgaagatactcgacgaattgagaaacaaagggtctttagggttagggtttgaggatttgagagagatgagttacacaaaagcttgtctgtgtgaagcaatgaggctttacccaccagtggcttgggactcaaagcatgcagcaaacgacgacattttgccagatggaacacctctcaaaaagggagacaaagtcacttatttcccttacggtatgggaaggatggagaaggtgtggggtaaagattgggacgagtttaaaccaaaccggtggtttgaggaagaaccgagttacggtacaaaaccggttttgaaaagtgtgagttcgttcaagtttccggttttccaagccggaccaagggtttgcataggtaaagaaatggcttttacacaaatgaaagacgtggttggttcagttttgagtcggtttaagattataccggtttgcaataaccggccggtctttgttcctcttctaaccgctcacatggctggtgggctaaaggtgaagatcaagaggagagagcaatgtgattcgatgtatatttaattaattgattaatcaagtcatgtccttgtagaatatccaactaatatgtaaaatgtgtggtttataaattaaatcaaataaatatattatat

SEQ ID NO: 4016 - protein, 528 aa, Arabidopsis thaliana
  peptide (1)..(528): Ceres Seq. ID no. 13489357
  misc_feature (19)..(528): NCBI GI NO: 26452145 NR Description: putative cytochrome P450 [Arabidopsis thaliana]
  misc_feature (19)..(528): NCBI GI NO: 15242759 NR Description: cytochrome P450, putative [Arabidopsis thaliana]
  misc_feature (21)..(528): NCBI GI NO: 21536522 NR Description: cytochrome P450-like protein
  misc_feature (27)..(520): NCBI GI NO: 15228396 NR Description: cytochrome P450 family [Arabidopsis thaliana]
  misc_feature (54)..(521): NCBI GI NO: 18395978 NR Description: cytochrome P450 family [Arabidopsis thaliana]
  misc_feature (22)..(521): NCBI GI NO: 17366212 NR Description: Cytochrome P450 94A1
  misc_feature (19)..(520): NCBI GI NO: 18000072 NR Description: cytochrome P450-dependent fatty acid hydroxylase
  misc_feature (24)..(520): NCBI GI NO: 18000066 NR Description: cytochrome P450-dependent fatty acid hydroxylase
  misc_feature (19)..(524): NCBI GI NO: 18000068 NR Description: cytochrome P450-dependent fatty acid hydroxylase
  misc_feature (19)..(520): NCBI GI NO: 17366433 NR Description: Cytochrome P450 94A2
TNQNNIINLPKQETQESKMEMLNAIILILFPIIGFVLIFSFPTKTLKAKTASPSNPTSYQLIGSILSFNKNRHRLLQWYTDLLRLSPSQTITVDLLFGRRTIITANPENVEHILKTNFYNFPKGKPFTDLLGDLLGGGIFNSDGELWSSQRKLASHEFTMRSLREFTFEILREEVQNRLIPVLSSAVDCGETVDFQEVLKRFAFDVVCKVSLGWDPDCLDLTRPVPELVKAFDVAAEISARRATEPVYAVWKVKRFLNVGSEKRLREAIKTVHLSVSEIIRAKKKSLDIGGDVSDKQDLLSRFLAAGHGEEAVRDSVISFIMAGRDTTSAAMTWLFWLLSQNDDVETKILDELRNKGSLGLGFEDLREMSYTKACLCEAMRLYPPVAWDSKHAANDDILPDGTPLKKGDKVTYFPYGMGRMEKVWGKDWDEFKPNRWFEEEPSYGTKPVLKSVSSFKFPVFQAGPRVCIGKEMAFTQMKDVVGSVLSRFKIIPVCNNRPVFVPLLTAHMAGGLKVKIKRREQCDSMYI

SEQ ID NO: 4017 - protein, 510 aa, Arabidopsis thaliana
  peptide (1)..(510): Ceres Seq. ID no. 13489358
  misc_feature (1)..(510): NCBI GI NO: 26452145 NR Description: putative cytochrome P450 [Arabidopsis thaliana]
  misc_feature (1)..(510): NCBI GI NO: 15242759 NR Description: cytochrome P450, putative [Arabidopsis thaliana]
  misc_feature (3)..(510): NCBI GI NO: 21536522 NR Description: cytochrome P450-like protein
  misc_feature (9)..(502): NCBI GI NO: 15228396 NR Description: cytochrome P450 family [Arabidopsis thaliana]
  misc_feature (36)..(503): NCBI GI NO: 18395978 NR Description: cytochrome P450 family [Arabidopsis thaliana]
  misc_feature (4)..(503): NCBI GI NO: 17366212 NR Description: Cytochrome P450 94A1
  misc_feature (1)..(502): NCBI GI NO: 18000072 NR Description: cytochrome P450-dependent fatty acid hydroxylase
  misc_feature (6)..(502): NCBI GI NO: 18000066 NR Description: cytochrome P450-dependent fatty acid hydroxylase
  misc_feature (1)..(506): NCBI GI NO: 18000068 NR Description: cytochrome P450-dependent fatty acid hydroxylase
  misc_feature (1)..(502): NCBI GI NO: 17366433 NR Description: Cytochrome P450 94A2
MEMLNAIILILFPIIGFVLIFSFPTKTLKAKTASPSNPTSYQLIGSILSFNKNRHRLLQWYTDLLRLSPSQTITVDLLFGRRTIITANPENVEHILKTNFYNFPKGKPFTDLLGDLLGGGIFNSDGELWSSQRKLASHEFTMRSLREFTFEILREEVQNRLIPVLSSAVDCGETVDFQEVLKRFAFDVVCKVSLGWDPDCLDLTRPVPELVKAFDVAAEISARRATEPVYAVWKVKRFLNVGSEKRLREAIKTVHLSVSEIIRAKKKSLDIGGDVSDKQDLLSRFLAAGHGEEAVRDSVISFIMAGRDTTSAAMTWLFWLLSQNDDVETKILDELRNKGSLGLGFEDLREMSYTKACLCEAMRLYPPVAWDSKHAANDDILPDGTPLKKGDKVTYFPYGMGRMEKVWGKDWDEFKPNRWFEEEPSYGTKPVLKSVSSFKFPVFQAGPRVCIGKEMAFTQMKDVVGSVLSRFKIIPVCNNRPVFVPLLTAHMAGGLKVKIKRREQCDSMYI

SEQ ID NO: 4018 - protein, 508 aa, Arabidopsis thaliana
  peptide (1)..(508): Ceres Seq. ID no. 13489359
  misc_feature (1)..(508): NCBI GI NO: 26452145 NR Description: putative cytochrome P450 [Arabidopsis thaliana]
  misc_feature (1)..(508): NCBI GI NO: 15242759 NR Description: cytochrome P450, putative [Arabidopsis thaliana]
  misc_feature (1)..(508): NCBI GI NO: 21536522 NR Description: cytochrome P450-like protein
  misc_feature (7)..(500): NCBI GI NO: 15228396 NR Description: cytochrome P450 family [Arabidopsis thaliana]
  misc_feature (34)..(501): NCBI GI NO: 18395978 NR Description: cytochrome P450 family [Arabidopsis thaliana]
  misc_feature (2)..(501): NCBI GI NO: 17366212 NR Description: Cytochrome P450 94A1
  misc_feature (1)..(500): NCBI GI NO: 18000072 NR Description: cytochrome P450-dependent fatty acid hydroxylase
  misc_feature (4)..(500): NCBI GI NO: 18000066 NR Description: cytochrome P450-dependent fatty acid hydroxylase
  misc_feature (1)..(504): NCBI GI NO: 18000068 NR Description: cytochrome P450-dependent fatty acid hydroxylase
  misc_feature (1)..(500): NCBI GI NO: 17366433 NR Description: Cytochrome P450 94A2
MLNAIILILFPIIGFVLIFSFPTKTLKAKTASPSNPTSYQLIGSILSFNKNRHRLLQWYTDLLRLSPSQTITVDLLFGRRTIITANPENVEHILKTNFYNFPKGKPFTDLLGDLLGGGIFNSDGELWSSQRKLASHEFTMRSLREFTFEILREEVQNRLIPVLSSAVDCGETVDFQEVLKRFAFDVVCKVSLGWDPDCLDLTRPVPELVKAFDVAAEISARRATEPVYAVWKVKRFLNVGSEKRLREAIKTVHLSVSEIIRAKKKSLDIGGDVSDKQDLLSRFLAAGHGEEAVRDSVISFIMAGRDTTSAAMTWLFWLLSQNDDVETKILDELRNKGSLGLGFEDLREMSYTKACLCEAMRLYPPVAWDSKHAANDDILPDGTPLKKGDKVTYFPYGMGRMEKVWGKDWDEFKPNRWFEEEPSYGTKPVLKSVSSFKFPVFQAGPRVCIGKEMAFTQMKDVVGSVLSRFKIIPVCNNRPVFVPLLTAHMAGGLKVKIKRREQCDSMYI

SEQ ID NO: 4019 - DNA, 925 bp, Arabidopsis thaliana
  misc_feature (1)..(925): Ceres Seq. ID no. 13575729
atctcactgctcactactctcactgtaatcccttagatcttcttttcaaatttcaatggcgtccggtgatgtagagtatcggtgcttcgttggaggtctagcatgggccactgatgacagagctcttgagactgccttcgctcaatacggcgacgttattgattccaaggtctgttacacgccgagatcggactccgagtgatatcgatgatctcatcctcgacggatctgttccgatcttgtgtttctctgttacttgattcgattactctgttactattctcgttctttgttactactactactactactgttacttgtattttcccaaatcgatcattaacgatcgtgagactggaagatcaaggggattcggattcgtcaccttcaaggatgagaaagccatgaaggatgcgattgagggaatgaacggacaagatctcgatggccgtagcatcactgttaacgaggctcagtcacgaggaagcggtggcggcggaggccaccgtggaggtggtggcggtggataccgcagcggcggtggtggagggtacttccggtggaggtggtagctacggaggtggcggcggtagacgcgagggtggaggaggatacagcggcggcggcggttactcctcaagaggtggtggtggcggaagctacggtggtggaagacgtgagggaggaggaggatacggtggtggtgaaggaggaggttacggaggaagcggtggtggtggaggatggtaattcctttaattaggtttgggattaccaatgaatgttctctctctcgcttgttatgcttctacttggttttgtgtgttctctattttgttctggttctgctttagatttgatgtaacagttcgtgattaggtattttggtatctggaaacgtaatgttaagtcacttgtcattctc

SEQ ID NO: 4020 - protein, 101 aa, Arabidopsis thaliana
  peptide (1)..(101): Ceres Seq. ID no. 13575730
  misc_feature (36)..(100): Pfam Name: Pfam Description:  Herpesvirus large structural phospho protein UL32
  misc_feature (36)..(101): NCBI GI NO: 21553354 NR Description: glycine-rich RNA binding protein 7
  misc_feature (36)..(101): NCBI GI NO: 15226605 NR Description: glycine-rich RNA-binding protein (AtGRP7)
  misc_feature (38)..(101): NCBI GI NO: 1346180 NR Description: Glycine-rich RNA-binding protein GRP1A
  misc_feature (36)..(101): NCBI GI NO: 1346181 NR Description: Glycine-rich RNA-binding protein GRP2A
  misc_feature (38)..(101): NCBI GI NO: 15235002 NR Description: glycine-rich RNA-binding protein 8 (GRP8) (CCR1)
  misc_feature (36)..(101): NCBI GI NO: 34851124 NR Description: putative glycine-rich RNA-binding protein
  misc_feature (36)..(101): NCBI GI NO: 544416 NR Description: Glycine-rich RNA-binding protein 10
  misc_feature (36)..(101): NCBI GI NO: 544423 NR Description: Glycine-rich RNA-binding protein 2
  misc_feature (39)..(94): NCBI GI NO: 7439998 NR Description: glycine-rich RNA-binding protein GRP1
  misc_feature (36)..(101): NCBI GI NO: 10799202 NR Description: glycine-rich RNA-binding protein [Sorghum bicolor]
MAVASLLTRLSHEEAVAAEATVEVVAVDTAAAVVEGTSGGGGSYGGGGGRREGGGGYSGGGGYSSRGGGGGSYGGGRREGGGGYGGGEGGGYGGSGGGGGW

SEQ ID NO: 4021 - protein, 66 aa, Arabidopsis thaliana
  peptide (1)..(66): Ceres Seq. ID no. 13575731
MISSSTDLFRSCVSLLLDSITLLLFSFFVTTTTTTVTCIFPNRSLTIVRLEDQGDSDSSPSRMRKP

SEQ ID NO: 4022 - protein, 55 aa, Arabidopsis thaliana
  peptide (1)..(55): Ceres Seq. ID no. 13575732
  misc_feature (1)..(50): NCBI GI NO: 21553354 NR Description: glycine-rich RNA binding protein 7
  misc_feature (1)..(50): NCBI GI NO: 15226605 NR Description: glycine-rich RNA-binding protein (AtGRP7)
  misc_feature (1)..(50): NCBI GI NO: 1346180 NR Description: Glycine-rich RNA-binding protein GRP1A
  misc_feature (1)..(49): NCBI GI NO: 1346181 NR Description: Glycine-rich RNA-binding protein GRP2A
  misc_feature (1)..(50): NCBI GI NO: 15235002 NR Description: glycine-rich RNA-binding protein 8 (GRP8) (CCR1)
  misc_feature (1)..(50): NCBI GI NO: 34851124 NR Description: putative glycine-rich RNA-binding protein
  misc_feature (1)..(50): NCBI GI NO: 544416 NR Description: Glycine-rich RNA-binding protein 10
  misc_feature (1)..(50): NCBI GI NO: 544423 NR Description: Glycine-rich RNA-binding protein 2
  misc_feature (1)..(50): NCBI GI NO: 7439998 NR Description: glycine-rich RNA-binding protein GRP1
  misc_feature (1)..(49): NCBI GI NO: 10799202 NR Description: glycine-rich RNA-binding protein [Sorghum bicolor]
MKDAIEGMNGQDLDGRSITVNEAQSRGSGGGGGHRGGGGGGYRSGGGGGYFRWRW

SEQ ID NO: 4023 - DNA, 1366 bp, Arabidopsis thaliana
  misc_feature (1)..(1366): Ceres Seq. ID no. 12325610
atattgaaaagaaccattgctctctagattaaaagcttctctctctctctctctctctcttttggactttctcaatccatatccctctctctgttttttctaatttgagcctctaaagtctcctcgttttgttcatgttgttgttcaagtgaagaagctcaattatgtttacaacattgttgtaatttcaaaacttcataagaatttctctgaaaataaagaaaaagctggagtagaactattttaaagtgtcatcatgaagagactaagcagctcagattcaatgtgtggtctaatctccacttctacagatgaacagagtccaagagggtacggaagtaattaccaatctatgcttgaaggttacgatgaagatgctacactaatcgaggaatattccggcaaccaccaccacatgggtctatcggagaagaagagaagattaaaagttgaccaagtcaaagctcttgagaagaatttcgaacttgagaataaactcgaacctgagaggaaaactaaattagcacaagagcttggacttcaacctcgtcaagtagctgtttggtttcagaaccgtcgtgcacggtggaaaacaaaacagcttgaaaaagattacggtgttcttaagggtcaatacgattctctccgccacaatttcgattctctccgccgtgacaatgattcccttctccaagagattagtaaaatcaaagctaaggtaaacggtgaagaagataacaacaacaacaaagctattacggagggtgttaaggaagaggaagttcacaagacggattcgattccttcgtctcctctgcagtttctagaacattcctctggttttaactaccggcgaagcttcactgacctccgtgaccttctaccgaattccaccgttgtcgaggctggatcttccgatagttgcgattcaagcgccgttcttaacgacgaaacaagttctgataacggaagattgacgccgcctgtgacggttactggcgggagtttcttacagtttgtgaaaacagagcaaacagaggatcacgaggattttctaagcggtgaagaagcttgtggtttcttctccgatgaacagccgccgtcacttcattggtactctgcttcagatcattggacttgagaattgtttatcaaattggtgctctgtttagtctcaatgggaaaacagagaagagggcaaaggtggaataattgataaataaggattaaggatgaaggggattattaaattaaatccgcgggagaagttaattttgggtttaagattgtaatggctcttcatgtaattaacgatgtcgagaggggctttcacagaaataggaatcaatggggacactctgatatg

SEQ ID NO: 4024 - protein, 294 aa, Arabidopsis thaliana
  peptide (1)..(294): Ceres Seq. ID no. 12325611
  misc_feature (59)..(113): Pfam Name: Pfam Description:  Homeobox domain
  misc_feature (1)..(294): NCBI GI NO: 15236109 NR Description: homeodomain - like protein; protein id: At4g40060
  misc_feature (1)..(294): NCBI GI NO: 15450982 NR Description: homeodomain-like protein [Arabidopsis thaliana]
  misc_feature (1)..(294): NCBI GI NO: 7446295 NR Description: homeotic protein T5J17.230 - Arabidopsis thaliana
  misc_feature (1)..(293): NCBI GI NO: 18399966 NR Description: homeodomain transcription factor
  misc_feature (1)..(293): NCBI GI NO: 25386231 NR Description: homeodomain transcription factor (ATHB-6)
  misc_feature (1)..(293): NCBI GI NO: 8133126 NR Description: hb-6-like protein
  misc_feature (1)..(273): NCBI GI NO: 5305602 NR Description: homeobox protein ATHB6 [Arabidopsis thaliana]
  misc_feature (1)..(293): NCBI GI NO: 15238405 NR Description: homeobox-leucine zipper protein ATHB-5
  misc_feature (52)..(294): NCBI GI NO: 15148916 NR Description: homeodomain leucine zipper protein HDZ1
  misc_feature (1)..(191): NCBI GI NO: 11231065 NR Description: homeobox-leucine zipper protein [Zinnia elegans]
MKRLSSSDSMCGLISTSTDEQSPRGYGSNYQSMLEGYDEDATLIEEYSGNHHHMGLSEKKRRLKVDQVKALEKNFELENKLEPERKTKLAQELGLQPRQVAVWFQNRRARWKTKQLEKDYGVLKGQYDSLRHNFDSLRRDNDSLLQEISKIKAKVNGEEDNNNNKAITEGVKEEEVHKTDSIPSSPLQFLEHSSGFNYRRSFTDLRDLLPNSTVVEAGSSDSCDSSAVLNDETSSDNGRLTPPVTVTGGSFLQFVKTEQTEDHEDFLSGEEACGFFSDEQPPSLHWYSASDHWT

SEQ ID NO: 4025 - protein, 285 aa, Arabidopsis thaliana
  peptide (1)..(285): Ceres Seq. ID no. 12325612
  misc_feature (50)..(104): Pfam Name: Pfam Description:  Homeobox domain
  misc_feature (1)..(285): NCBI GI NO: 15236109 NR Description: homeodomain - like protein; protein id: At4g40060
  misc_feature (1)..(285): NCBI GI NO: 15450982 NR Description: homeodomain-like protein [Arabidopsis thaliana]
  misc_feature (1)..(285): NCBI GI NO: 7446295 NR Description: homeotic protein T5J17.230 - Arabidopsis thaliana
  misc_feature (1)..(284): NCBI GI NO: 18399966 NR Description: homeodomain transcription factor
  misc_feature (1)..(284): NCBI GI NO: 25386231 NR Description: homeodomain transcription factor (ATHB-6)
  misc_feature (1)..(284): NCBI GI NO: 8133126 NR Description: hb-6-like protein
  misc_feature (1)..(264): NCBI GI NO: 5305602 NR Description: homeobox protein ATHB6 [Arabidopsis thaliana]
  misc_feature (1)..(284): NCBI GI NO: 15238405 NR Description: homeobox-leucine zipper protein ATHB-5
  misc_feature (43)..(285): NCBI GI NO: 15148916 NR Description: homeodomain leucine zipper protein HDZ1
  misc_feature (1)..(182): NCBI GI NO: 11231065 NR Description: homeobox-leucine zipper protein [Zinnia elegans]
MCGLISTSTDEQSPRGYGSNYQSMLEGYDEDATLIEEYSGNHHHMGLSEKKRRLKVDQVKALEKNFELENKLEPERKTKLAQELGLQPRQVAVWFQNRRARWKTKQLEKDYGVLKGQYDSLRHNFDSLRRDNDSLLQEISKIKAKVNGEEDNNNNKAITEGVKEEEVHKTDSIPSSPLQFLEHSSGFNYRRSFTDLRDLLPNSTVVEAGSSDSCDSSAVLNDETSSDNGRLTPPVTVTGGSFLQFVKTEQTEDHEDFLSGEEACGFFSDEQPPSLHWYSASDHWT

SEQ ID NO: 4026 - protein, 262 aa, Arabidopsis thaliana
  peptide (1)..(262): Ceres Seq. ID no. 12325613
  misc_feature (27)..(81): Pfam Name: Pfam Description:  Homeobox domain
  misc_feature (1)..(262): NCBI GI NO: 15236109 NR Description: homeodomain - like protein; protein id: At4g40060
  misc_feature (1)..(262): NCBI GI NO: 15450982 NR Description: homeodomain-like protein [Arabidopsis thaliana]
  misc_feature (1)..(262): NCBI GI NO: 7446295 NR Description: homeotic protein T5J17.230 - Arabidopsis thaliana
  misc_feature (1)..(261): NCBI GI NO: 18399966 NR Description: homeodomain transcription factor
  misc_feature (1)..(261): NCBI GI NO: 25386231 NR Description: homeodomain transcription factor (ATHB-6)
  misc_feature (1)..(261): NCBI GI NO: 8133126 NR Description: hb-6-like protein
  misc_feature (1)..(241): NCBI GI NO: 5305602 NR Description: homeobox protein ATHB6 [Arabidopsis thaliana]
  misc_feature (1)..(261): NCBI GI NO: 15238405 NR Description: homeobox-leucine zipper protein ATHB-5
  misc_feature (20)..(262): NCBI GI NO: 15148916 NR Description: homeodomain leucine zipper protein HDZ1
  misc_feature (1)..(159): NCBI GI NO: 11231065 NR Description: homeobox-leucine zipper protein [Zinnia elegans]
MLEGYDEDATLIEEYSGNHHHMGLSEKKRRLKVDQVKALEKNFELENKLEPERKTKLAQELGLQPRQVAVWFQNRRARWKTKQLEKDYGVLKGQYDSLRHNFDSLRRDNDSLLQEISKIKAKVNGEEDNNNNKAITEGVKEEEVHKTDSIPSSPLQFLEHSSGFNYRRSFTDLRDLLPNSTVVEAGSSDSCDSSAVLNDETSSDNGRLTPPVTVTGGSFLQFVKTEQTEDHEDFLSGEEACGFFSDEQPPSLHWYSASDHWT

SEQ ID NO: 4027 - DNA, 641 bp, Arabidopsis thaliana
  misc_feature (1)..(641): Ceres Seq. ID no. 12325617
aaatataataataagccattgaaaaaaatggcggaggagagcagagtcccatcatcggtgtcggtaacagtcgcccacgaccttcttctagccggccaccgctatctagacgtcaggactccagaagagttcagccagggacatgcctgtggggcgatcaacgtgccttacatgaatcgaggagcatcaggtatgtttttatttggttagttgataactgagtgatggatataattttgtgattgtgaaacagggatgtcaaagaaccccgacttcctggaacaagtctcctcccatttcggacaatccgataacatcattgttggctgccagagcggtggtagatctatcaaagccaccaccgatcttctccatgcaggtttcacgggagtcaaagatatcgtcggtggctatagtgcctgggccaagaatggccttcctacaaaggcttgatgactcaccattcaccaaacatctttccttatctcttcgtctccttcttcttcaataatgcatcctttccgcatgtaatcatcaataaatgaccctcctttctctttgctgtctgatgtgatagcttggagggaggggctcatcgcatctttttaaaatatataaaaatacgagtgtgtgttgattgc

SEQ ID NO: 4028 - protein, 69 aa, Arabidopsis thaliana
  peptide (1)..(69): Ceres Seq. ID no. 12325618
  misc_feature (10)..(65): NCBI GI NO: 2129628 NR Description: ketoconazole resistance protein
  misc_feature (10)..(65): NCBI GI NO: 30698182 NR Description: senescence-associated protein
  misc_feature (14)..(65): NCBI GI NO: 7594903 NR Description: Ntdin [Nicotiana tabacum]
  misc_feature (11)..(65): NCBI GI NO: 7488606 NR Description: senescence-associated protein din1
  misc_feature (11)..(65): NCBI GI NO: 1046268 NR Description: senescence-associated protein
  misc_feature (11)..(65): NCBI GI NO: 15233328 NR Description: senescence-associated protein sen1
  misc_feature (11)..(65): NCBI GI NO: 21537402 NR Description: senescence-associated protein sen1
  misc_feature (14)..(65): NCBI GI NO: 118636 NR Description: Senescence-associated protein DIN1
  misc_feature (4)..(65): NCBI GI NO: 7340289 NR Description: OP1 [Cucumis sativus]
  misc_feature (19)..(64): NCBI GI NO: 30725286 NR Description: At2g21045 [Arabidopsis thaliana]
KYNNKPLKKMAEESRVPSSVSVTVAHDLLLAGHRYLDVRTPEEFSQGHACGAINVPYMNRGASGMFLFG

SEQ ID NO: 4029 - protein, 65 aa, Arabidopsis thaliana
  peptide (1)..(65): Ceres Seq. ID no. 12325619
  misc_feature (1)..(59): Pfam Name: Pfam Description:  Rhodanese-like domain
  misc_feature (1)..(64): NCBI GI NO: 2129628 NR Description: ketoconazole resistance protein
  misc_feature (1)..(65): NCBI GI NO: 30698182 NR Description: senescence-associated protein
  misc_feature (1)..(63): NCBI GI NO: 7594903 NR Description: Ntdin [Nicotiana tabacum]
  misc_feature (1)..(64): NCBI GI NO: 7488606 NR Description: senescence-associated protein din1
  misc_feature (1)..(64): NCBI GI NO: 1046268 NR Description: senescence-associated protein
  misc_feature (1)..(64): NCBI GI NO: 15233328 NR Description: senescence-associated protein sen1
  misc_feature (1)..(64): NCBI GI NO: 21537402 NR Description: senescence-associated protein sen1
  misc_feature (1)..(64): NCBI GI NO: 118636 NR Description: Senescence-associated protein DIN1
  misc_feature (1)..(62): NCBI GI NO: 7340289 NR Description: OP1 [Cucumis sativus]
  misc_feature (1)..(65): NCBI GI NO: 30698184 NR Description: senescence-associated protein
MSKNPDFLEQVSSHFGQSDNIIVGCQSGGRSIKATTDLLHAGFTGVKDIVGGYSAWAKNGLPTKA

SEQ ID NO: 4030 - protein, 60 aa, Arabidopsis thaliana
  peptide (1)..(60): Ceres Seq. ID no. 12325620
  misc_feature (1)..(56): NCBI GI NO: 2129628 NR Description: ketoconazole resistance protein
  misc_feature (1)..(56): NCBI GI NO: 30698182 NR Description: senescence-associated protein
  misc_feature (5)..(56): NCBI GI NO: 7594903 NR Description: Ntdin [Nicotiana tabacum]
  misc_feature (2)..(56): NCBI GI NO: 7488606 NR Description: senescence-associated protein din1
  misc_feature (2)..(56): NCBI GI NO: 1046268 NR Description: senescence-associated protein
  misc_feature (2)..(56): NCBI GI NO: 15233328 NR Description: senescence-associated protein sen1
  misc_feature (2)..(56): NCBI GI NO: 21537402 NR Description: senescence-associated protein sen1
  misc_feature (5)..(56): NCBI GI NO: 118636 NR Description: Senescence-associated protein DIN1
  misc_feature (1)..(56): NCBI GI NO: 7340289 NR Description: OP1 [Cucumis sativus]
  misc_feature (10)..(55): NCBI GI NO: 30725286 NR Description: At2g21045 [Arabidopsis thaliana]
MAEESRVPSSVSVTVAHDLLLAGHRYLDVRTPEEFSQGHACGAINVPYMNRGASGMFLFG

SEQ ID NO: 4031 - DNA, 1207 bp, Arabidopsis thaliana
  misc_feature (1)..(1207): Ceres Seq. ID no. 12329847
cgaaaaacgattgtgtgttcttgctttgagcgaaaccctagaatcggtcttaacccatttgagcagagatgctgcgagtagcaggaaggaggcttttttctgtttcgcagagatcatcgacggcgacctccttcgtcctttcccgtgaccataccctttccgatggaggcaactcctcttccgcttctagatctgtcccctctgcagatctctcatctttcaattcttaccaccggagcgttataagaggttttgcttctcaagtcattactcagggaaatgagataggttttggttcggaagtcccagccacagtcgaagctgtcaaaacacctaactcaaagattgtctatgacgaccataaccatgagcgttacccacctggtgaccctagcaagcgggcattcgcctattttgtcttgtcgggtggaaggtttgtttatgcctctgttctccgcctgcttgttctgaagcttattgtgagcatgtctgcaagtaaagatgtccttgcccttgcatccctcgaggttgacctagggagcatagaaccaggaactaccgtgacagtcaagtggcgtggaaagcccgtcttcatcaggcgaagaacagaagatgacatcaagctggccaatagtgtggatgttggatccctgagggacccacaagaagactcggttagagtcaagaatccagaatggttgatcgtggttggagtatgcactcatttggggtgcatccccttgcctaatgctggtgattatggtggttggttttgtccgtgtcacggatcacattacgatatatctggaagaattaggaaaggtcctgcaccatacaacctggaagtaccgacctacagcttcttggaagagaataaattactcattggttaatgaataaagcacaacagtccgagtgtcatggtctggatgatcttaaatctgtttttgtttttatattttccggcattttagcgtgcaagttcgctttcctcacactttgggctcagcaaaaattggcttgttttgctgaataatacaaacttgtcattgtatgacttagtatctgtctcatctggtgaaaatacattgttcatacttcatagtctctgtttattatttgaaaagagttttgaatagtatcatccctatttttcttatgtttgtaattttgtaacatatcgtttgtaagagagtttcctttcctt

SEQ ID NO: 4032 - protein, 274 aa, Arabidopsis thaliana
  peptide (1)..(274): Ceres Seq. ID no. 12329848
  misc_feature (174)..(270): Pfam Name: Pfam Description:  Rieske [2Fe-2S] domain
  misc_feature (1)..(274): NCBI GI NO: 15240627 NR Description: ubiquinol--cytochrome-c reductase - like protein
  misc_feature (1)..(274): NCBI GI NO: 21554278 NR Description: ubiquinol--cytochrome-c reductase-like protein
  misc_feature (1)..(274): NCBI GI NO: 21553507 NR Description: ubiquinol--cytochrome-c reductase-like protein
  misc_feature (1)..(274): NCBI GI NO: 18417067 NR Description: ubiquinol--cytochrome-c reductase - like protein
  misc_feature (74)..(274): NCBI GI NO: 11248861 NR Description: ubiquinol-cytochrome-c reductase (EC 1
  misc_feature (1)..(274): NCBI GI NO: 1076675 NR Description: ubiquinol-cytochrome-c reductase (EC 1
  misc_feature (1)..(274): NCBI GI NO: 586145 NR Description: Ubiquinol-cytochrome C reductase iron-sulfur subunit
  misc_feature (1)..(274): NCBI GI NO: 1717950 NR Description: Ubiquinol-cytochrome C reductase iron-sulfur subunit 2
  misc_feature (1)..(274): NCBI GI NO: 1717951 NR Description: Ubiquinol-cytochrome C reductase iron-sulfur subunit 3
  misc_feature (1)..(274): NCBI GI NO: 1717953 NR Description: Ubiquinol-cytochrome C reductase iron-sulfur subunit 5
MLRVAGRRLFSVSQRSSTATSFVLSRDHTLSDGGNSSSASRSVPSADLSSFNSYHRSVIRGFASQVITQGNEIGFGSEVPATVEAVKTPNSKIVYDDHNHERYPPGDPSKRAFAYFVLSGGRFVYASVLRLLVLKLIVSMSASKDVLALASLEVDLGSIEPGTTVTVKWRGKPVFIRRRTEDDIKLANSVDVGSLRDPQEDSVRVKNPEWLIVVGVCTHLGCIPLPNAGDYGGWFCPCHGSHYDISGRIRKGPAPYNLEVPTYSFLEENKLLIG

SEQ ID NO: 4033 - DNA, 1702 bp, Arabidopsis thaliana
  misc_feature (1)..(1702): Ceres Seq. ID no. 12422092
gcattgcgattaacgaaattcgaaaaatgtctcgtcttctccaaacacccttcttaccttcagtttccctccccacaaaaacacgatcttccgttacgggtttccgggtaaagcccagaatcatcccaatccaagcaaagatccgagaaatcttcatgcctgcactaagttctacaatgaccgaaggaaaaatcgtctcttgggttaaatcagaaggcgataaactcaacaaaggagagagtgttgttgttgttgaatccgataaagctgatatggatgttgagactttctatgatggttatctagctgcaatcatggttgaagaaggtggtgttgctcctgttggttctgctattgctttgttagctgaaactgaagatgagattgctgatgctaaggctaaagcttctggtggtggaggtgattctaaggctcctcctccggcttctcctcctacggctacagttgtagcacctgtggctgttgagaagaagattgcagctcctcctgtggcgattaaggcggtggcggcttctgcggtgcatccggcgtctgaaggagggaagaggattgtggcgtctccttatgctaagaagttagctaaggaattgaatgtggaattggctggtttagttggaagtggaccaatgggaaggattgtggctaaagatgttgaggcggttgcagctggaggaggagttcaagctgctgtagctgttaaggaggtagtggcagttcctggtgtggagttgggatcagtggttccgtttacgacaatgcagggggctgtgagtaggaatatggtggagagtcttgctgttcctacttttagagtcggttacacgattagtacggatgctcttgatgctctctacaagaagattaagtcgaaaggtgtgacaatgacggcactcctagcaaaggcaactgcacttgcactggcgaaacatccagttgtaaactcgtcctgtagagatggtaacagttttgtgtataacagtagcatcaacgttgctgttgctgttgctattgatggtggtctgataactcctgtgcttcagaacgctgataaggttgacatttattcgttatctagaaaatggaaagaattggttgataaggctcgagccaagcagctgcagcctcaggagtacaacactggtaccttcactctctctaacctaggaatgtttggcgttgatcggtttgatgctattctaccccctggaacaggagcgattatggctgtaggagcatctcaaccttcagtggttgcaactaaagacggccgcattggcatgaaaaaccagatgcaggtgaatgtgacggcagatcatcgtgtcatctatggtgctgatcttgcacagttcttgcaaacattggcaagcattatagaggacccaaaggaccttacattctaggccaaattactacttttcgcagcccagtcttctctgttcttgattccatgggagcttgtatttctgcggtaatcagtttctttgatagaatcgaacttttaagagtaatgttgaacataatcatttctttgtttgagatatatcttctgcaacattttctgcatggaaaggccgtcccacatgattttgctactgacttcatatatttccacttcatgtgatgaatcttatatgaactgataactttagcatgattaataacatgaatcttatatggactg

SEQ ID NO: 4034 - protein, 472 aa, Arabidopsis thaliana
  peptide (1)..(472): Ceres Seq. ID no. 12422093
  misc_feature (248)..(472): Pfam Name: catalytic domain Pfam Description: 2-oxoacid dehydrogenases acyltransferase
  misc_feature (9)..(472): NCBI GI NO: 21536525 NR Description: dihydrolipoamide S-acetyltransferase, putative
  misc_feature (9)..(472): NCBI GI NO: 15218630 NR Description: dihydrolipoamide S-acetyltransferase, putative
  misc_feature (9)..(472): NCBI GI NO: 25286434 NR Description: protein F12K21.24
  misc_feature (20)..(471): NCBI GI NO: 15230922 NR Description: dihydrolipoamide S-acetyltransferase
  misc_feature (43)..(471): NCBI GI NO: 9279589 NR Description: dihydrolipoamide S-acetyltransferase
  misc_feature (47)..(466): NCBI GI NO: 16331208 NR Description: dihydrolipoamide acetyltransferase component
  misc_feature (47)..(471): NCBI GI NO: 22298842 NR Description: dihydrolipoamide S-acetyltransferase
  misc_feature (47)..(471): NCBI GI NO: 23123757 NR Description: hypothetical protein [Nostoc punctiforme]
  misc_feature (47)..(471): NCBI GI NO: 17231098 NR Description: dihydrolipoamide S-acetyltransferase
  misc_feature (47)..(471): NCBI GI NO: 37522138 NR Description: dihydrolipoamide S-acetyltransferase
IAINEIRKMSRLLQTPFLPSVSLPTKTRSSVTGFRVKPRIIPIQAKIREIFMPALSSTMTEGKIVSWVKSEGDKLNKGESVVVVESDKADMDVETFYDGYLAAIMVEEGGVAPVGSAIALLAETEDEIADAKAKASGGGGDSKAPPPASPPTATVVAPVAVEKKIAAPPVAIKAVAASAVHPASEGGKRIVASPYAKKLAKELNVELAGLVGSGPMGRIVAKDVEAVAAGGGVQAAVAVKEVVAVPGVELGSVVPFTTMQGAVSRNMVESLAVPTFRVGYTISTDALDALYKKIKSKGVTMTALLAKATALALAKHPVVNSSCRDGNSFVYNSSINVAVAVAIDGGLITPVLQNADKVDIYSLSRKWKELVDKARAKQLQPQEYNTGTFTLSNLGMFGVDRFDAILPPGTGAIMAVGASQPSVVATKDGRIGMKNQMQVNVTADHRVIYGADLAQFLQTLASIIEDPKDLTF

SEQ ID NO: 4035 - protein, 464 aa, Arabidopsis thaliana
  peptide (1)..(464): Ceres Seq. ID no. 12422094
  misc_feature (240)..(464): Pfam Name: catalytic domain Pfam Description: 2-oxoacid dehydrogenases acyltransferase
  misc_feature (1)..(464): NCBI GI NO: 21536525 NR Description: dihydrolipoamide S-acetyltransferase, putative
  misc_feature (1)..(464): NCBI GI NO: 15218630 NR Description: dihydrolipoamide S-acetyltransferase, putative
  misc_feature (1)..(464): NCBI GI NO: 25286434 NR Description: protein F12K21.24
  misc_feature (12)..(463): NCBI GI NO: 15230922 NR Description: dihydrolipoamide S-acetyltransferase
  misc_feature (35)..(463): NCBI GI NO: 9279589 NR Description: dihydrolipoamide S-acetyltransferase
  misc_feature (39)..(458): NCBI GI NO: 16331208 NR Description: dihydrolipoamide acetyltransferase component
  misc_feature (39)..(463): NCBI GI NO: 22298842 NR Description: dihydrolipoamide S-acetyltransferase
  misc_feature (39)..(463): NCBI GI NO: 23123757 NR Description: hypothetical protein [Nostoc punctiforme]
  misc_feature (39)..(463): NCBI GI NO: 17231098 NR Description: dihydrolipoamide S-acetyltransferase
  misc_feature (39)..(463): NCBI GI NO: 37522138 NR Description: dihydrolipoamide S-acetyltransferase
MSRLLQTPFLPSVSLPTKTRSSVTGFRVKPRIIPIQAKIREIFMPALSSTMTEGKIVSWVKSEGDKLNKGESVVVVESDKADMDVETFYDGYLAAIMVEEGGVAPVGSAIALLAETEDEIADAKAKASGGGGDSKAPPPASPPTATVVAPVAVEKKIAAPPVAIKAVAASAVHPASEGGKRIVASPYAKKLAKELNVELAGLVGSGPMGRIVAKDVEAVAAGGGVQAAVAVKEVVAVPGVELGSVVPFTTMQGAVSRNMVESLAVPTFRVGYTISTDALDALYKKIKSKGVTMTALLAKATALALAKHPVVNSSCRDGNSFVYNSSINVAVAVAIDGGLITPVLQNADKVDIYSLSRKWKELVDKARAKQLQPQEYNTGTFTLSNLGMFGVDRFDAILPPGTGAIMAVGASQPSVVATKDGRIGMKNQMQVNVTADHRVIYGADLAQFLQTLASIIEDPKDLTF

SEQ ID NO: 4036 - protein, 421 aa, Arabidopsis thaliana
  peptide (1)..(421): Ceres Seq. ID no. 12422095
  misc_feature (197)..(421): Pfam Name: catalytic domain Pfam Description: 2-oxoacid dehydrogenases acyltransferase
  misc_feature (1)..(421): NCBI GI NO: 21536525 NR Description: dihydrolipoamide S-acetyltransferase, putative
  misc_feature (1)..(421): NCBI GI NO: 15218630 NR Description: dihydrolipoamide S-acetyltransferase, putative
  misc_feature (1)..(421): NCBI GI NO: 25286434 NR Description: protein F12K21.24
  misc_feature (1)..(420): NCBI GI NO: 15230922 NR Description: dihydrolipoamide S-acetyltransferase
  misc_feature (1)..(420): NCBI GI NO: 9279589 NR Description: dihydrolipoamide S-acetyltransferase
  misc_feature (1)..(415): NCBI GI NO: 16331208 NR Description: dihydrolipoamide acetyltransferase component
  misc_feature (1)..(420): NCBI GI NO: 22298842 NR Description: dihydrolipoamide S-acetyltransferase
  misc_feature (1)..(420): NCBI GI NO: 23123757 NR Description: hypothetical protein [Nostoc punctiforme]
  misc_feature (1)..(420): NCBI GI NO: 17231098 NR Description: dihydrolipoamide S-acetyltransferase
  misc_feature (1)..(420): NCBI GI NO: 37522138 NR Description: dihydrolipoamide S-acetyltransferase
MPALSSTMTEGKIVSWVKSEGDKLNKGESVVVVESDKADMDVETFYDGYLAAIMVEEGGVAPVGSAIALLAETEDEIADAKAKASGGGGDSKAPPPASPPTATVVAPVAVEKKIAAPPVAIKAVAASAVHPASEGGKRIVASPYAKKLAKELNVELAGLVGSGPMGRIVAKDVEAVAAGGGVQAAVAVKEVVAVPGVELGSVVPFTTMQGAVSRNMVESLAVPTFRVGYTISTDALDALYKKIKSKGVTMTALLAKATALALAKHPVVNSSCRDGNSFVYNSSINVAVAVAIDGGLITPVLQNADKVDIYSLSRKWKELVDKARAKQLQPQEYNTGTFTLSNLGMFGVDRFDAILPPGTGAIMAVGASQPSVVATKDGRIGMKNQMQVNVTADHRVIYGADLAQFLQTLASIIEDPKDLTF

SEQ ID NO: 4037 - DNA, 1025 bp, Arabidopsis thaliana
  misc_feature (1)..(1025): Ceres Seq. ID no. 12325137
aaaaataatagtcacaaaagaaattagaagacagatcaggaacagctagaagactcttcagggcacagagaaaacacccaccacaccgtcttcttcaacaaaatttaccaccagagatcgcagatatttcttcattctatctctctcttttagatccgattcgatgccgtcccgtagacgtaccctcctcaaggtcatcatcctcggtgatagcggggtgggaaaaacctctttgatgaatcagtatgttaataaaaagttcagcaaccagtacaaggcaaccattggagccgacttcttgaccaaggaagtacagtttgaagatcgacttttcactttacagatctgggatacagctggacaggaaaggtttcagagccttggtgtagccttttaccgtggtgctgattgctgtgttcttgtatatgatgtcaattccatgaaatcatttgaaaatctgaacaactggagggaagaatttctgatccaggcgagtccatcagatccagagaattttccatttgttcttatcggaaacaaggttgacgtggatgatggaaacagcagagtggtttcagagaaaaaggctaaagcttggtgtgcttcaaaggggaacattccttactttgagacctctgccaaggtaggtactaatgtggaggaagctttccaatgcattgccaaggacgcattgaagagcggagaagaagaagaactatacttgccagacacaatcgatgtagggacgagcaatcaacagaggtctacagggtgtgaatgctaaggagtatcaccagaaggaaacgaggcctctcctcccattatctcttttcgcaagttatgtctacattattactatgttgtaaattttttcttttgtgtggaaaagggatgagaacaaaaaaagaaggaaccctaaaaaaaaaagagatttgtttagtgttatttgtggggattttcatttatcatgctagctaaataaatactcactttcatcttaattttaagtgatgtttcttgtttgc

SEQ ID NO: 4038 - protein, 206 aa, Arabidopsis thaliana
  peptide (1)..(206): Ceres Seq. ID no. 12325138
  misc_feature (10)..(178): Pfam Name: Pfam Description:  Ras family
  misc_feature (1)..(206): NCBI GI NO: 15230211 NR Description: GTP-binding protein, putative
  misc_feature (1)..(206): NCBI GI NO: 21536526 NR Description: GTP binding protein, putative
  misc_feature (1)..(206): NCBI GI NO: 1370186 NR Description: RAB7C [Lotus japonicus]
  misc_feature (1)..(206): NCBI GI NO: 34484308 NR Description: putative GTP-binding protein [Cucumis sativus]
  misc_feature (1)..(206): NCBI GI NO: 400923 NR Description: RAS-RELATED PROTEIN RAB7
  misc_feature (1)..(206): NCBI GI NO: 15222098 NR Description: small GTP-binding protein, putative
  misc_feature (1)..(206): NCBI GI NO: 7438408 NR Description: GTP-binding protein Rab7b - common tobacco
  misc_feature (1)..(204): NCBI GI NO: 3914557 NR Description: RAS-RELATED PROTEIN RAB7
  misc_feature (1)..(206): NCBI GI NO: 1370188 NR Description: RAB7D [Lotus japonicus]
  misc_feature (1)..(206): NCBI GI NO: 3914550 NR Description: RAS-RELATED PROTEIN RAB7
MPSRRRTLLKVIILGDSGVGKTSLMNQYVNKKFSNQYKATIGADFLTKEVQFEDRLFTLQIWDTAGQERFQSLGVAFYRGADCCVLVYDVNSMKSFENLNNWREEFLIQASPSDPENFPFVLIGNKVDVDDGNSRVVSEKKAKAWCASKGNIPYFETSAKVGTNVEEAFQCIAKDALKSGEEEELYLPDTIDVGTSNQQRSTGCEC

SEQ ID NO: 4039 - protein, 182 aa, Arabidopsis thaliana
  peptide (1)..(182): Ceres Seq. ID no. 12325139
  misc_feature (1)..(154): Pfam Name: Pfam Description:  Ras family
  misc_feature (1)..(182): NCBI GI NO: 15230211 NR Description: GTP-binding protein, putative
  misc_feature (1)..(182): NCBI GI NO: 21536526 NR Description: GTP binding protein, putative
  misc_feature (1)..(182): NCBI GI NO: 1370186 NR Description: RAB7C [Lotus japonicus]
  misc_feature (1)..(182): NCBI GI NO: 34484308 NR Description: putative GTP-binding protein [Cucumis sativus]
  misc_feature (1)..(182): NCBI GI NO: 400923 NR Description: RAS-RELATED PROTEIN RAB7
  misc_feature (1)..(182): NCBI GI NO: 15222098 NR Description: small GTP-binding protein, putative
  misc_feature (1)..(182): NCBI GI NO: 7438408 NR Description: GTP-binding protein Rab7b - common tobacco
  misc_feature (1)..(180): NCBI GI NO: 3914557 NR Description: RAS-RELATED PROTEIN RAB7
  misc_feature (1)..(182): NCBI GI NO: 1370188 NR Description: RAB7D [Lotus japonicus]
  misc_feature (1)..(182): NCBI GI NO: 3914550 NR Description: RAS-RELATED PROTEIN RAB7
MNQYVNKKFSNQYKATIGADFLTKEVQFEDRLFTLQIWDTAGQERFQSLGVAFYRGADCCVLVYDVNSMKSFENLNNWREEFLIQASPSDPENFPFVLIGNKVDVDDGNSRVVSEKKAKAWCASKGNIPYFETSAKVGTNVEEAFQCIAKDALKSGEEEELYLPDTIDVGTSNQQRSTGCEC

SEQ ID NO: 4040 - protein, 114 aa, Arabidopsis thaliana
  peptide (1)..(114): Ceres Seq. ID no. 12325140
  misc_feature (1)..(86): Pfam Name: Pfam Description:  Ras family
  misc_feature (1)..(114): NCBI GI NO: 15230211 NR Description: GTP-binding protein, putative
  misc_feature (1)..(114): NCBI GI NO: 21536526 NR Description: GTP binding protein, putative
  misc_feature (1)..(114): NCBI GI NO: 1370186 NR Description: RAB7C [Lotus japonicus]
  misc_feature (1)..(114): NCBI GI NO: 34484308 NR Description: putative GTP-binding protein [Cucumis sativus]
  misc_feature (1)..(114): NCBI GI NO: 400923 NR Description: RAS-RELATED PROTEIN RAB7
  misc_feature (1)..(114): NCBI GI NO: 15222098 NR Description: small GTP-binding protein, putative
  misc_feature (1)..(114): NCBI GI NO: 7438408 NR Description: GTP-binding protein Rab7b - common tobacco
  misc_feature (1)..(112): NCBI GI NO: 3914557 NR Description: RAS-RELATED PROTEIN RAB7
  misc_feature (1)..(114): NCBI GI NO: 1370188 NR Description: RAB7D [Lotus japonicus]
  misc_feature (1)..(114): NCBI GI NO: 3914550 NR Description: RAS-RELATED PROTEIN RAB7
MKSFENLNNWREEFLIQASPSDPENFPFVLIGNKVDVDDGNSRVVSEKKAKAWCASKGNIPYFETSAKVGTNVEEAFQCIAKDALKSGEEEELYLPDTIDVGTSNQQRSTGCEC

SEQ ID NO: 4041 - DNA, 336 bp, Arabidopsis thaliana
  misc_feature (1)..(336): Ceres Seq. ID no. 13487990
aaagattcttattacagcgacacacaactcttttccatttagatttttgattttttttggttctctaaaggaggagagaaatgttggctatcttccacgaggcgtttgctcatccgccggaggaactcaacagtccggcatctgagaaatgctctaaacaaccaaaacttccagaagaaaccctaaatgatttcttattacgttaccctctcaacactttctccatgtctttcggacaagctgctgttcttgcttacgttcgtccctctgcttccttctccatccaccagaggttgttttgtggaagatagccaacatttctctcctcctttagag

SEQ ID NO: 4042 - protein, 76 aa, Arabidopsis thaliana
  peptide (1)..(76): Ceres Seq. ID no. 13487991
  misc_feature (1)..(75): NCBI GI NO: 7486256 NR Description: hypothetical protein F27G19
  misc_feature (1)..(75): NCBI GI NO: 18416995 NR Description: expressed protein [Arabidopsis thaliana]
  misc_feature (1)..(75): NCBI GI NO: 9857931 NR Description: unknown [Glycine max]
  misc_feature (1)..(75): NCBI GI NO: 18400774 NR Description: expressed protein [Arabidopsis thaliana]
  misc_feature (1)..(75): NCBI GI NO: 11292640 NR Description: hypothetical protein SEN5
  misc_feature (1)..(73): NCBI GI NO: 542200 NR Description: hypothetical protein - garden asparagus
  misc_feature (1)..(75): NCBI GI NO: 38344040 NR Description: OSJNBb0017I01.8
MLAIFHEAFAHPPEELNSPASEKCSKQPKLPEETLNDFLLRYPLNTFSMSFGQAAVLAYVRPSASFSIHQRLFCGR

SEQ ID NO: 4043 - protein, 50 aa, Arabidopsis thaliana
  peptide (1)..(50): Ceres Seq. ID no. 13487992
MISYYVTLSTLSPCLSDKLLFLLTFVPLLPSPSTRGCFVEDSQHFSPPLE

SEQ ID NO: 4044 - protein, 47 aa, Arabidopsis thaliana
  peptide (1)..(47): Ceres Seq. ID no. 13487993
KILITATHNSFPFRFLIFFGSLKEERNVGYLPRGVCSSAGGTQQSGI

SEQ ID NO: 4045 - DNA, 2001 bp, Arabidopsis thaliana
  misc_feature (1)..(2001): Ceres Seq. ID no. 13591393
atgtcttccatcaatttatcctcatcatctccttccaccatctctctttcccgctcaagactaagccaaagctctactacattactccatggactacatcgtgttactttaccatctaaccatccattgtcaaccttttccattaaaaccaatactggaaaagttaaggctgcagtgatctctagagaagatgatctgctctcattcaccaacggaaacactcctctctcaaatgggtctctcattgatgatcggaccgaagagccattagaggctgattcggtttcacttggaacacttgctgctgattctgctcctgcaccagccaatggttttgttgctgaagatgatgactttgagttggatttaccaactcctggtttctcttctatccctgaggccattgaagatatacgccaaggaaagcttgtggtggttgtggatgatgaagatagggaaaatgaaggggatttggtgatggctgctcagttagcaacacctgaagctatggcttttattgtgagacatggaactgggatagtttgtgtgagcatgaaagaagatgatctcgagaggttgcaccttcctctaatggtgaatcagaaggaaaacgaagaaaagctctctactgcatttacagtgactgtggatgcaaaacatggtacaacaacgggagtatcagctcgtgacagggcaacaaccatattgtctcttgcatcaagagattcaaagcctgaggatttcaatcgtccaggtcatatcttcccactgaagtatcgggaaggtggggttctgaaaagggctggacacactgaagcatctgttgatctcactgttttagctggactggatcctgttggagtactttgtgaaattgttgatgatgatggttccatggctagattaccaaaacttcgtgaatttgccgccgagaacaacctgaaagttgtttccatcgcagatttgatcaggtatagaagaaagagagataaattagtggaacgtgcttctgcggctcggatcccaacaatgtggggacctttcactgcttactgctataggtccatattagacggaatagagcacatagcaatggttaagggtgagattggtgacggtcaagacattctcgtgagggttcattctgaatgtctaacaggggacatatttgggtctgcaaggtgtgattgcgggaaccagctagcactctcgatgcagcagatcgaggctactggtcgcggtgtgctggtttacctacgtggacatgaaggaagagggatcggtttaggacacaagcttcgagcttacaatctgcaagatgctggtcgagacacggttgaagctaatgaggaattaggacttcctgttgattctagagagtatggaattggtgcacagataataagggatttaggtgttaggacaatgaagctgatgacaaataatcccgcaaagtatgttggtttgaagggatatggattagccattgttgggagagtccctctattgagtcttatcacgaaggagaataagagatatctggagacaaagcggaccaagatgggtcacatgtatggcttgaagttcaaaggggatgttgtggagaagattgagtctgaatctgagtcctaagcttaaaaaccaggacgaaccgaatggaatcaagaactatagatataatacttcacaaaaaacaaggaaagaaattgacacagaagaagaggaaaaagacatttgatctgtctgagaaacttgattagattggtttatgttctaatctaatctgatttgatttttttttattttgtctacgattcttgagttacgaaatgttcatcatttgttacttcttgttgtcgggattgagtagttgcatttttttagttgtggagctgtgacaaagaggccagctagtgtgtggaatgtggatcatcatcctttggttgattccttgtagaatcctttttgtaaacatttaaactataataaagtgttatgatt

SEQ ID NO: 4046 - protein, 543 aa, Arabidopsis thaliana
  peptide (1)..(543): Ceres Seq. ID no. 13591394
  misc_feature (1)..(543): NCBI GI NO: 27735197 NR Description: Riboflavin biosynthesis protein ribA
  misc_feature (160)..(543): NCBI GI NO: 30697989 NR Description: GTP cyclohydrolase II
  misc_feature (1)..(527): NCBI GI NO: 7436011 NR Description: GTP cyclohydrolase II (EC 3
  misc_feature (55)..(504): NCBI GI NO: 30681714 NR Description: GTP cyclohydrolase -related [Arabidopsis thaliana]
  misc_feature (59)..(504): NCBI GI NO: 25290324 NR Description: probable GTP cyclohydrolase
  misc_feature (96)..(536): NCBI GI NO: 29367375 NR Description: GTP cyclohydrolase II/3
  misc_feature (93)..(525): NCBI GI NO: 18424277 NR Description: GTP cyclohydrolase II / 3
  misc_feature (299)..(543): NCBI GI NO: 1084339 NR Description: GTP cyclohydrolase II (EC 3
  misc_feature (124)..(523): NCBI GI NO: 23018011 NR Description: hypothetical protein [Thermobifida fusca]
  misc_feature (128)..(525): NCBI GI NO: 15605862 NR Description: GTP cyclohydrolase II [Aquifex aeolicus]
MSSINLSSSSPSTISLSRSRLSQSSTTLLHGLHRVTLPSNHPLSTFSIKTNTGKVKAAVISREDDLLSFTNGNTPLSNGSLIDDRTEEPLEADSVSLGTLAADSAPAPANGFVAEDDDFELDLPTPGFSSIPEAIEDIRQGKLVVVVDDEDRENEGDLVMAAQLATPEAMAFIVRHGTGIVCVSMKEDDLERLHLPLMVNQKENEEKLSTAFTVTVDAKHGTTTGVSARDRATTILSLASRDSKPEDFNRPGHIFPLKYREGGVLKRAGHTEASVDLTVLAGLDPVGVLCEIVDDDGSMARLPKLREFAAENNLKVVSIADLIRYRRKRDKLVERASAARIPTMWGPFTAYCYRSILDGIEHIAMVKGEIGDGQDILVRVHSECLTGDIFGSARCDCGNQLALSMQQIEATGRGVLVYLRGHEGRGIGLGHKLRAYNLQDAGRDTVEANEELGLPVDSREYGIGAQIIRDLGVRTMKLMTNNPAKYVGLKGYGLAIVGRVPLLSLITKENKRYLETKRTKMGHMYGLKFKGDVVEKIESESES

SEQ ID NO: 4047 - protein, 384 aa, Arabidopsis thaliana
  peptide (1)..(384): Ceres Seq. ID no. 13591395
  misc_feature (1)..(384): NCBI GI NO: 27735197 NR Description: Riboflavin biosynthesis protein ribA
  misc_feature (1)..(384): NCBI GI NO: 30697989 NR Description: GTP cyclohydrolase II
  misc_feature (1)..(368): NCBI GI NO: 7436011 NR Description: GTP cyclohydrolase II (EC 3
  misc_feature (1)..(345): NCBI GI NO: 30681714 NR Description: GTP cyclohydrolase -related [Arabidopsis thaliana]
  misc_feature (1)..(345): NCBI GI NO: 25290324 NR Description: probable GTP cyclohydrolase
  misc_feature (1)..(377): NCBI GI NO: 29367375 NR Description: GTP cyclohydrolase II/3
  misc_feature (1)..(366): NCBI GI NO: 18424277 NR Description: GTP cyclohydrolase II / 3
  misc_feature (140)..(384): NCBI GI NO: 1084339 NR Description: GTP cyclohydrolase II (EC 3
  misc_feature (1)..(364): NCBI GI NO: 23018011 NR Description: hypothetical protein [Thermobifida fusca]
  misc_feature (1)..(366): NCBI GI NO: 15605862 NR Description: GTP cyclohydrolase II [Aquifex aeolicus]
MAAQLATPEAMAFIVRHGTGIVCVSMKEDDLERLHLPLMVNQKENEEKLSTAFTVTVDAKHGTTTGVSARDRATTILSLASRDSKPEDFNRPGHIFPLKYREGGVLKRAGHTEASVDLTVLAGLDPVGVLCEIVDDDGSMARLPKLREFAAENNLKVVSIADLIRYRRKRDKLVERASAARIPTMWGPFTAYCYRSILDGIEHIAMVKGEIGDGQDILVRVHSECLTGDIFGSARCDCGNQLALSMQQIEATGRGVLVYLRGHEGRGIGLGHKLRAYNLQDAGRDTVEANEELGLPVDSREYGIGAQIIRDLGVRTMKLMTNNPAKYVGLKGYGLAIVGRVPLLSLITKENKRYLETKRTKMGHMYGLKFKGDVVEKIESESES

SEQ ID NO: 4048 - protein, 374 aa, Arabidopsis thaliana
  peptide (1)..(374): Ceres Seq. ID no. 13591396
  misc_feature (1)..(374): NCBI GI NO: 27735197 NR Description: Riboflavin biosynthesis protein ribA
  misc_feature (1)..(374): NCBI GI NO: 30697989 NR Description: GTP cyclohydrolase II
  misc_feature (1)..(358): NCBI GI NO: 7436011 NR Description: GTP cyclohydrolase II (EC 3
  misc_feature (1)..(335): NCBI GI NO: 30681714 NR Description: GTP cyclohydrolase -related [Arabidopsis thaliana]
  misc_feature (1)..(335): NCBI GI NO: 25290324 NR Description: probable GTP cyclohydrolase
  misc_feature (1)..(367): NCBI GI NO: 29367375 NR Description: GTP cyclohydrolase II/3
  misc_feature (1)..(356): NCBI GI NO: 18424277 NR Description: GTP cyclohydrolase II / 3
  misc_feature (130)..(374): NCBI GI NO: 1084339 NR Description: GTP cyclohydrolase II (EC 3
  misc_feature (1)..(354): NCBI GI NO: 23018011 NR Description: hypothetical protein [Thermobifida fusca]
  misc_feature (1)..(356): NCBI GI NO: 15605862 NR Description: GTP cyclohydrolase II [Aquifex aeolicus]
MAFIVRHGTGIVCVSMKEDDLERLHLPLMVNQKENEEKLSTAFTVTVDAKHGTTTGVSARDRATTILSLASRDSKPEDFNRPGHIFPLKYREGGVLKRAGHTEASVDLTVLAGLDPVGVLCEIVDDDGSMARLPKLREFAAENNLKVVSIADLIRYRRKRDKLVERASAARIPTMWGPFTAYCYRSILDGIEHIAMVKGEIGDGQDILVRVHSECLTGDIFGSARCDCGNQLALSMQQIEATGRGVLVYLRGHEGRGIGLGHKLRAYNLQDAGRDTVEANEELGLPVDSREYGIGAQIIRDLGVRTMKLMTNNPAKYVGLKGYGLAIVGRVPLLSLITKENKRYLETKRTKMGHMYGLKFKGDVVEKIESESES

SEQ ID NO: 4049 - DNA, 1527 bp, Arabidopsis thaliana
  misc_feature (1)..(1527): Ceres Seq. ID no. 12482552
atggttcatgctgatggtcataattttcccggttcggatccaaaccctcatatgaacaagttcgctttcgggtgtgccattgttgcttccatcatttctatcatctttggatatgatacgggagttatgagcggagctcagatatttataagagatgatctaaaaataaacgacactcagattgaagttttggccggaatcttgaatctttgtgcactcgtcggatcactaacggcggggaaaacgtctgacgtcatcggccgacgttacaccatagctctctccgccgtgatattcttagtgggctcagttcttatgggttacggcccaaactatcctgttttgatggtcggacgatgtattgccggagttggtgtagggtttgctctcatgatagctccggtttactctgccgagatatcctctgcgtcacatagaggctttctcacttctctacctgagctttgtattagtcttgggattttactaggctatgtctcgaattactgttttgggaaactgacgttgaaacttggatggagattgatgcttggaatcgcagcgttcccgtctttgatattggcttttgggattacaagaatgcccgagtcgccgaggtggcttgtgatgcaaggtaggttagaagaagccaagaaaataatggttttggtatccaatacggaagaagaagctgaagaacggttcagagacatcttaaccgctgcggaagtagatgtgacagagataaaagaagttggtggcggcgttaagaagaagaatcacggtaaaagtgtttggagggagttggtgataaaaccgcgacctgcggtgcgtttgatcttgatagcggccgttgggatacactttttcgagcatgcgacggggattgaggccgtcgtgttgtacagcccgagaattttcaagaaagccggagttgtttcgaaagacaagctcttactagccacggtcggtgtaggtttaactaaggcctttttcataataatagccactttcttgctcgacaaggtaggtcgtagaaagctcctgttgaccagtacgggtgggatggtcttcgcattgaccagtttagcggttagtctcacgatggttcagcgatttgggcggttagcgtgggcattgagtttaagcatcgtctctacgtatgcatttgtagcttttttctccatagggcttggacctatcacatgggtgtacagctccgagatattcccgttgagacttagggctcagggagcgagtataggtgttgcggttaataggatcatgaacgcgacggtctcaatgagttttctgtcgatgacgaaggcgatcacgacagggggcgtgttcttcgtattcgccggaatagcggtggcggcatggtggttcttcttctttatgttgccggagacgaaaggattgccattggaggagatggagaagctttttggtggtgggggtcctcgtggtgatcgtgacggacttgagattcaaactaaaaccatctctattgggggtttctcataa

SEQ ID NO: 4050 - protein, 508 aa, Arabidopsis thaliana
  peptide (1)..(508): Ceres Seq. ID no. 12482553
  misc_feature (25)..(483): Pfam Name: and other Pfam Description: Sugar
  misc_feature (1)..(508): NCBI GI NO: 15224183 NR Description: putative sugar transporter; protein id: At2g18480
  misc_feature (18)..(489): NCBI GI NO: 15234491 NR Description: sugar transporter like protein
  misc_feature (8)..(484): NCBI GI NO: 30025133 NR Description: putative sorbitol transporter [Prunus cerasus]
  misc_feature (19)..(486): NCBI GI NO: 13129489 NR Description: Putative sugar transporter [Oryza sativa]
  misc_feature (14)..(484): NCBI GI NO: 15226696 NR Description: putative sugar transporter; protein id: At2g16130
  misc_feature (16)..(485): NCBI GI NO: 15230212 NR Description: sugar transport, putative; protein id: At3g18830.1
  misc_feature (14)..(484): NCBI GI NO: 15226682 NR Description: putative sugar transporter; protein id: At2g16120
  misc_feature (20)..(493): NCBI GI NO: 16118827 NR Description: putative sugar transporter [Oryza sativa]
  misc_feature (20)..(493): NCBI GI NO: 34393630 NR Description: putative sorbitol transporter
  misc_feature (33)..(484): NCBI GI NO: 29691878 NR Description: sorbitol transporter [Malus x domestica]
MVHADGHNFPGSDPNPHMNKFAFGCAIVASIISIIFGYDTGVMSGAQIFIRDDLKINDTQIEVLAGILNLCALVGSLTAGKTSDVIGRRYTIALSAVIFLVGSVLMGYGPNYPVLMVGRCIAGVGVGFALMIAPVYSAEISSASHRGFLTSLPELCISLGILLGYVSNYCFGKLTLKLGWRLMLGIAAFPSLILAFGITRMPESPRWLVMQGRLEEAKKIMVLVSNTEEEAEERFRDILTAAEVDVTEIKEVGGGVKKKNHGKSVWRELVIKPRPAVRLILIAAVGIHFFEHATGIEAVVLYSPRIFKKAGVVSKDKLLLATVGVGLTKAFFIIIATFLLDKVGRRKLLLTSTGGMVFALTSLAVSLTMVQRFGRLAWALSLSIVSTYAFVAFFSIGLGPITWVYSSEIFPLRLRAQGASIGVAVNRIMNATVSMSFLSMTKAITTGGVFFVFAGIAVAAWWFFFFMLPETKGLPLEEMEKLFGGGGPRGDRDGLEIQTKTISIGGFS

SEQ ID NO: 4051 - protein, 491 aa, Arabidopsis thaliana
  peptide (1)..(491): Ceres Seq. ID no. 12482554
  misc_feature (8)..(466): Pfam Name: and other Pfam Description: Sugar
  misc_feature (1)..(491): NCBI GI NO: 15224183 NR Description: putative sugar transporter; protein id: At2g18480
  misc_feature (1)..(472): NCBI GI NO: 15234491 NR Description: sugar transporter like protein
  misc_feature (1)..(467): NCBI GI NO: 30025133 NR Description: putative sorbitol transporter [Prunus cerasus]
  misc_feature (2)..(469): NCBI GI NO: 13129489 NR Description: Putative sugar transporter [Oryza sativa]
  misc_feature (1)..(467): NCBI GI NO: 15226696 NR Description: putative sugar transporter; protein id: At2g16130
  misc_feature (1)..(468): NCBI GI NO: 15230212 NR Description: sugar transport, putative; protein id: At3g18830.1
  misc_feature (1)..(467): NCBI GI NO: 15226682 NR Description: putative sugar transporter; protein id: At2g16120
  misc_feature (3)..(476): NCBI GI NO: 16118827 NR Description: putative sugar transporter [Oryza sativa]
  misc_feature (3)..(476): NCBI GI NO: 34393630 NR Description: putative sorbitol transporter
  misc_feature (16)..(467): NCBI GI NO: 29691878 NR Description: sorbitol transporter [Malus x domestica]
MNKFAFGCAIVASIISIIFGYDTGVMSGAQIFIRDDLKINDTQIEVLAGILNLCALVGSLTAGKTSDVIGRRYTIALSAVIFLVGSVLMGYGPNYPVLMVGRCIAGVGVGFALMIAPVYSAEISSASHRGFLTSLPELCISLGILLGYVSNYCFGKLTLKLGWRLMLGIAAFPSLILAFGITRMPESPRWLVMQGRLEEAKKIMVLVSNTEEEAEERFRDILTAAEVDVTEIKEVGGGVKKKNHGKSVWRELVIKPRPAVRLILIAAVGIHFFEHATGIEAVVLYSPRIFKKAGVVSKDKLLLATVGVGLTKAFFIIIATFLLDKVGRRKLLLTSTGGMVFALTSLAVSLTMVQRFGRLAWALSLSIVSTYAFVAFFSIGLGPITWVYSSEIFPLRLRAQGASIGVAVNRIMNATVSMSFLSMTKAITTGGVFFVFAGIAVAAWWFFFFMLPETKGLPLEEMEKLFGGGGPRGDRDGLEIQTKTISIGGFS

SEQ ID NO: 4052 - protein, 466 aa, Arabidopsis thaliana
  peptide (1)..(466): Ceres Seq. ID no. 12482555
  misc_feature (1)..(441): Pfam Name: and other Pfam Description: Sugar
  misc_feature (1)..(466): NCBI GI NO: 15224183 NR Description: putative sugar transporter; protein id: At2g18480
  misc_feature (1)..(447): NCBI GI NO: 15234491 NR Description: sugar transporter like protein
  misc_feature (1)..(442): NCBI GI NO: 30025133 NR Description: putative sorbitol transporter [Prunus cerasus]
  misc_feature (1)..(444): NCBI GI NO: 13129489 NR Description: Putative sugar transporter [Oryza sativa]
  misc_feature (1)..(442): NCBI GI NO: 15226696 NR Description: putative sugar transporter; protein id: At2g16130
  misc_feature (1)..(443): NCBI GI NO: 15230212 NR Description: sugar transport, putative; protein id: At3g18830.1
  misc_feature (1)..(442): NCBI GI NO: 15226682 NR Description: putative sugar transporter; protein id: At2g16120
  misc_feature (1)..(451): NCBI GI NO: 16118827 NR Description: putative sugar transporter [Oryza sativa]
  misc_feature (1)..(451): NCBI GI NO: 34393630 NR Description: putative sorbitol transporter
  misc_feature (1)..(442): NCBI GI NO: 29691878 NR Description: sorbitol transporter [Malus x domestica]
MSGAQIFIRDDLKINDTQIEVLAGILNLCALVGSLTAGKTSDVIGRRYTIALSAVIFLVGSVLMGYGPNYPVLMVGRCIAGVGVGFALMIAPVYSAEISSASHRGFLTSLPELCISLGILLGYVSNYCFGKLTLKLGWRLMLGIAAFPSLILAFGITRMPESPRWLVMQGRLEEAKKIMVLVSNTEEEAEERFRDILTAAEVDVTEIKEVGGGVKKKNHGKSVWRELVIKPRPAVRLILIAAVGIHFFEHATGIEAVVLYSPRIFKKAGVVSKDKLLLATVGVGLTKAFFIIIATFLLDKVGRRKLLLTSTGGMVFALTSLAVSLTMVQRFGRLAWALSLSIVSTYAFVAFFSIGLGPITWVYSSEIFPLRLRAQGASIGVAVNRIMNATVSMSFLSMTKAITTGGVFFVFAGIAVAAWWFFFFMLPETKGLPLEEMEKLFGGGGPRGDRDGLEIQTKTISIGGFS

SEQ ID NO: 4053 - DNA, 1337 bp, Arabidopsis thaliana
  misc_feature (1)..(1337): Ceres Seq. ID no. 12562139
  misc_feature (111)..(111): n is a, c, t, g, unknown, or other
tggaaagacggaagatggtatccatcatttcggtgttctcgaaggatggtttggtcaccattggtggaatggaagagctgctattcttctgattactactcttggtgtgtntgctccattggcttgcttcaagcgaatcgattctttgaaatttacatcggccttatccgtggctctggcggttgtgtttctcattattactgcgggaatttcaattatgaagttgatcagtggcggtgtggcgatgccaagattgttaccagatgttactgacttaacatctttctggaatctcttcacagttgtacctgttcttgtcacagcattcatttgccattacaatgttcacagcatacagaacgagctcgaagactcctctcagataagacctgttgttcgatcagcacttatgctctgctcatctgtttacataatgacaagtattttcgggttcctcttgtttggtgatgatactcttgatgatgtccttgcaaactttgacactgatcttggaatcccttttggttctatccttaatgatgcggttcgagttagctacgcgcttcatttgatgctcgtgttcccgattgttttctaccctcttcggattaacattgacgggctcttgttcccttccgctcgatcattatctacctcaaatgtgaggttcggttgcctcactgccggtcttatctctgtaatcttcttgggtgcaaacttcatcccaagcatttgggatgctttccaattcactggagcaaccgccgctgtctgtctcggcttcatcttcccagcttctattatactaaaggatcgtcatgacaaagcaacaaacagggacacaaccttagctattttcatgattgttcttgcggtattgtccaatgcaatcgccatttacagcgatgcttatgcactattcaagaagaacgcgcctcgtgagtagtcccgggaatgagaaaatgtgcagtttggtgtttctgtatgaagaaggaaaaaagcgtttgttttgtcttctatgtgaaatcaaataatgaagaagacaagacttctcttctcttatatgtttgtactattgtcgttgagtgttctaagcggacttttgcttcggggttatataccaccatgagtgttgtttgtaaaaaactctgtataaaaattgtaatgcagatacatattttgccttttcatgactctcttagctattgcttcataactatatacatatttaggcacaaagccacctagatttctcttagaaatgccatgttctaggcgtaaacatatactaatctgttgtatcattcatagtttataataaccaaaccaagcttttg

SEQ ID NO: 4054 - protein, 314 aa, Arabidopsis thaliana
  peptide (1)..(314): Ceres Seq. ID no. 12562140
  misc_feature (1)..(314): NCBI GI NO: 18406463 NR Description: expressed protein; protein id: At3g30390
  misc_feature (1)..(310): NCBI GI NO: 9758059 NR Description: amino acid transporter-like protein
  misc_feature (1)..(310): NCBI GI NO: 15241555 NR Description: transporter -like protein; protein id: At5g38820.1
  misc_feature (1)..(312): NCBI GI NO: 34898706 NR Description: hypothetical protein
  misc_feature (1)..(306): NCBI GI NO: 15228851 NR Description: putative protein; protein id: At3g56200
  misc_feature (1)..(270): NCBI GI NO: 34907894 NR Description: P0439E11.11
  misc_feature (1)..(304): NCBI GI NO: 30688270 NR Description: amino acid transporter family
  misc_feature (7)..(310): NCBI GI NO: 18412864 NR Description: expressed protein; protein id: At1g80510
  misc_feature (1)..(304): NCBI GI NO: 25408697 NR Description: hypothetical protein At2g40420
  misc_feature (7)..(188): NCBI GI NO: 24461850 NR Description: CTV.3 [Poncirus trifoliata]
  misc_feature (37)..(37): Xaa is any aa, unknown or other
GKTEDGIHHFGVLEGWFGHHWWNGRAAILLITTLGVXAPLACFKRIDSLKFTSALSVALAVVFLIITAGISIMKLISGGVAMPRLLPDVTDLTSFWNLFTVVPVLVTAFICHYNVHSIQNELEDSSQIRPVVRSALMLCSSVYIMTSIFGFLLFGDDTLDDVLANFDTDLGIPFGSILNDAVRVSYALHLMLVFPIVFYPLRINIDGLLFPSARSLSTSNVRFGCLTAGLISVIFLGANFIPSIWDAFQFTGATAAVCLGFIFPASIILKDRHDKATNRDTTLAIFMIVLAVLSNAIAIYSDAYALFKKNAPRE

SEQ ID NO: 4055 - protein, 242 aa, Arabidopsis thaliana
  peptide (1)..(242): Ceres Seq. ID no. 12562141
  misc_feature (1)..(242): NCBI GI NO: 18406463 NR Description: expressed protein; protein id: At3g30390
  misc_feature (1)..(238): NCBI GI NO: 9758059 NR Description: amino acid transporter-like protein
  misc_feature (1)..(238): NCBI GI NO: 15241555 NR Description: transporter -like protein; protein id: At5g38820.1
  misc_feature (1)..(240): NCBI GI NO: 34898706 NR Description: hypothetical protein
  misc_feature (1)..(234): NCBI GI NO: 15228851 NR Description: putative protein; protein id: At3g56200
  misc_feature (1)..(198): NCBI GI NO: 34907894 NR Description: P0439E11.11
  misc_feature (1)..(232): NCBI GI NO: 30688270 NR Description: amino acid transporter family
  misc_feature (1)..(238): NCBI GI NO: 18412864 NR Description: expressed protein; protein id: At1g80510
  misc_feature (1)..(232): NCBI GI NO: 25408697 NR Description: hypothetical protein At2g40420
  misc_feature (1)..(116): NCBI GI NO: 24461850 NR Description: CTV.3 [Poncirus trifoliata]
MKLISGGVAMPRLLPDVTDLTSFWNLFTVVPVLVTAFICHYNVHSIQNELEDSSQIRPVVRSALMLCSSVYIMTSIFGFLLFGDDTLDDVLANFDTDLGIPFGSILNDAVRVSYALHLMLVFPIVFYPLRINIDGLLFPSARSLSTSNVRFGCLTAGLISVIFLGANFIPSIWDAFQFTGATAAVCLGFIFPASIILKDRHDKATNRDTTLAIFMIVLAVLSNAIAIYSDAYALFKKNAPRE

SEQ ID NO: 4056 - protein, 233 aa, Arabidopsis thaliana
  peptide (1)..(233): Ceres Seq. ID no. 12562142
  misc_feature (1)..(233): NCBI GI NO: 18406463 NR Description: expressed protein; protein id: At3g30390
  misc_feature (1)..(229): NCBI GI NO: 9758059 NR Description: amino acid transporter-like protein
  misc_feature (1)..(229): NCBI GI NO: 15241555 NR Description: transporter -like protein; protein id: At5g38820.1
  misc_feature (1)..(231): NCBI GI NO: 34898706 NR Description: hypothetical protein
  misc_feature (1)..(225): NCBI GI NO: 15228851 NR Description: putative protein; protein id: At3g56200
  misc_feature (1)..(189): NCBI GI NO: 34907894 NR Description: P0439E11.11
  misc_feature (1)..(223): NCBI GI NO: 30688270 NR Description: amino acid transporter family
  misc_feature (1)..(229): NCBI GI NO: 18412864 NR Description: expressed protein; protein id: At1g80510
  misc_feature (1)..(223): NCBI GI NO: 25408697 NR Description: hypothetical protein At2g40420
  misc_feature (1)..(107): NCBI GI NO: 24461850 NR Description: CTV.3 [Poncirus trifoliata]
MPRLLPDVTDLTSFWNLFTVVPVLVTAFICHYNVHSIQNELEDSSQIRPVVRSALMLCSSVYIMTSIFGFLLFGDDTLDDVLANFDTDLGIPFGSILNDAVRVSYALHLMLVFPIVFYPLRINIDGLLFPSARSLSTSNVRFGCLTAGLISVIFLGANFIPSIWDAFQFTGATAAVCLGFIFPASIILKDRHDKATNRDTTLAIFMIVLAVLSNAIAIYSDAYALFKKNAPRE

SEQ ID NO: 4057 - DNA, 1074 bp, Arabidopsis thaliana
  misc_feature (1)..(1074): Ceres Seq. ID no. 12343425
taatcgaaaaaattctcacacattcttctgcttcgttaattttctactcgatttcgctcttcagaaatttgacaatgaagcttgacactagtggattggagacaactatgcctgtgattggctttggatcaaacagtgagatgcttgatgggttttcgtctgcaccttcgtttgatcttcctcgtaccactgattttgatgggtttcagaaaaaagctgtggagatggtgaagcctgcaaagggtacaactacacttgcgtttatctttaaggaaggtgttatggtagctgctgattctcgagctagcatgggaggatatatctcgtcgcaatctgtgaagaagattattgaaattaatccttatatgcttggtacaatggctggtggtgctgctgattgtcaattctggcacagaaatctgggaattaagtgccgtctacatgagctggcaaacaaaaggagaatctctgtttcaggagcttcaaagcttcttgctaacatgctctattcatatcgtggaatgggactttctgttggcacaatgattgctggatgggatgaaacaggccctggattgtactatgttgacaacgaaggaggacggcttaagggagacagattctctgtcggttcaggttcaccatacgcttatggtgttctggacagcggatacaaattcgatatgtcggttgaagaagcctcagagttagcaaggagatccatctaccatgctacattccgtgatggagctagtggtggagttgctagcgtgtaccacgttgggccgcaaggatggacgaaactctctggagacgacgttggcgagctacattaccattattaccccgtggctccaatcaccgcggaacatgtgatggaagaggctgccgaataagtactgtgattcttgtctatcttactaagagttttattacatcacttatgttttgttcatcaatgaacagaatcatagattcaagtttcttttgtattgcgaatgatgtagacgttagtttggccacaatgatcacgttgcataatagataacataatagataacctgtttctttctt

SEQ ID NO: 4058 - protein, 297 aa, Arabidopsis thaliana
  peptide (1)..(297): Ceres Seq. ID no. 12343426
  misc_feature (78)..(260): Pfam Name: Pfam Description:  Proteasome A-type and B-type
  misc_feature (25)..(297): NCBI GI NO: 15231544 NR Description: 26S proteasome beta subunit, putative
  misc_feature (25)..(295): NCBI GI NO: 15222152 NR Description: 20S proteasome beta subunit E1
  misc_feature (25)..(295): NCBI GI NO: 15292875 NR Description: putative proteasome epsilon chain precursor
  misc_feature (25)..(294): NCBI GI NO: 3914430 NR Description: Proteasome subunit beta type 5 precursor
  misc_feature (25)..(295): NCBI GI NO: 8671510 NR Description: beta 5 subunit of 20S proteasome
  misc_feature (130)..(295): NCBI GI NO: 3980264 NR Description: 20S proteasome beta subunit [Cicer arietinum]
  misc_feature (25)..(98): NCBI GI NO: 3980264 NR Description: 20S proteasome beta subunit [Cicer arietinum]
  misc_feature (98)..(296): NCBI GI NO: 16588840 NR Description: putative 20S proteasome beta subunit 5
  misc_feature (101)..(274): NCBI GI NO: 14594931 NR Description: putative beta5 proteasome subunit
  misc_feature (30)..(284): NCBI GI NO: 6755204 NR Description: proteasome
IEKILTHSSASLIFYSISLFRNLTMKLDTSGLETTMPVIGFGSNSEMLDGFSSAPSFDLPRTTDFDGFQKKAVEMVKPAKGTTTLAFIFKEGVMVAADSRASMGGYISSQSVKKIIEINPYMLGTMAGGAADCQFWHRNLGIKCRLHELANKRRISVSGASKLLANMLYSYRGMGLSVGTMIAGWDETGPGLYYVDNEGGRLKGDRFSVGSGSPYAYGVLDSGYKFDMSVEEASELARRSIYHATFRDGASGGVASVYHVGPQGWTKLSGDDVGELHYHYYPVAPITAEHVMEEAAE

SEQ ID NO: 4059 - protein, 273 aa, Arabidopsis thaliana
  peptide (1)..(273): Ceres Seq. ID no. 12343427
  misc_feature (54)..(236): Pfam Name: Pfam Description:  Proteasome A-type and B-type
  misc_feature (1)..(273): NCBI GI NO: 15231544 NR Description: 26S proteasome beta subunit, putative
  misc_feature (1)..(271): NCBI GI NO: 15222152 NR Description: 20S proteasome beta subunit E1
  misc_feature (1)..(271): NCBI GI NO: 15292875 NR Description: putative proteasome epsilon chain precursor
  misc_feature (1)..(270): NCBI GI NO: 3914430 NR Description: Proteasome subunit beta type 5 precursor
  misc_feature (1)..(271): NCBI GI NO: 8671510 NR Description: beta 5 subunit of 20S proteasome
  misc_feature (106)..(271): NCBI GI NO: 3980264 NR Description: 20S proteasome beta subunit [Cicer arietinum]
  misc_feature (1)..(74): NCBI GI NO: 3980264 NR Description: 20S proteasome beta subunit [Cicer arietinum]
  misc_feature (74)..(272): NCBI GI NO: 16588840 NR Description: putative 20S proteasome beta subunit 5
  misc_feature (77)..(250): NCBI GI NO: 14594931 NR Description: putative beta5 proteasome subunit
  misc_feature (6)..(260): NCBI GI NO: 6755204 NR Description: proteasome
MKLDTSGLETTMPVIGFGSNSEMLDGFSSAPSFDLPRTTDFDGFQKKAVEMVKPAKGTTTLAFIFKEGVMVAADSRASMGGYISSQSVKKIIEINPYMLGTMAGGAADCQFWHRNLGIKCRLHELANKRRISVSGASKLLANMLYSYRGMGLSVGTMIAGWDETGPGLYYVDNEGGRLKGDRFSVGSGSPYAYGVLDSGYKFDMSVEEASELARRSIYHATFRDGASGGVASVYHVGPQGWTKLSGDDVGELHYHYYPVAPITAEHVMEEAAE

SEQ ID NO: 4060 - protein, 262 aa, Arabidopsis thaliana
  peptide (1)..(262): Ceres Seq. ID no. 12343428
  misc_feature (43)..(225): Pfam Name: Pfam Description:  Proteasome A-type and B-type
  misc_feature (1)..(262): NCBI GI NO: 15231544 NR Description: 26S proteasome beta subunit, putative
  misc_feature (1)..(260): NCBI GI NO: 15222152 NR Description: 20S proteasome beta subunit E1
  misc_feature (1)..(260): NCBI GI NO: 15292875 NR Description: putative proteasome epsilon chain precursor
  misc_feature (1)..(259): NCBI GI NO: 3914430 NR Description: Proteasome subunit beta type 5 precursor
  misc_feature (1)..(260): NCBI GI NO: 8671510 NR Description: beta 5 subunit of 20S proteasome
  misc_feature (95)..(260): NCBI GI NO: 3980264 NR Description: 20S proteasome beta subunit [Cicer arietinum]
  misc_feature (1)..(63): NCBI GI NO: 3980264 NR Description: 20S proteasome beta subunit [Cicer arietinum]
  misc_feature (63)..(261): NCBI GI NO: 16588840 NR Description: putative 20S proteasome beta subunit 5
  misc_feature (66)..(239): NCBI GI NO: 14594931 NR Description: putative beta5 proteasome subunit
  misc_feature (1)..(249): NCBI GI NO: 6755204 NR Description: proteasome
MPVIGFGSNSEMLDGFSSAPSFDLPRTTDFDGFQKKAVEMVKPAKGTTTLAFIFKEGVMVAADSRASMGGYISSQSVKKIIEINPYMLGTMAGGAADCQFWHRNLGIKCRLHELANKRRISVSGASKLLANMLYSYRGMGLSVGTMIAGWDETGPGLYYVDNEGGRLKGDRFSVGSGSPYAYGVLDSGYKFDMSVEEASELARRSIYHATFRDGASGGVASVYHVGPQGWTKLSGDDVGELHYHYYPVAPITAEHVMEEAAE

SEQ ID NO: 4061 - DNA, 1134 bp, Arabidopsis thaliana
  misc_feature (1)..(1134): Ceres Seq. ID no. 12579539
acgaataccattaccttagaacattcttaatcgaaaaaacgagggcgagagatatcttcttatccatggcggctattgctagtctgcaagcagttaatctcacatttaggcgacgtagcactcgatgtggaattgctgagccgagcggagagccagctccgatggggctgaagactagatacgaggatgggctggtggagagagtgttcatgggtctcttcgcgaggaagatggacaagttcgggtcgaagaagaagaaggacacgaaggagaagggtttttgggagtacgattacgagagcttcgtggaggtgtcaaagagagtgatgcagggacggtccagagtgcagcagcaagaggccgtgagggaggttcttctctctatgctgcctcctggtgctcctgaacagtttaggaaattgttcccaccaacgaaatgggctgcagagttcaatgccgctcttacagtgcctttctttcactggttggttggtccatctcaggtcatagaagtggaagtgaatggtgtgaaacagaagtggagttcttatcaagaaatgcaggtatctggagaacagtgggtgtgtaggaatgtgtgtgaatatgtgcaagattccaacccaagatttcttcaccaatgagtttggcctcccactcaccatgaacccaaattatgaagacatgagctgcgagatgatatacgggcaagcacctccggcctttgaggaggatgtagccaccaagcaaccttgtctagcagatatatgttctatgtcgaatccaagctccccaatctgccctaaactagaggcatgagtggagtggatcagcagccacttctttgacgggatgtgcaatttccaagcgatatacatactttttttcttttccaaacacatacattacatataaaagacagttgtgaagacgagttagtgttctttgttactattctggttgggttgtgtaaagtatacgataatacacttgagcttactcatcttctttatgttttaagtttgaactcgccatgttggttataacttggatctcaagtgttacttgcagtttgtattgtaatataaaaccaaaaactgagattagcttagctttaaagtaaccctctctgcttat

SEQ ID NO: 4062 - protein, 212 aa, Arabidopsis thaliana
  peptide (1)..(212): Ceres Seq. ID no. 12579540
  misc_feature (22)..(204): NCBI GI NO: 18408106 NR Description: expressed protein; protein id: At1g64680
  misc_feature (96)..(199): NCBI GI NO: 22299485 NR Description: ORF_ID:tll1942~hypothetical protein
  misc_feature (97)..(212): NCBI GI NO: 18379048 NR Description: Expressed protein; protein id: At1g03055
EYHYLRTFLIEKTRARDIFLSMAAIASLQAVNLTFRRRSTRCGIAEPSGEPAPMGLKTRYEDGLVERVFMGLFARKMDKFGSKKKKDTKEKGFWEYDYESFVEVSKRVMQGRSRVQQQEAVREVLLSMLPPGAPEQFRKLFPPTKWAAEFNAALTVPFFHWLVGPSQVIEVEVNGVKQKWSSYQEMQVSGEQWVCRNVCEYVQDSNPRFLHQ

SEQ ID NO: 4063 - protein, 191 aa, Arabidopsis thaliana
  peptide (1)..(191): Ceres Seq. ID no. 12579541
  misc_feature (1)..(183): NCBI GI NO: 18408106 NR Description: expressed protein; protein id: At1g64680
  misc_feature (75)..(178): NCBI GI NO: 22299485 NR Description: ORF_ID:tll1942~hypothetical protein
  misc_feature (76)..(191): NCBI GI NO: 18379048 NR Description: Expressed protein; protein id: At1g03055
MAAIASLQAVNLTFRRRSTRCGIAEPSGEPAPMGLKTRYEDGLVERVFMGLFARKMDKFGSKKKKDTKEKGFWEYDYESFVEVSKRVMQGRSRVQQQEAVREVLLSMLPPGAPEQFRKLFPPTKWAAEFNAALTVPFFHWLVGPSQVIEVEVNGVKQKWSSYQEMQVSGEQWVCRNVCEYVQDSNPRFLHQ

SEQ ID NO: 4064 - protein, 159 aa, Arabidopsis thaliana
  peptide (1)..(159): Ceres Seq. ID no. 12579542
  misc_feature (1)..(151): NCBI GI NO: 18408106 NR Description: expressed protein; protein id: At1g64680
  misc_feature (43)..(146): NCBI GI NO: 22299485 NR Description: ORF_ID:tll1942~hypothetical protein
  misc_feature (44)..(159): NCBI GI NO: 18379048 NR Description: Expressed protein; protein id: At1g03055
MGLKTRYEDGLVERVFMGLFARKMDKFGSKKKKDTKEKGFWEYDYESFVEVSKRVMQGRSRVQQQEAVREVLLSMLPPGAPEQFRKLFPPTKWAAEFNAALTVPFFHWLVGPSQVIEVEVNGVKQKWSSYQEMQVSGEQWVCRNVCEYVQDSNPRFLHQ

SEQ ID NO: 4065 - DNA, 1488 bp, Arabidopsis thaliana
  misc_feature (1)..(1488): Ceres Seq. ID no. 13509260
aagaaaccctagaaaattccgattcatcaactgagagagaagaagaattgagaaatgatgaagcgtctgatcccaacgttcaaccgcatcttggtgcagagagtcatccagcccgctaaaaccgaaagcggcattctcctacctgagaaatcctccaagctgcggttgaacgttgggatcagacgcttcatcattttcacattctcttctctctcgatatcatctaaatctctctcgatctcaatttcgcaaaatggctgacaagaagatcagaatcggaatcaacggtttcggaagaatcggtcgtttggttgctagagttgttcttcagagggatgatgttgagctcgtcgctgttaacgatcctttcatcaccaccgagtacatgacatacatgtttaagtatgacagtgttcacggtcagtggaagcaccatgagcttaaggtgaaggatgacaaaactcttctcttcggtgagaagccagtcactgttttcggcatcaggaaccctgaggacatcccatggggtgaggctggagctgactttgttgttgagtctactggtgtcttcactgacaaagacaaggctgctgctcacttgaagggtggtgctaaaaaggttgtcatctctgccccaagcaaagatgcgcccatgttcgttgttggtgtcaacgagcacgagtacaagtctgaccttgacattgtttccaacgctagttgcaccactaactgccttgctcctcttgccaaggttattaatgacaggtttggcattgttgagggactcatgaccactgtccactctatcactgctactcagaagacagttgatggtccatcaatgaaggactggagaggtggaagagctgcttccttcaacattattcctagcagcactggtgccgccaaggctgttgggaaagtgttgccatccctcaatggaaaattgaccggaatgtctttccgtgttccaaccgttgatgtctcagttgttgatctcaccgttagacttgagaaagctgcaacatacgacgaaatcaagaaggccatcaaggaggaatctgaaggcaaaatgaagggaattttgggatacactgaggatgatgttgtgtctaccgactttgttggtgacaacaggtcaagcattttcgatgccaaggctgggattgcattgagcgacaagtttgtgaagttggtgtcatggtacgacaacgaatggggttacagttctcgtgtcgttgaccttatcgttcacatgtcaaaggcctaagcttacaccggcgagagtttgtgtgtggttgagttcgtactgttctgaataaaaaaaaggagaaaagaaaactcgagttgttatgttttttcactgattccatgcgcagtcatgagagtttgtagcttttgtctttttgctttctcttaatgtttccctgctttatttactgaaaccattggtttggttttttatgttaattaagtttttagttcatt

SEQ ID NO: 4066 - protein, 338 aa, Arabidopsis thaliana
  peptide (1)..(338): Ceres Seq. ID no. 13509261
  misc_feature (157)..(318): Pfam Name: Pfam Description:  Glyceraldehyde 3-phosphate dehydrogenase
  misc_feature (1)..(338): NCBI GI NO: 15222848 NR Description: glyceraldehyde-3-phosphate dehydrogenase -related
  misc_feature (1)..(338): NCBI GI NO: 15229231 NR Description: glyceraldehyde-3-phosphate dehydrogenase C subunit
  misc_feature (1)..(338): NCBI GI NO: 21593240 NR Description: glyceraldehyde-3-phosphate dehydrogenase C subunit
  misc_feature (1)..(338): NCBI GI NO: 81622 NR Description: glyceraldehyde-3-phosphate dehydrogenase
  misc_feature (1)..(338): NCBI GI NO: 120675 NR Description: Glyceraldehyde 3-phosphate dehydrogenase
  misc_feature (1)..(338): NCBI GI NO: 22094840 NR Description: glyceraldehyde 3-phosphate dehydrogenase
  misc_feature (1)..(336): NCBI GI NO: 120669 NR Description: Glyceraldehyde 3-phosphate dehydrogenase
  misc_feature (5)..(337): NCBI GI NO: 462141 NR Description: Glyceraldehyde 3-phosphate dehydrogenase (GAPDH)
  misc_feature (6)..(337): NCBI GI NO: 462137 NR Description: GLYCERALDEHYDE 3-PHOSPHATE DEHYDROGENASE
  misc_feature (5)..(336): NCBI GI NO: 4539543 NR Description: glyceraldehyde-3-phosphate dehydrogenase
MADKKIRIGINGFGRIGRLVARVVLQRDDVELVAVNDPFITTEYMTYMFKYDSVHGQWKHHELKVKDDKTLLFGEKPVTVFGIRNPEDIPWGEAGADFVVESTGVFTDKDKAAAHLKGGAKKVVISAPSKDAPMFVVGVNEHEYKSDLDIVSNASCTTNCLAPLAKVINDRFGIVEGLMTTVHSITATQKTVDGPSMKDWRGGRAASFNIIPSSTGAAKAVGKVLPSLNGKLTGMSFRVPTVDVSVVDLTVRLEKAATYDEIKKAIKEESEGKMKGILGYTEDDVVSTDFVGDNRSSIFDAKAGIALSDKFVKLVSWYDNEWGYSSRVVDLIVHMSKA

SEQ ID NO: 4067 - protein, 294 aa, Arabidopsis thaliana
  peptide (1)..(294): Ceres Seq. ID no. 13509262
  misc_feature (113)..(274): Pfam Name: Pfam Description:  Glyceraldehyde 3-phosphate dehydrogenase
  misc_feature (1)..(294): NCBI GI NO: 15222848 NR Description: glyceraldehyde-3-phosphate dehydrogenase -related
  misc_feature (1)..(294): NCBI GI NO: 15229231 NR Description: glyceraldehyde-3-phosphate dehydrogenase C subunit
  misc_feature (1)..(294): NCBI GI NO: 21593240 NR Description: glyceraldehyde-3-phosphate dehydrogenase C subunit
  misc_feature (1)..(294): NCBI GI NO: 81622 NR Description: glyceraldehyde-3-phosphate dehydrogenase
  misc_feature (1)..(294): NCBI GI NO: 120675 NR Description: Glyceraldehyde 3-phosphate dehydrogenase
  misc_feature (1)..(294): NCBI GI NO: 22094840 NR Description: glyceraldehyde 3-phosphate dehydrogenase
  misc_feature (1)..(292): NCBI GI NO: 120669 NR Description: Glyceraldehyde 3-phosphate dehydrogenase
  misc_feature (1)..(293): NCBI GI NO: 462141 NR Description: Glyceraldehyde 3-phosphate dehydrogenase (GAPDH)
  misc_feature (1)..(293): NCBI GI NO: 462137 NR Description: GLYCERALDEHYDE 3-PHOSPHATE DEHYDROGENASE
  misc_feature (1)..(292): NCBI GI NO: 4539543 NR Description: glyceraldehyde-3-phosphate dehydrogenase
MTYMFKYDSVHGQWKHHELKVKDDKTLLFGEKPVTVFGIRNPEDIPWGEAGADFVVESTGVFTDKDKAAAHLKGGAKKVVISAPSKDAPMFVVGVNEHEYKSDLDIVSNASCTTNCLAPLAKVINDRFGIVEGLMTTVHSITATQKTVDGPSMKDWRGGRAASFNIIPSSTGAAKAVGKVLPSLNGKLTGMSFRVPTVDVSVVDLTVRLEKAATYDEIKKAIKEESEGKMKGILGYTEDDVVSTDFVGDNRSSIFDAKAGIALSDKFVKLVSWYDNEWGYSSRVVDLIVHMSKA

SEQ ID NO: 4068 - protein, 291 aa, Arabidopsis thaliana
  peptide (1)..(291): Ceres Seq. ID no. 13509263
  misc_feature (110)..(271): Pfam Name: Pfam Description:  Glyceraldehyde 3-phosphate dehydrogenase
  misc_feature (1)..(291): NCBI GI NO: 15222848 NR Description: glyceraldehyde-3-phosphate dehydrogenase -related
  misc_feature (1)..(291): NCBI GI NO: 15229231 NR Description: glyceraldehyde-3-phosphate dehydrogenase C subunit
  misc_feature (1)..(291): NCBI GI NO: 21593240 NR Description: glyceraldehyde-3-phosphate dehydrogenase C subunit
  misc_feature (1)..(291): NCBI GI NO: 81622 NR Description: glyceraldehyde-3-phosphate dehydrogenase
  misc_feature (1)..(291): NCBI GI NO: 120675 NR Description: Glyceraldehyde 3-phosphate dehydrogenase
  misc_feature (1)..(291): NCBI GI NO: 22094840 NR Description: glyceraldehyde 3-phosphate dehydrogenase
  misc_feature (1)..(289): NCBI GI NO: 120669 NR Description: Glyceraldehyde 3-phosphate dehydrogenase
  misc_feature (1)..(290): NCBI GI NO: 462141 NR Description: Glyceraldehyde 3-phosphate dehydrogenase (GAPDH)
  misc_feature (1)..(290): NCBI GI NO: 462137 NR Description: GLYCERALDEHYDE 3-PHOSPHATE DEHYDROGENASE
  misc_feature (1)..(289): NCBI GI NO: 4539543 NR Description: glyceraldehyde-3-phosphate dehydrogenase
MFKYDSVHGQWKHHELKVKDDKTLLFGEKPVTVFGIRNPEDIPWGEAGADFVVESTGVFTDKDKAAAHLKGGAKKVVISAPSKDAPMFVVGVNEHEYKSDLDIVSNASCTTNCLAPLAKVINDRFGIVEGLMTTVHSITATQKTVDGPSMKDWRGGRAASFNIIPSSTGAAKAVGKVLPSLNGKLTGMSFRVPTVDVSVVDLTVRLEKAATYDEIKKAIKEESEGKMKGILGYTEDDVVSTDFVGDNRSSIFDAKAGIALSDKFVKLVSWYDNEWGYSSRVVDLIVHMSKA

SEQ ID NO: 4069 - DNA, 1649 bp, Arabidopsis thaliana
  misc_feature (1)..(1649): Ceres Seq. ID no. 13645741
aaaaatcaattagggttttaacaaaaggttttagatttctggattgctgctctttctcccctgtgccgtcctgtggaaaacatcgttctttcaccaacaatggcgaagaagcgagatcgaattgtcaacactcaaccttttatctccgatgacgcctccctcgcttcttccaggaaacgatcaaaggttccaaaaacccatcagaaacaggaaaagttgattgaagctggtatgagcgagaagatcatgaaacaagctcttgcacaacaaaaggaagttgctgatgaagagaacgccgagagaaaccctagtagcgccgcttttgctgttgccggcgctgcgactgctggagaggagcagaaaattctggaggaggaagaagatgatattgatgattttgatggaacctttgaaaaccagagccaattcaataagcaagaggagattaatgaggatgatgagaagttgtttgagtcattcttaaataagaatgctcctcctcaacgtacgcttactgatatcattatcaagaagctcaaagataaggatgctgacttagctgaagaagagcgtcccgatcctaaaatggaccctgcaataactaagttatataaaggtgttggcaagtttatgagtgagtatacagttgggaaattgccaaaagcatttaagcttgttacttcaatggaacactgggaggatgttttatacttgactgagccagagaaatggtcacctaacgcattgtatcaagccacaaggatctttgcttccaacttgaaagacagacaagttcaacggttttataactatgttttgcttccgcgagtgagagaggatattagaaagcacaagaagctgcactttgctctgtaccaggctctgaaaaagtcactgtataagcctagtgctttcaatcaagggatactattcccgctttgtaagtcggggacatgcaatctcagagaagctgtaattatagggagcattcttgaaaagtgttcgatccctatgcttcactcatgtgttgccttgaacagactggctgagatggattattgtggcacaacaagttactttataaaagttcttttggagaagaaatattgtatgccgtatcgggtgcttgatgcattggttgctcacttcatgagatttgttgacgatataagagttatgcctgtgatttggcaccagtctcttcttacctttgtgcaacggtacaattatgaaatactaaaggaagataaagaacatctccaaactctcctccagaggcaaaaacaccatcttgttactcctgagattctgagagagcttaaggatagcagaaaccgtggagagaaagaagatcctatggtggataattttgccccagtaccggctaaagaagataggtttgacattcctgaagtaccaatggaagaagactgatgattcatggtgtttggtattgaaagaggactgatgattcatagcagcagagataaaccctgaaactgggtgggtatgattctggttttccagttttgacatcgttgtattattatttcttatttgagtaagatttgaaatttttattactacatgatagtgtatctttaaacatggtttaatctttttgatataatccaaatttggtcttgtct

SEQ ID NO: 4070 - protein, 444 aa, Arabidopsis thaliana
  peptide (1)..(444): Ceres Seq. ID no. 13645742
  misc_feature (127)..(423): Pfam Name: Pfam Description:  Bystin
  misc_feature (1)..(444): NCBI GI NO: 20268780 NR Description: putative bystin [Arabidopsis thaliana]
  misc_feature (1)..(444): NCBI GI NO: 15222394 NR Description: bystin -related [Arabidopsis thaliana]
  misc_feature (12)..(418): NCBI GI NO: 31419416 NR Description: Unknown (protein for MGC:63889) [Danio rerio]
  misc_feature (15)..(420): NCBI GI NO: 29792064 NR Description: bystin-like [Homo sapiens]
  misc_feature (111)..(421): NCBI GI NO: 32996727 NR Description: bystin-like [Rattus norvegicus]
  misc_feature (116)..(420): NCBI GI NO: 38566213 NR Description: BYSL protein [Homo sapiens]
  misc_feature (116)..(420): NCBI GI NO: 33873575 NR Description: BYSL protein [Homo sapiens]
  misc_feature (127)..(420): NCBI GI NO: 21264404 NR Description: Bystin
  misc_feature (128)..(420): NCBI GI NO: 15208645 NR Description: bystin [Homo sapiens]
  misc_feature (128)..(420): NCBI GI NO: 15011984 NR Description: bystin [Homo sapiens]
MAKKRDRIVNTQPFISDDASLASSRKRSKVPKTHQKQEKLIEAGMSEKIMKQALAQQKEVADEENAERNPSSAAFAVAGAATAGEEQKILEEEEDDIDDFDGTFENQSQFNKQEEINEDDEKLFESFLNKNAPPQRTLTDIIIKKLKDKDADLAEEERPDPKMDPAITKLYKGVGKFMSEYTVGKLPKAFKLVTSMEHWEDVLYLTEPEKWSPNALYQATRIFASNLKDRQVQRFYNYVLLPRVREDIRKHKKLHFALYQALKKSLYKPSAFNQGILFPLCKSGTCNLREAVIIGSILEKCSIPMLHSCVALNRLAEMDYCGTTSYFIKVLLEKKYCMPYRVLDALVAHFMRFVDDIRVMPVIWHQSLLTFVQRYNYEILKEDKEHLQTLLQRQKHHLVTPEILRELKDSRNRGEKEDPMVDNFAPVPAKEDRFDIPEVPMEED

SEQ ID NO: 4071 - protein, 400 aa, Arabidopsis thaliana
  peptide (1)..(400): Ceres Seq. ID no. 13645743
  misc_feature (83)..(379): Pfam Name: Pfam Description:  Bystin
  misc_feature (1)..(400): NCBI GI NO: 20268780 NR Description: putative bystin [Arabidopsis thaliana]
  misc_feature (1)..(400): NCBI GI NO: 15222394 NR Description: bystin -related [Arabidopsis thaliana]
  misc_feature (1)..(374): NCBI GI NO: 31419416 NR Description: Unknown (protein for MGC:63889) [Danio rerio]
  misc_feature (1)..(376): NCBI GI NO: 29792064 NR Description: bystin-like [Homo sapiens]
  misc_feature (67)..(377): NCBI GI NO: 32996727 NR Description: bystin-like [Rattus norvegicus]
  misc_feature (72)..(376): NCBI GI NO: 38566213 NR Description: BYSL protein [Homo sapiens]
  misc_feature (72)..(376): NCBI GI NO: 33873575 NR Description: BYSL protein [Homo sapiens]
  misc_feature (83)..(376): NCBI GI NO: 21264404 NR Description: Bystin
  misc_feature (84)..(376): NCBI GI NO: 15208645 NR Description: bystin [Homo sapiens]
  misc_feature (84)..(376): NCBI GI NO: 15011984 NR Description: bystin [Homo sapiens]
MSEKIMKQALAQQKEVADEENAERNPSSAAFAVAGAATAGEEQKILEEEEDDIDDFDGTFENQSQFNKQEEINEDDEKLFESFLNKNAPPQRTLTDIIIKKLKDKDADLAEEERPDPKMDPAITKLYKGVGKFMSEYTVGKLPKAFKLVTSMEHWEDVLYLTEPEKWSPNALYQATRIFASNLKDRQVQRFYNYVLLPRVREDIRKHKKLHFALYQALKKSLYKPSAFNQGILFPLCKSGTCNLREAVIIGSILEKCSIPMLHSCVALNRLAEMDYCGTTSYFIKVLLEKKYCMPYRVLDALVAHFMRFVDDIRVMPVIWHQSLLTFVQRYNYEILKEDKEHLQTLLQRQKHHLVTPEILRELKDSRNRGEKEDPMVDNFAPVPAKEDRFDIPEVPMEED

SEQ ID NO: 4072 - protein, 395 aa, Arabidopsis thaliana
  peptide (1)..(395): Ceres Seq. ID no. 13645744
  misc_feature (78)..(374): Pfam Name: Pfam Description:  Bystin
  misc_feature (1)..(395): NCBI GI NO: 20268780 NR Description: putative bystin [Arabidopsis thaliana]
  misc_feature (1)..(395): NCBI GI NO: 15222394 NR Description: bystin -related [Arabidopsis thaliana]
  misc_feature (1)..(369): NCBI GI NO: 31419416 NR Description: Unknown (protein for MGC:63889) [Danio rerio]
  misc_feature (1)..(371): NCBI GI NO: 29792064 NR Description: bystin-like [Homo sapiens]
  misc_feature (62)..(372): NCBI GI NO: 32996727 NR Description: bystin-like [Rattus norvegicus]
  misc_feature (67)..(371): NCBI GI NO: 38566213 NR Description: BYSL protein [Homo sapiens]
  misc_feature (67)..(371): NCBI GI NO: 33873575 NR Description: BYSL protein [Homo sapiens]
  misc_feature (78)..(371): NCBI GI NO: 21264404 NR Description: Bystin
  misc_feature (79)..(371): NCBI GI NO: 15208645 NR Description: bystin [Homo sapiens]
  misc_feature (79)..(371): NCBI GI NO: 15011984 NR Description: bystin [Homo sapiens]
MKQALAQQKEVADEENAERNPSSAAFAVAGAATAGEEQKILEEEEDDIDDFDGTFENQSQFNKQEEINEDDEKLFESFLNKNAPPQRTLTDIIIKKLKDKDADLAEEERPDPKMDPAITKLYKGVGKFMSEYTVGKLPKAFKLVTSMEHWEDVLYLTEPEKWSPNALYQATRIFASNLKDRQVQRFYNYVLLPRVREDIRKHKKLHFALYQALKKSLYKPSAFNQGILFPLCKSGTCNLREAVIIGSILEKCSIPMLHSCVALNRLAEMDYCGTTSYFIKVLLEKKYCMPYRVLDALVAHFMRFVDDIRVMPVIWHQSLLTFVQRYNYEILKEDKEHLQTLLQRQKHHLVTPEILRELKDSRNRGEKEDPMVDNFAPVPAKEDRFDIPEVPMEED

SEQ ID NO: 4073 - DNA, 1578 bp, Arabidopsis thaliana
  misc_feature (1)..(1578): Ceres Seq. ID no. 12329047
aatcaccaaagaaagaagtacaaaatgtttaactatgtgattattcttcctttagctctcttcctcttggcttacaaattcttctttacatctaaaaagcagcgttactatctccctccctctccatcttactctctcccaatcctcggccaccacctcctcatcaaaccgccggttcaccgtctcttccaccgcctttccaatatccatggcccaatcttctacctccgacttggttcccgccgtgccgtcgtcatatcttcctcctcgctggcaagagaatgcttcacaggtcaaaacgatgtcattgtatcaaaccgccctcgttttctaacctccaaatacattgcttacaactacacaaccatcgcaacaacatcttacggtgaccactggcgtaacctccgccgcatttgctccctcgaaatcgtctcctcaaaacgtctcgccaactttctccacatccgcaaagaggagatccagcgcatgctaacgagactctcacgtgacgcccgtgtcggcaaagaggtcgagctcgagtctatcttgtacgacctaacgttcaacaatatcgtgaggatggttacagggaagatatactacggcgacgatgtcagcgacaaagaagaagcagagttgttcaagaagctttttactttcatcaccactaatagtggcgcgaggcatcctggagaatacttgcccttcatgaagatattcggagggagctttgagaaggaggtgaaagctgcagcaaaagtcatcgatgaaatgttgcagcgtctgcttgacgagtgcaagagtgataaagacggtaacactatggttaatcacttgctctctttgcaacaggacgaccctgagtactacactgacatcattatcaaaggcttaatgctgggtataatggttgcctcatcagagacctccgctttgacaatagagtgggcgatggcgagtttgttgaaccacccaaaagttttggacaaagtaaaattagagatcgacgagataatcggacaagaccgtttgatcgaagaatcagacatagcaaaccttccttacctccaaaacgtagtatccgagacactccggctacatccagcagcgccggttcttgtgccaagatcaacagcagaagacatcaagatcggaggatacgatgtgccacgtgacacaatggtaatggtgaacgcgtgggcgatacatagagatccagatctttggaccgaaccggagaggtttaaccctgagaggttcaacggtggagaaggagaaaaagatgatgttcgtatgctgatagcgtttggaagcggacggagaatatgtcccggtgttggactagcgcacaagattgtgacattagcgttaggatcgttaattcaatgctttgattggaaaaaggtgaacgaaaaagagattgatatgagtgagggtccggggatggctatgcgtatgatggtgccgttacgagccttgtgtaagactcgacccataatgaataagctcccggcctacacgaaagtttagttatgtttttgtatttttcaatggaaaaattgttacattatgttgtgt

SEQ ID NO: 4074 - protein, 509 aa, Arabidopsis thaliana
  peptide (1)..(509): Ceres Seq. ID no. 12329048
  misc_feature (9)..(509): NCBI GI NO: 15235541 NR Description: cytochrome p450, putative; protein id: At4g37410
  misc_feature (9)..(465): NCBI GI NO: 18252165 NR Description: cytochrome P450 monooxygenase - like protein
  misc_feature (9)..(508): NCBI GI NO: 18420031 NR Description: cytochrome p450 family; protein id: At4g37400
  misc_feature (9)..(508): NCBI GI NO: 21618287 NR Description: cytochrome P450 monooxygenase-like protein
  misc_feature (12)..(503): NCBI GI NO: 15235559 NR Description: cytochrome p450 family; protein id: At4g37430
  misc_feature (12)..(503): NCBI GI NO: 21618274 NR Description: cytochrome P450 monooxygenase CYP91A2
  misc_feature (12)..(503): NCBI GI NO: 18491105 NR Description: AT4g37430/F6G17_80 [Arabidopsis thaliana]
  misc_feature (12)..(503): NCBI GI NO: 25282605 NR Description: cytochrome P450 monooxygenase
  misc_feature (11)..(505): NCBI GI NO: 15242068 NR Description: cytochrome p450 family; protein id: At5g57220
  misc_feature (12)..(489): NCBI GI NO: 23397303 NR Description: putative cytochrome P450 monooxygenase (CYP91A2)
NHQRKKYKMFNYVIILPLALFLLAYKFFFTSKKQRYYLPPSPSYSLPILGHHLLIKPPVHRLFHRLSNIHGPIFYLRLGSRRAVVISSSSLARECFTGQNDVIVSNRPRFLTSKYIAYNYTTIATTSYGDHWRNLRRICSLEIVSSKRLANFLHIRKEEIQRMLTRLSRDARVGKEVELESILYDLTFNNIVRMVTGKIYYGDDVSDKEEAELFKKLFTFITTNSGARHPGEYLPFMKIFGGSFEKEVKAAAKVIDEMLQRLLDECKSDKDGNTMVNHLLSLQQDDPEYYTDIIIKGLMLGIMVASSETSALTIEWAMASLLNHPKVLDKVKLEIDEIIGQDRLIEESDIANLPYLQNVVSETLRLHPAAPVLVPRSTAEDIKIGGYDVPRDTMVMVNAWAIHRDPDLWTEPERFNPERFNGGEGEKDDVRMLIAFGSGRRICPGVGLAHKIVTLALGSLIQCFDWKKVNEKEIDMSEGPGMAMRMMVPLRALCKTRPIMNKLPAYTKV

SEQ ID NO: 4075 - protein, 501 aa, Arabidopsis thaliana
  peptide (1)..(501): Ceres Seq. ID no. 12329049
  misc_feature (1)..(501): NCBI GI NO: 15235541 NR Description: cytochrome p450, putative; protein id: At4g37410
  misc_feature (1)..(457): NCBI GI NO: 18252165 NR Description: cytochrome P450 monooxygenase - like protein
  misc_feature (1)..(500): NCBI GI NO: 18420031 NR Description: cytochrome p450 family; protein id: At4g37400
  misc_feature (1)..(500): NCBI GI NO: 21618287 NR Description: cytochrome P450 monooxygenase-like protein
  misc_feature (4)..(495): NCBI GI NO: 15235559 NR Description: cytochrome p450 family; protein id: At4g37430
  misc_feature (4)..(495): NCBI GI NO: 21618274 NR Description: cytochrome P450 monooxygenase CYP91A2
  misc_feature (4)..(495): NCBI GI NO: 18491105 NR Description: AT4g37430/F6G17_80 [Arabidopsis thaliana]
  misc_feature (4)..(495): NCBI GI NO: 25282605 NR Description: cytochrome P450 monooxygenase
  misc_feature (3)..(497): NCBI GI NO: 15242068 NR Description: cytochrome p450 family; protein id: At5g57220
  misc_feature (4)..(481): NCBI GI NO: 23397303 NR Description: putative cytochrome P450 monooxygenase (CYP91A2)
MFNYVIILPLALFLLAYKFFFTSKKQRYYLPPSPSYSLPILGHHLLIKPPVHRLFHRLSNIHGPIFYLRLGSRRAVVISSSSLARECFTGQNDVIVSNRPRFLTSKYIAYNYTTIATTSYGDHWRNLRRICSLEIVSSKRLANFLHIRKEEIQRMLTRLSRDARVGKEVELESILYDLTFNNIVRMVTGKIYYGDDVSDKEEAELFKKLFTFITTNSGARHPGEYLPFMKIFGGSFEKEVKAAAKVIDEMLQRLLDECKSDKDGNTMVNHLLSLQQDDPEYYTDIIIKGLMLGIMVASSETSALTIEWAMASLLNHPKVLDKVKLEIDEIIGQDRLIEESDIANLPYLQNVVSETLRLHPAAPVLVPRSTAEDIKIGGYDVPRDTMVMVNAWAIHRDPDLWTEPERFNPERFNGGEGEKDDVRMLIAFGSGRRICPGVGLAHKIVTLALGSLIQCFDWKKVNEKEIDMSEGPGMAMRMMVPLRALCKTRPIMNKLPAYTKV

SEQ ID NO: 4076 - protein, 347 aa, Arabidopsis thaliana
  peptide (1)..(347): Ceres Seq. ID no. 12329050
  misc_feature (1)..(347): NCBI GI NO: 15235541 NR Description: cytochrome p450, putative; protein id: At4g37410
  misc_feature (1)..(303): NCBI GI NO: 18252165 NR Description: cytochrome P450 monooxygenase - like protein
  misc_feature (1)..(346): NCBI GI NO: 18420031 NR Description: cytochrome p450 family; protein id: At4g37400
  misc_feature (1)..(346): NCBI GI NO: 21618287 NR Description: cytochrome P450 monooxygenase-like protein
  misc_feature (1)..(341): NCBI GI NO: 15235559 NR Description: cytochrome p450 family; protein id: At4g37430
  misc_feature (1)..(341): NCBI GI NO: 21618274 NR Description: cytochrome P450 monooxygenase CYP91A2
  misc_feature (1)..(341): NCBI GI NO: 18491105 NR Description: AT4g37430/F6G17_80 [Arabidopsis thaliana]
  misc_feature (1)..(341): NCBI GI NO: 25282605 NR Description: cytochrome P450 monooxygenase
  misc_feature (1)..(343): NCBI GI NO: 15242068 NR Description: cytochrome p450 family; protein id: At5g57220
  misc_feature (1)..(327): NCBI GI NO: 23397303 NR Description: putative cytochrome P450 monooxygenase (CYP91A2)
MLTRLSRDARVGKEVELESILYDLTFNNIVRMVTGKIYYGDDVSDKEEAELFKKLFTFITTNSGARHPGEYLPFMKIFGGSFEKEVKAAAKVIDEMLQRLLDECKSDKDGNTMVNHLLSLQQDDPEYYTDIIIKGLMLGIMVASSETSALTIEWAMASLLNHPKVLDKVKLEIDEIIGQDRLIEESDIANLPYLQNVVSETLRLHPAAPVLVPRSTAEDIKIGGYDVPRDTMVMVNAWAIHRDPDLWTEPERFNPERFNGGEGEKDDVRMLIAFGSGRRICPGVGLAHKIVTLALGSLIQCFDWKKVNEKEIDMSEGPGMAMRMMVPLRALCKTRPIMNKLPAYTKV

SEQ ID NO: 4077 - DNA, 1205 bp, Arabidopsis thaliana
  misc_feature (1)..(1205): Ceres Seq. ID no. 12329051
actaaaagccctaatctctgcttctgtaaagttcaacatttggccgagtcaaagaaaccgagtgattctctgatccgattccggcgaaagaggacgaaacaaacggaacttgttcatcatcttctccagaaatgacgtcgtttcaggtgatgcgttcttcaaattctagaaactcggatctatctcgtcgtatctctacttcttcttcgtctgtaagacctcaacaacagttccggcgagatctaacaagtgtcggttacggcggaagaaacgacggattatacagttcaaattcgatgacggtggaagggattttacacgatactttcgcatcagatccaccagcaccaacggaatcttcactcttagatgcgtcgataaatctgatggatgcttctccagcaccaatggagataacaacaacgacgggttctgatgttgtagatcacggcggaggaacggagacgacgcgtagtgggaagagtgtcgatgaggtttggagagagatggtctcaggagaaggtaaagggatgaaggaagagacgtcggaagagataatgacgttagaggattttctagcgaaagctgcggtggaagacgaaacagcggtgacggcgtcggcggaggatttggatgtgaagattccggtgacgaattacggattcgatcattctgcaccgccgcataatccgtttcagatgattgataaagtagaaggatcaatagttgcgtttgggaatggtttagatgtttacggaggaggagctagagggaagagagcgagagtgatggttgagccattggataaagcagctgcacagagacagagaaggatgattaagaatcgtgaatctgcagctaggtctagagagaggaaacaagcttatcaagttgagttagaagctttggctgcgaagcttgaggaagagaatgagttgctttctaaggagattgaagataagaggaaagagagataccagaagttgatggagtttgtgattcctgttgttgagaaaccgaagcagcagccaccacggtttttacgcaggattcggtctttggaatggtgataagaggtatagacttttgaggattttagggtcttaatgttacttactttgtgtatgtgtgtgtgagagttgattcataatctgcagtagagtgtaatgattatggttaataacttatatattatattagattgc

SEQ ID NO: 4078 - protein, 312 aa, Arabidopsis thaliana
  peptide (1)..(312): Ceres Seq. ID no. 12329052
  misc_feature (226)..(290): Pfam Name: Pfam Description:  bZIP transcription factor
  misc_feature (1)..(312): NCBI GI NO: 21554353 NR Description: unknown [Arabidopsis thaliana]
  misc_feature (1)..(312): NCBI GI NO: 15240086 NR Description: bZIP transcription factor
  misc_feature (104)..(312): NCBI GI NO: 15219608 NR Description: G-box binding factor 4, GBF4
  misc_feature (117)..(312): NCBI GI NO: 7489466 NR Description: DNA binding protein - rice
  misc_feature (117)..(312): NCBI GI NO: 7638404 NR Description: OSE2 [Oryza sativa]
  misc_feature (209)..(312): NCBI GI NO: 29367541 NR Description: OSE2-like protein
  misc_feature (117)..(312): NCBI GI NO: 34908608 NR Description: putative DNA binding protein
  misc_feature (115)..(275): NCBI GI NO: 26451276 NR Description: putative bZIP transcription factor AtbZIP12 / DPBF4
  misc_feature (113)..(309): NCBI GI NO: 33146493 NR Description: putative bZIP protein DPBF3
  misc_feature (115)..(275): NCBI GI NO: 7487620 NR Description: probable bZIP transcription factor
MTSFQVMRSSNSRNSDLSRRISTSSSSVRPQQQFRRDLTSVGYGGRNDGLYSSNSMTVEGILHDTFASDPPAPTESSLLDASINLMDASPAPMEITTTTGSDVVDHGGGTETTRSGKSVDEVWREMVSGEGKGMKEETSEEIMTLEDFLAKAAVEDETAVTASAEDLDVKIPVTNYGFDHSAPPHNPFQMIDKVEGSIVAFGNGLDVYGGGARGKRARVMVEPLDKAAAQRQRRMIKNRESAARSRERKQAYQVELEALAAKLEEENELLSKEIEDKRKERYQKLMEFVIPVVEKPKQQPPRFLRRIRSLEW

SEQ ID NO: 4079 - protein, 306 aa, Arabidopsis thaliana
  peptide (1)..(306): Ceres Seq. ID no. 12329053
  misc_feature (220)..(284): Pfam Name: Pfam Description:  bZIP transcription factor
  misc_feature (1)..(306): NCBI GI NO: 21554353 NR Description: unknown [Arabidopsis thaliana]
  misc_feature (1)..(306): NCBI GI NO: 15240086 NR Description: bZIP transcription factor
  misc_feature (98)..(306): NCBI GI NO: 15219608 NR Description: G-box binding factor 4, GBF4
  misc_feature (111)..(306): NCBI GI NO: 7489466 NR Description: DNA binding protein - rice
  misc_feature (111)..(306): NCBI GI NO: 7638404 NR Description: OSE2 [Oryza sativa]
  misc_feature (203)..(306): NCBI GI NO: 29367541 NR Description: OSE2-like protein
  misc_feature (111)..(306): NCBI GI NO: 34908608 NR Description: putative DNA binding protein
  misc_feature (109)..(269): NCBI GI NO: 26451276 NR Description: putative bZIP transcription factor AtbZIP12 / DPBF4
  misc_feature (107)..(303): NCBI GI NO: 33146493 NR Description: putative bZIP protein DPBF3
  misc_feature (109)..(269): NCBI GI NO: 7487620 NR Description: probable bZIP transcription factor
MRSSNSRNSDLSRRISTSSSSVRPQQQFRRDLTSVGYGGRNDGLYSSNSMTVEGILHDTFASDPPAPTESSLLDASINLMDASPAPMEITTTTGSDVVDHGGGTETTRSGKSVDEVWREMVSGEGKGMKEETSEEIMTLEDFLAKAAVEDETAVTASAEDLDVKIPVTNYGFDHSAPPHNPFQMIDKVEGSIVAFGNGLDVYGGGARGKRARVMVEPLDKAAAQRQRRMIKNRESAARSRERKQAYQVELEALAAKLEEENELLSKEIEDKRKERYQKLMEFVIPVVEKPKQQPPRFLRRIRSLEW

SEQ ID NO: 4080 - protein, 257 aa, Arabidopsis thaliana
  peptide (1)..(257): Ceres Seq. ID no. 12329054
  misc_feature (171)..(235): Pfam Name: Pfam Description:  bZIP transcription factor
  misc_feature (1)..(257): NCBI GI NO: 21554353 NR Description: unknown [Arabidopsis thaliana]
  misc_feature (1)..(257): NCBI GI NO: 15240086 NR Description: bZIP transcription factor
  misc_feature (49)..(257): NCBI GI NO: 15219608 NR Description: G-box binding factor 4, GBF4
  misc_feature (62)..(257): NCBI GI NO: 7489466 NR Description: DNA binding protein - rice
  misc_feature (62)..(257): NCBI GI NO: 7638404 NR Description: OSE2 [Oryza sativa]
  misc_feature (154)..(257): NCBI GI NO: 29367541 NR Description: OSE2-like protein
  misc_feature (62)..(257): NCBI GI NO: 34908608 NR Description: putative DNA binding protein
  misc_feature (60)..(220): NCBI GI NO: 26451276 NR Description: putative bZIP transcription factor AtbZIP12 / DPBF4
  misc_feature (58)..(254): NCBI GI NO: 33146493 NR Description: putative bZIP protein DPBF3
  misc_feature (60)..(220): NCBI GI NO: 7487620 NR Description: probable bZIP transcription factor
MTVEGILHDTFASDPPAPTESSLLDASINLMDASPAPMEITTTTGSDVVDHGGGTETTRSGKSVDEVWREMVSGEGKGMKEETSEEIMTLEDFLAKAAVEDETAVTASAEDLDVKIPVTNYGFDHSAPPHNPFQMIDKVEGSIVAFGNGLDVYGGGARGKRARVMVEPLDKAAAQRQRRMIKNRESAARSRERKQAYQVELEALAAKLEEENELLSKEIEDKRKERYQKLMEFVIPVVEKPKQQPPRFLRRIRSLEW

SEQ ID NO: 4081 - DNA, 1056 bp, Arabidopsis thaliana
  misc_feature (1)..(1056): Ceres Seq. ID no. 12329132
gtttgatattttccaattccgcgtctttctctgttgaaatcgaaaaaattttcaaaacaaaatctaaggaaaaaagagcaacaagtttcaaatctcatttgggtttttcattttgaaaagaaggacccatttttatctctctctttgttttgttttctcgaatctgaaggagtaaagttaaaagctttgaaggagagaatcaatggcgggttacagagcagatgatgaatacgattacctattcaaggttgttctgataggtgattcaggtgtgggcaaatccaatttgctttcacgattcacgaagaacgagtttagtctcgagtcaaaatccacgatcggggtcgagttcgcgactcggagtttgaatgttgatgataaagtcatcaaagctcagatttgggatactgctggtcaagaaaggtaccgagccatcactagtgcgtattaccgaggagctgttggagcgcttcttgtctacgatgtaacccgacactcaacatttgaaaacgttgagacttggctgaaagaactcagaaaccacactgatccaaacattgtagtcatgctcgtgggcaacaaatctgaccttcgccatctcgtggctgttcagactgaagatgctaagtcattcgccgagaaagaatctctctacttcatggaaacctcggctctcgaagccaccaatgttgagaacgctttcgccgaagtcctcactcagattcaccacattgtgagcaagaaggcgatggaagctgcgagcgaatccgctaatgttccatcgaaaggagacaagatcgatatcggtaaagatgtttcagctgtgaagaaaggtggatgctgctcgaactaatcagagagtagaattattgttaacaacctaaggatcggtttttgttaacggttctatcgaatatgaagattgcttttaggttgagtaatgcccatttggcgtatttctgttatttatctgatctatcaatgttattgtttgaaaatgctatgtcaaattttcagaaccctaaattatatttatctcaaacaatagaattgttg

SEQ ID NO: 4082 - protein, 216 aa, Arabidopsis thaliana
  peptide (1)..(216): Ceres Seq. ID no. 12329133
  misc_feature (15)..(176): Pfam Name: Pfam Description:  Ras family
  misc_feature (1)..(216): NCBI GI NO: 15242483 NR Description: GTP-binding protein, putative
  misc_feature (1)..(216): NCBI GI NO: 21536533 NR Description: Rab-type small GTP-binding protein-like
  misc_feature (1)..(216): NCBI GI NO: 15234020 NR Description: ras-related GTP binding protein, putative
  misc_feature (1)..(216): NCBI GI NO: 541979 NR Description: GTP-binding protein, ras-like - fava bean
  misc_feature (1)..(216): NCBI GI NO: 22597170 NR Description: GTP-binding protein [Glycine max]
  misc_feature (2)..(215): NCBI GI NO: 13195452 NR Description: GTP-binding protein [Oryza sativa]
  misc_feature (2)..(215): NCBI GI NO: 730512 NR Description: RAS-RELATED PROTEIN RIC2
  misc_feature (1)..(216): NCBI GI NO: 7438433 NR Description: GTP-binding protein - garden pea
  misc_feature (1)..(216): NCBI GI NO: 15219955 NR Description: GTP binding protein, putative
  misc_feature (1)..(216): NCBI GI NO: 22597172 NR Description: small GTP-binding protein [Glycine max]
MAGYRADDEYDYLFKVVLIGDSGVGKSNLLSRFTKNEFSLESKSTIGVEFATRSLNVDDKVIKAQIWDTAGQERYRAITSAYYRGAVGALLVYDVTRHSTFENVETWLKELRNHTDPNIVVMLVGNKSDLRHLVAVQTEDAKSFAEKESLYFMETSALEATNVENAFAEVLTQIHHIVSKKAMEAASESANVPSKGDKIDIGKDVSAVKKGGCCSN

SEQ ID NO: 4083 - DNA, 778 bp, Arabidopsis thaliana
  misc_feature (1)..(778): Ceres Seq. ID no. 12396902
gttttccttaagagcttcatcgtcatcatccgagaattggagcagagatacgaagatttggcgaaaaatggggagcgagccaacaaaagtgatggtggcggtgaacgcttcgacgatcaaagactatcctaacccttcgattagctgcaaaagagcattcgaatggactctggagaagatcgtaaggtccaacacttccgatttcaagattctcttgctccacgtacaagtcgtcgacgaagacggttttgatgacgtggatagcatttatgcttcccctgaggatttccgagacatgagacaatctaacaaggcaaaaggtcttcaccttctcgagtttttcgttaataaatgtcatgagattggggttggttgcgaggcctggattaagacaggtgatcccaaggatgtcatatgccaagaagtgaagcgagttcgaccagattttctggtcgtgggaagtcgtggacttggccggtttcaaaaggtctttgtggggactgtgagtgcgttctgtgtgaaacatgcggagtgtccagttatgacgatcaaacgcaatgccgatgaaactcccagtgatccagctgatgactaaacaataacaacgtcccttccttctttgatctatacagagagagagtgcttttgtgtgtacaaaatccaaattcctacccctatatgtatttgtatctgtgtatgtatgtgtgtgtgcagcttgttccgttttctgaattggttttcaaactgaaccaaactgctatatatttggtttctttgc

SEQ ID NO: 4084 - protein, 197 aa, Arabidopsis thaliana
  peptide (1)..(197): Ceres Seq. ID no. 12396903
  misc_feature (27)..(184): Pfam Name: Pfam Description:  Universal stress protein family
  misc_feature (8)..(197): NCBI GI NO: 6016711 NR Description: unknown protein [Arabidopsis thaliana]
  misc_feature (23)..(197): NCBI GI NO: 18395845 NR Description: expressed protein; protein id: At3g01520
  misc_feature (31)..(197): NCBI GI NO: 21536534 NR Description: putative ethylene-responsive protein
  misc_feature (23)..(197): NCBI GI NO: 15241464 NR Description: putative protein; protein id: At5g14680.1
  misc_feature (25)..(197): NCBI GI NO: 19387249 NR Description: putative ethylene-responsive protein
  misc_feature (50)..(187): NCBI GI NO: 18408994 NR Description: expressed protein; protein id: At1g68300
  misc_feature (24)..(185): NCBI GI NO: 34914610 NR Description: P0520B06.18
  misc_feature (70)..(193): NCBI GI NO: 30694811 NR Description: expressed protein [Arabidopsis thaliana]
  misc_feature (29)..(184): NCBI GI NO: 40539010 NR Description: putative stress-related protein
  misc_feature (52)..(190): NCBI GI NO: 30681321 NR Description: ER6 protein -related [Arabidopsis thaliana]
FSLRASSSSSENWSRDTKIWRKMGSEPTKVMVAVNASTIKDYPNPSISCKRAFEWTLEKIVRSNTSDFKILLLHVQVVDEDGFDDVDSIYASPEDFRDMRQSNKAKGLHLLEFFVNKCHEIGVGCEAWIKTGDPKDVICQEVKRVRPDFLVVGSRGLGRFQKVFVGTVSAFCVKHAECPVMTIKRNADETPSDPADD

SEQ ID NO: 4085 - protein, 175 aa, Arabidopsis thaliana
  peptide (1)..(175): Ceres Seq. ID no. 12396904
  misc_feature (5)..(162): Pfam Name: Pfam Description:  Universal stress protein family
  misc_feature (1)..(175): NCBI GI NO: 6016711 NR Description: unknown protein [Arabidopsis thaliana]
  misc_feature (1)..(175): NCBI GI NO: 18395845 NR Description: expressed protein; protein id: At3g01520
  misc_feature (9)..(175): NCBI GI NO: 21536534 NR Description: putative ethylene-responsive protein
  misc_feature (1)..(175): NCBI GI NO: 15241464 NR Description: putative protein; protein id: At5g14680.1
  misc_feature (3)..(175): NCBI GI NO: 19387249 NR Description: putative ethylene-responsive protein
  misc_feature (28)..(165): NCBI GI NO: 18408994 NR Description: expressed protein; protein id: At1g68300
  misc_feature (2)..(163): NCBI GI NO: 34914610 NR Description: P0520B06.18
  misc_feature (48)..(171): NCBI GI NO: 30694811 NR Description: expressed protein [Arabidopsis thaliana]
  misc_feature (7)..(162): NCBI GI NO: 40539010 NR Description: putative stress-related protein
  misc_feature (30)..(168): NCBI GI NO: 30681321 NR Description: ER6 protein -related [Arabidopsis thaliana]
MGSEPTKVMVAVNASTIKDYPNPSISCKRAFEWTLEKIVRSNTSDFKILLLHVQVVDEDGFDDVDSIYASPEDFRDMRQSNKAKGLHLLEFFVNKCHEIGVGCEAWIKTGDPKDVICQEVKRVRPDFLVVGSRGLGRFQKVFVGTVSAFCVKHAECPVMTIKRNADETPSDPADD

SEQ ID NO: 4086 - protein, 167 aa, Arabidopsis thaliana
  peptide (1)..(167): Ceres Seq. ID no. 12396905
  misc_feature (1)..(154): Pfam Name: Pfam Description:  Universal stress protein family
  misc_feature (1)..(167): NCBI GI NO: 6016711 NR Description: unknown protein [Arabidopsis thaliana]
  misc_feature (1)..(167): NCBI GI NO: 18395845 NR Description: expressed protein; protein id: At3g01520
  misc_feature (1)..(167): NCBI GI NO: 21536534 NR Description: putative ethylene-responsive protein
  misc_feature (1)..(167): NCBI GI NO: 15241464 NR Description: putative protein; protein id: At5g14680.1
  misc_feature (1)..(167): NCBI GI NO: 19387249 NR Description: putative ethylene-responsive protein
  misc_feature (20)..(157): NCBI GI NO: 18408994 NR Description: expressed protein; protein id: At1g68300
  misc_feature (1)..(155): NCBI GI NO: 34914610 NR Description: P0520B06.18
  misc_feature (40)..(163): NCBI GI NO: 30694811 NR Description: expressed protein [Arabidopsis thaliana]
  misc_feature (1)..(154): NCBI GI NO: 40539010 NR Description: putative stress-related protein
  misc_feature (22)..(160): NCBI GI NO: 30681321 NR Description: ER6 protein -related [Arabidopsis thaliana]
MVAVNASTIKDYPNPSISCKRAFEWTLEKIVRSNTSDFKILLLHVQVVDEDGFDDVDSIYASPEDFRDMRQSNKAKGLHLLEFFVNKCHEIGVGCEAWIKTGDPKDVICQEVKRVRPDFLVVGSRGLGRFQKVFVGTVSAFCVKHAECPVMTIKRNADETPSDPADD

SEQ ID NO: 4087 - DNA, 2066 bp, Arabidopsis thaliana
  misc_feature (1)..(2066): Ceres Seq. ID no. 13495924
ttccaaattcctctgttttcttcttttaaaagcctcctcttcttcctcttctctctcctcacaactcaaaactctctccatctctcttctaaaatcagacaagaaagatggctcaagaggaagtacagaaatcggctgatgtcgctgctgctccggtggtgaaggagaaacctattaccgataaggaggttactattcctacccctgtggcagagaaagaggaagttgctgctcctgtctctgatgagaaggcggttccagagaaggaggtgactccggagaaggaagccccagcggcggaagcggagaaatctgtttcggtgaaggaggaagagacggttgttgtagctgagaaggttgttgttttaactgctgaggaagttcagaagaaggcacttgaggagtttaaggagcttgtaagggaggctttgaacaaacgtgaattcactgctccggtgacgccggttaaggaagagaaaacagaggagaagaaaacagaggaggaaactaaagaggaagagaaaacagaggagaagaaagaagagacaacgactgaggttaaggttgaagaagagaaaccggcggttccagcggcggaggaggagaaatcatcagaggctgctccggttgagaccaaatctgaggagaaacctgaagagaaagcagaggtaacaaccgagaaagcatccagtgccgaagaagatggaaccaagaccgtggaagcaatcgaagaatctatcgtctctgtttcaccacctgaatccgccgtagcacctgtcgtggtagagactgtcgccgttgctgaggcagagccagtggagccggaagaagtctcgatctggggagttccactactccaagacgagagatctgacgtgatcctcacgaaattcctccgtgcaagagactttaaggtcaaagaagctttaaccatgcttaaaaacaccgtccagtggcgtaaagaaaacaaaatcgacgaactcgttgaatccggagaagaagtgagtgagttcgagaagatggtgtttgctcacggtgttgacaaagaaggacacgtcgtgatctacagttcttacggtgagtttcagaacaaggagcttttctccgacaaggagaagcttaacaagttcctcagctggaggattcagctacaagagaagtgtgtgagagctattgatttcagcaaccctgaagcgaagtcttcgtttgtgttcgtcagcgacttcaggaacgctccaggacttggtaaaagagccttgtggcaattcatcagacgcgctgttaaacaattcgaggacaattatcctgaattcgccgctaaagagctattcatcaatgtcccatggtggtacattccatactacaaaacattcggatctatcatcacatccccaaggactaggagcaagatggtccttgctggtccatccaaatctgccgatactattttcaaatacatagctcctgaacaagttcccgttaaatacggtggacttagcaaagatactcctttgaccgaagaaaccataacggaagccatcgttaaaccggcagcaaactacactattgaattgcctgcttctgaggcttgcacgctttcatgggagcttagggttttgggtgctgatgtgagctacggagctcagtttgagccaaccaccgaaggaagctatgctgtgatcgtctctaagacacggaagattggatcaaccgatgaaccggtgataaccgattcttttaaggtgggtgaaccgggaaagattgtgatcacaatcgacaaccagacttccaagaagaagaaagtgctctacaggttcaaaactcaataaaaggtctgatctttgaaatccaaatccaaggaagaagcaaaaaaaatgttattttgttatttgggggaaacaaattttaattaattaatttagtttgttatttattatgtaattttgaaatctcaagatgtggttgtgtttttgctttgttttggtattgggggttgttttcgtgtgtggagaatatgtgattaaaattcaaaagaaagtaaagaacactttgtttcatgatttctt

SEQ ID NO: 4088 - protein, 573 aa, Arabidopsis thaliana
  peptide (1)..(573): Ceres Seq. ID no. 13495925
  misc_feature (305)..(489): Pfam Name: Pfam Description:  CRAL/TRIO domain
  misc_feature (1)..(573): NCBI GI NO: 15218382 NR Description: cytosolic factor -related [Arabidopsis thaliana]
  misc_feature (1)..(573): NCBI GI NO: 15219901 NR Description: expressed protein [Arabidopsis thaliana]
  misc_feature (121)..(572): NCBI GI NO: 8894548 NR Description: hypothetical protein [Cicer arietinum]
  misc_feature (36)..(573): NCBI GI NO: 34907288 NR Description: contains ESTs AU093915
  misc_feature (117)..(573): NCBI GI NO: 15218383 NR Description: cytosolic factor -related [Arabidopsis thaliana]
  misc_feature (239)..(573): NCBI GI NO: 15081614 NR Description: At1g72160/T9N14_8 [Arabidopsis thaliana]
  misc_feature (27)..(573): NCBI GI NO: 18397616 NR Description: expressed protein [Arabidopsis thaliana]
  misc_feature (27)..(573): NCBI GI NO: 14334978 NR Description: unknown protein [Arabidopsis thaliana]
  misc_feature (5)..(573): NCBI GI NO: 30680992 NR Description: expressed protein [Arabidopsis thaliana]
  misc_feature (5)..(489): NCBI GI NO: 25407487 NR Description: hypothetical protein AT4g09160
MAQEEVQKSADVAAAPVVKEKPITDKEVTIPTPVAEKEEVAAPVSDEKAVPEKEVTPEKEAPAAEAEKSVSVKEEETVVVAEKVVVLTAEEVQKKALEEFKELVREALNKREFTAPVTPVKEEKTEEKKTEEETKEEEKTEEKKEETTTEVKVEEEKPAVPAAEEEKSSEAAPVETKSEEKPEEKAEVTTEKASSAEEDGTKTVEAIEESIVSVSPPESAVAPVVVETVAVAEAEPVEPEEVSIWGVPLLQDERSDVILTKFLRARDFKVKEALTMLKNTVQWRKENKIDELVESGEEVSEFEKMVFAHGVDKEGHVVIYSSYGEFQNKELFSDKEKLNKFLSWRIQLQEKCVRAIDFSNPEAKSSFVFVSDFRNAPGLGKRALWQFIRRAVKQFEDNYPEFAAKELFINVPWWYIPYYKTFGSIITSPRTRSKMVLAGPSKSADTIFKYIAPEQVPVKYGGLSKDTPLTEETITEAIVKPAANYTIELPASEACTLSWELRVLGADVSYGAQFEPTTEGSYAVIVSKTRKIGSTDEPVITDSFKVGEPGKIVITIDNQTSKKKKVLYRFKTQ

SEQ ID NO: 4089 - protein, 298 aa, Arabidopsis thaliana
  peptide (1)..(298): Ceres Seq. ID no. 13495926
  misc_feature (30)..(214): Pfam Name: Pfam Description:  CRAL/TRIO domain
  misc_feature (1)..(298): NCBI GI NO: 15218382 NR Description: cytosolic factor -related [Arabidopsis thaliana]
  misc_feature (1)..(298): NCBI GI NO: 15219901 NR Description: expressed protein [Arabidopsis thaliana]
  misc_feature (1)..(297): NCBI GI NO: 8894548 NR Description: hypothetical protein [Cicer arietinum]
  misc_feature (1)..(298): NCBI GI NO: 34907288 NR Description: contains ESTs AU093915
  misc_feature (1)..(298): NCBI GI NO: 15218383 NR Description: cytosolic factor -related [Arabidopsis thaliana]
  misc_feature (1)..(298): NCBI GI NO: 15081614 NR Description: At1g72160/T9N14_8 [Arabidopsis thaliana]
  misc_feature (1)..(298): NCBI GI NO: 18397616 NR Description: expressed protein [Arabidopsis thaliana]
  misc_feature (1)..(298): NCBI GI NO: 14334978 NR Description: unknown protein [Arabidopsis thaliana]
  misc_feature (1)..(298): NCBI GI NO: 30680992 NR Description: expressed protein [Arabidopsis thaliana]
  misc_feature (1)..(214): NCBI GI NO: 25407487 NR Description: hypothetical protein AT4g09160
MLKNTVQWRKENKIDELVESGEEVSEFEKMVFAHGVDKEGHVVIYSSYGEFQNKELFSDKEKLNKFLSWRIQLQEKCVRAIDFSNPEAKSSFVFVSDFRNAPGLGKRALWQFIRRAVKQFEDNYPEFAAKELFINVPWWYIPYYKTFGSIITSPRTRSKMVLAGPSKSADTIFKYIAPEQVPVKYGGLSKDTPLTEETITEAIVKPAANYTIELPASEACTLSWELRVLGADVSYGAQFEPTTEGSYAVIVSKTRKIGSTDEPVITDSFKVGEPGKIVITIDNQTSKKKKVLYRFKTQ

SEQ ID NO: 4090 - DNA, 809 bp, Arabidopsis thaliana
  misc_feature (1)..(809): Ceres Seq. ID no. 12559194
acacgaatcttgtttagtaaaaagcgcagctgcaaaaaaaatcgagtagagaagaagtaggcagacaaagaagaagaagaagaagttctcggcgtgcttcaatggcgatatcagtagcagcttcgtcctctatggccgtgatggttccacgtgttcccgccgtatccacccgttgctccgccgtcccttatcttcctcctcgctcctttggccgatcctctttcaccgttccgttgaagcttgtttcagggaatggattgcaaaaagttgaattgttgaagacaagagcttcttcagaagagacctcgtccattgataccaacgaactcatcacagatttgaaggaaaagtgggatggtcttgagaacaaatctactgtacttatatatggaggaggagccattgttgctgtttggttatcttccattgttgttggtgccatcaactctgttcctctggtaacaacactctctatataattcttttgagattagaaaatgtgtaatgagtttgagttaaagtgatgtttccatttcttgtgtttgtagcttccgaaagttatggaacttgtcggtctcgggtacactggatggtttgtctacagataccttctcttcaagtcaagccagaaaggaattggctggaggatattgaatccttaaagaaaaagatcgcaggaagcgaatagattcattttcaaataaaaccagctttctctctgtatgttttcctgtaatatcgtgttatattatacaatgtctctgtttcaacattgtatctgttgcatctgaaactattatcttggatcc

SEQ ID NO: 4091 - protein, 125 aa, Arabidopsis thaliana
  peptide (1)..(125): Ceres Seq. ID no. 12559195
  misc_feature (1)..(120): NCBI GI NO: 18411555 NR Description: expressed protein; protein id: At4g01150
  misc_feature (1)..(120): NCBI GI NO: 687677 NR Description: unknown
  misc_feature (11)..(123): NCBI GI NO: 38175474 NR Description: unknown protein
  misc_feature (4)..(120): NCBI GI NO: 18407178 NR Description: expressed protein; protein id: At2g46820
  misc_feature (62)..(123): NCBI GI NO: 7485852 NR Description: hypothetical protein F20D10
  misc_feature (4)..(120): NCBI GI NO: 21555057 NR Description: unknown [Arabidopsis thaliana]
  misc_feature (20)..(120): NCBI GI NO: 34393236 NR Description: unknown protein
  misc_feature (62)..(123): NCBI GI NO: 18420175 NR Description: expressed protein; protein id: At4g38100
  misc_feature (6)..(123): NCBI GI NO: 37536446 NR Description: hypothetical protein
MAISVAASSSMAVMVPRVPAVSTRCSAVPYLPPRSFGRSSFTVPLKLVSGNGLQKVELLKTRASSEETSSIDTNELITDLKEKWDGLENKSTVLIYGGGAIVAVWLSSIVVGAINSVPLVTTLSI

SEQ ID NO: 4092 - protein, 115 aa, Arabidopsis thaliana
  peptide (1)..(115): Ceres Seq. ID no. 12559196
  misc_feature (1)..(110): NCBI GI NO: 18411555 NR Description: expressed protein; protein id: At4g01150
  misc_feature (1)..(110): NCBI GI NO: 687677 NR Description: unknown
  misc_feature (1)..(113): NCBI GI NO: 38175474 NR Description: unknown protein
  misc_feature (1)..(110): NCBI GI NO: 18407178 NR Description: expressed protein; protein id: At2g46820
  misc_feature (52)..(113): NCBI GI NO: 7485852 NR Description: hypothetical protein F20D10
  misc_feature (1)..(110): NCBI GI NO: 21555057 NR Description: unknown [Arabidopsis thaliana]
  misc_feature (10)..(110): NCBI GI NO: 34393236 NR Description: unknown protein
  misc_feature (52)..(113): NCBI GI NO: 18420175 NR Description: expressed protein; protein id: At4g38100
  misc_feature (1)..(113): NCBI GI NO: 37536446 NR Description: hypothetical protein
MAVMVPRVPAVSTRCSAVPYLPPRSFGRSSFTVPLKLVSGNGLQKVELLKTRASSEETSSIDTNELITDLKEKWDGLENKSTVLIYGGGAIVAVWLSSIVVGAINSVPLVTTLSI

SEQ ID NO: 4093 - protein, 112 aa, Arabidopsis thaliana
  peptide (1)..(112): Ceres Seq. ID no. 12559197
  misc_feature (1)..(107): NCBI GI NO: 18411555 NR Description: expressed protein; protein id: At4g01150
  misc_feature (1)..(107): NCBI GI NO: 687677 NR Description: unknown
  misc_feature (1)..(110): NCBI GI NO: 38175474 NR Description: unknown protein
  misc_feature (1)..(107): NCBI GI NO: 18407178 NR Description: expressed protein; protein id: At2g46820
  misc_feature (49)..(110): NCBI GI NO: 7485852 NR Description: hypothetical protein F20D10
  misc_feature (1)..(107): NCBI GI NO: 21555057 NR Description: unknown [Arabidopsis thaliana]
  misc_feature (7)..(107): NCBI GI NO: 34393236 NR Description: unknown protein
  misc_feature (49)..(110): NCBI GI NO: 18420175 NR Description: expressed protein; protein id: At4g38100
  misc_feature (1)..(110): NCBI GI NO: 37536446 NR Description: hypothetical protein
MVPRVPAVSTRCSAVPYLPPRSFGRSSFTVPLKLVSGNGLQKVELLKTRASSEETSSIDTNELITDLKEKWDGLENKSTVLIYGGGAIVAVWLSSIVVGAINSVPLVTTLSI

SEQ ID NO: 4094 - DNA, 2566 bp, Arabidopsis thaliana
  misc_feature (1)..(2566): Ceres Seq. ID no. 13497704
atatatatatatatataactccaaaacaatcatttaatccaaacccaacatatccttttaacagaatcttctttatctgaaaatatctaaagaaaatggtattgaactttagagataagtcctgcatttttctggcaattctttgttgtttatcattgagttgtatagtaaaagcatcagtctcttatgatcgtaaagctgtgatcatcaatggacaaagaagaatccttctctccggttccattcactatccacgaagcacccctgagatgtggcctggcctaatacagaaagccaaagaaggaggcttggatgttattgagacttatgttttttggaatggccatgaaccttctcctggacaatattattttggagacaggtatgatttggttaagttcatcaagttggtgcaccaagctggtctctatgttaatctcagaattggcccttatgtttgtgctgaatggaattttgggggatttccggtttggctcaaatttgttcccggtatggcttttaggacggataatgaacctttcaaggctgcaatgaagaaattcactgaaaagattgtatggatgatgaaagcagaaaagttgtttcaaactcaaggaggacccatcattcttgcacagattgagaatgaatatggaccagtggaatgggaaataggagcaccgggaaaggcttatacaaaatgggtagctcaaatggcattaggactctcaactggtgttccatggattatgtgcaagcaagaagatgctcctggtcctatcatagacacatgcaatggttattactgtgaagatttcaaaccgaactcaatcaacaagccaaagatgtggacagagaattggactggttggtacacagattttggaggtgcggtaccatacagaccagtcgaagatattgcatactccgttgcacgatttatccaaaaaggaggttccctcatcaattactatatgtatcatggaggaacaaatttcgacagaacagccggtgagttcatggcttcaagctatgactatgacgctcctctcgatgaatacggcttaccaagagaaccaaagtatagtcacttgaaagcattgcataaagccatcaaacttagtgagccagctttgctttctgctgatgctaccgttacatcgcttggagctaagcaagaagcttatgtgttctggtctaaatcatcttgtgctgcgtttttatcgaacaaagatgagaactctgcagcgagagttctgttccgtggattcccatatgatttgcctccttggtcagtcagtattttacctgattgcaaaacagaggtttacaacactgcaaaggtcaatgcaccaagcgtacacaggaatatggttcctactggtactaaattctcttggggatcattcaacgaagcgactcctacagcgaatgaagctggtacgtttgcaagaaacgggcttgtggaacaaataagcatgacttgggacaaatctgactatttttggtatataacagacattacaatcggttccggtgagacatttttgaagactggtgattcacctcttcttacagttatgtcagctggacatgctcttcatgtgtttgtcaatggtcagctttcaggaactgcttatggaggacttgaccacccaaaactaacctttagccagaagatcaaactacatgcaggtgtcaacaagattgctcttctgagtgttgcagtgggtctcccgaacgttggtacacattttgaacagtggaataaaggagttcttggtccggtcacattgaagggagtaaactcaggaacatgggacatgtcgaaatggaaatggtcctataagattggtgtaaagggtgaggctttgagtcttcataccaacacagagagttccggtgtgagatggactcaaggatcatttgtggcgaagaagcaaccattaacctggtacaagtctacgtttgctacaccagcaggaaatgaaccattggctttagacatgaacacaatgggaaaaggtcaagtttggataaacggtagaaatattggacgtcattggcctgcatataaagctcaaggatcttgtggacgttgtaactacgctggaactttcgacgcaaagaaatgcttaagtaattgtggtgaagcttcacaaagatggtaccatgtacctcgttcatggcttaagtctcaaaaccttatagttgtgttcgaagagttaggtggtgatcctaacggaatctctttggttaaaagaacatgaaaagcttcttctgattccgagttttcaggacagaagcaagctgtttgattcgtttgtctatatctttctctggctttgctttgaagatagagacagagctggaattttttttcttttatggctttgtgcagtgattacaaaaattatacaacatgtatatgtataactgtatcctactactagtcatcatctatggctaaataaaattcacagaataaaggagtgtttctatttaccataacattttcgtttgttcaagcaaataactgtttcaatcatctcttgaagttggaacc

SEQ ID NO: 4095 - protein, 724 aa, Arabidopsis thaliana
  peptide (1)..(724): Ceres Seq. ID no. 13497705
  misc_feature (8)..(723): NCBI GI NO: 3869280 NR Description: beta-galactosidase precursor [Carica papaya]
  misc_feature (19)..(723): NCBI GI NO: 1352078 NR Description: Beta-galactosidase precursor
  misc_feature (19)..(723): NCBI GI NO: 12583687 NR Description: beta-D-galactosidase [Pyrus pyrifolia]
  misc_feature (23)..(724): NCBI GI NO: 7682677 NR Description: beta galactosidase [Vigna radiata]
  misc_feature (13)..(723): NCBI GI NO: 14970839 NR Description: beta-galactosidase [Fragaria x ananassa]
  misc_feature (11)..(723): NCBI GI NO: 1352077 NR Description: Beta-galactosidase precursor
  misc_feature (27)..(723): NCBI GI NO: 4138137 NR Description: ss-galactosidase [Lycopersicon esculentum]
  misc_feature (11)..(724): NCBI GI NO: 1168654 NR Description: Beta-galactosidase precursor (Lactase)
  misc_feature (21)..(723): NCBI GI NO: 15231354 NR Description: glycosyl hydrolase family 35 (beta-galactosidase)
  misc_feature (21)..(723): NCBI GI NO: 20260596 NR Description: galactosidase, putative [Arabidopsis thaliana]
MVLNFRDKSCIFLAILCCLSLSCIVKASVSYDRKAVIINGQRRILLSGSIHYPRSTPEMWPGLIQKAKEGGLDVIETYVFWNGHEPSPGQYYFGDRYDLVKFIKLVHQAGLYVNLRIGPYVCAEWNFGGFPVWLKFVPGMAFRTDNEPFKAAMKKFTEKIVWMMKAEKLFQTQGGPIILAQIENEYGPVEWEIGAPGKAYTKWVAQMALGLSTGVPWIMCKQEDAPGPIIDTCNGYYCEDFKPNSINKPKMWTENWTGWYTDFGGAVPYRPVEDIAYSVARFIQKGGSLINYYMYHGGTNFDRTAGEFMASSYDYDAPLDEYGLPREPKYSHLKALHKAIKLSEPALLSADATVTSLGAKQEAYVFWSKSSCAAFLSNKDENSAARVLFRGFPYDLPPWSVSILPDCKTEVYNTAKVNAPSVHRNMVPTGTKFSWGSFNEATPTANEAGTFARNGLVEQISMTWDKSDYFWYITDITIGSGETFLKTGDSPLLTVMSAGHALHVFVNGQLSGTAYGGLDHPKLTFSQKIKLHAGVNKIALLSVAVGLPNVGTHFEQWNKGVLGPVTLKGVNSGTWDMSKWKWSYKIGVKGEALSLHTNTESSGVRWTQGSFVAKKQPLTWYKSTFATPAGNEPLALDMNTMGKGQVWINGRNIGRHWPAYKAQGSCGRCNYAGTFDAKKCLSNCGEASQRWYHVPRSWLKSQNLIVVFEELGGDPNGISLVKRT

SEQ ID NO: 4096 - protein, 666 aa, Arabidopsis thaliana
  peptide (1)..(666): Ceres Seq. ID no. 13497706
  misc_feature (1)..(665): NCBI GI NO: 3869280 NR Description: beta-galactosidase precursor [Carica papaya]
  misc_feature (1)..(665): NCBI GI NO: 1352078 NR Description: Beta-galactosidase precursor
  misc_feature (1)..(665): NCBI GI NO: 12583687 NR Description: beta-D-galactosidase [Pyrus pyrifolia]
  misc_feature (1)..(666): NCBI GI NO: 7682677 NR Description: beta galactosidase [Vigna radiata]
  misc_feature (1)..(665): NCBI GI NO: 14970839 NR Description: beta-galactosidase [Fragaria x ananassa]
  misc_feature (1)..(665): NCBI GI NO: 1352077 NR Description: Beta-galactosidase precursor
  misc_feature (1)..(665): NCBI GI NO: 4138137 NR Description: ss-galactosidase [Lycopersicon esculentum]
  misc_feature (1)..(666): NCBI GI NO: 1168654 NR Description: Beta-galactosidase precursor (Lactase)
  misc_feature (1)..(665): NCBI GI NO: 15231354 NR Description: glycosyl hydrolase family 35 (beta-galactosidase)
  misc_feature (1)..(665): NCBI GI NO: 20260596 NR Description: galactosidase, putative [Arabidopsis thaliana]
MWPGLIQKAKEGGLDVIETYVFWNGHEPSPGQYYFGDRYDLVKFIKLVHQAGLYVNLRIGPYVCAEWNFGGFPVWLKFVPGMAFRTDNEPFKAAMKKFTEKIVWMMKAEKLFQTQGGPIILAQIENEYGPVEWEIGAPGKAYTKWVAQMALGLSTGVPWIMCKQEDAPGPIIDTCNGYYCEDFKPNSINKPKMWTENWTGWYTDFGGAVPYRPVEDIAYSVARFIQKGGSLINYYMYHGGTNFDRTAGEFMASSYDYDAPLDEYGLPREPKYSHLKALHKAIKLSEPALLSADATVTSLGAKQEAYVFWSKSSCAAFLSNKDENSAARVLFRGFPYDLPPWSVSILPDCKTEVYNTAKVNAPSVHRNMVPTGTKFSWGSFNEATPTANEAGTFARNGLVEQISMTWDKSDYFWYITDITIGSGETFLKTGDSPLLTVMSAGHALHVFVNGQLSGTAYGGLDHPKLTFSQKIKLHAGVNKIALLSVAVGLPNVGTHFEQWNKGVLGPVTLKGVNSGTWDMSKWKWSYKIGVKGEALSLHTNTESSGVRWTQGSFVAKKQPLTWYKSTFATPAGNEPLALDMNTMGKGQVWINGRNIGRHWPAYKAQGSCGRCNYAGTFDAKKCLSNCGEASQRWYHVPRSWLKSQNLIVVFEELGGDPNGISLVKRT

SEQ ID NO: 4097 - protein, 585 aa, Arabidopsis thaliana
  peptide (1)..(585): Ceres Seq. ID no. 13497707
  misc_feature (1)..(584): NCBI GI NO: 3869280 NR Description: beta-galactosidase precursor [Carica papaya]
  misc_feature (1)..(584): NCBI GI NO: 1352078 NR Description: Beta-galactosidase precursor
  misc_feature (1)..(584): NCBI GI NO: 12583687 NR Description: beta-D-galactosidase [Pyrus pyrifolia]
  misc_feature (1)..(585): NCBI GI NO: 7682677 NR Description: beta galactosidase [Vigna radiata]
  misc_feature (1)..(584): NCBI GI NO: 14970839 NR Description: beta-galactosidase [Fragaria x ananassa]
  misc_feature (1)..(584): NCBI GI NO: 1352077 NR Description: Beta-galactosidase precursor
  misc_feature (1)..(584): NCBI GI NO: 4138137 NR Description: ss-galactosidase [Lycopersicon esculentum]
  misc_feature (1)..(585): NCBI GI NO: 1168654 NR Description: Beta-galactosidase precursor (Lactase)
  misc_feature (1)..(584): NCBI GI NO: 15231354 NR Description: glycosyl hydrolase family 35 (beta-galactosidase)
  misc_feature (1)..(584): NCBI GI NO: 20260596 NR Description: galactosidase, putative [Arabidopsis thaliana]
MAFRTDNEPFKAAMKKFTEKIVWMMKAEKLFQTQGGPIILAQIENEYGPVEWEIGAPGKAYTKWVAQMALGLSTGVPWIMCKQEDAPGPIIDTCNGYYCEDFKPNSINKPKMWTENWTGWYTDFGGAVPYRPVEDIAYSVARFIQKGGSLINYYMYHGGTNFDRTAGEFMASSYDYDAPLDEYGLPREPKYSHLKALHKAIKLSEPALLSADATVTSLGAKQEAYVFWSKSSCAAFLSNKDENSAARVLFRGFPYDLPPWSVSILPDCKTEVYNTAKVNAPSVHRNMVPTGTKFSWGSFNEATPTANEAGTFARNGLVEQISMTWDKSDYFWYITDITIGSGETFLKTGDSPLLTVMSAGHALHVFVNGQLSGTAYGGLDHPKLTFSQKIKLHAGVNKIALLSVAVGLPNVGTHFEQWNKGVLGPVTLKGVNSGTWDMSKWKWSYKIGVKGEALSLHTNTESSGVRWTQGSFVAKKQPLTWYKSTFATPAGNEPLALDMNTMGKGQVWINGRNIGRHWPAYKAQGSCGRCNYAGTFDAKKCLSNCGEASQRWYHVPRSWLKSQNLIVVFEELGGDPNGISLVKRT

SEQ ID NO: 4098 - DNA, 3083 bp, Arabidopsis thaliana
  misc_feature (1)..(3083): Ceres Seq. ID no. 13488125
acttgacaaaattgaaaaacgcgtctccgagaggaaaatttagagaaaagcttctcgcgatcgcatcgggctcgtagatcgatctcctcctccatccaatcttccgttttcgtattcaccgtccggtaagaccttccggtacttgtgaatcggagaagaggaaggagaaaaattatcgcgttcctggaaattgaatttctagggtttcgtttttttctgaattattctgattctgatttcgtcaagggtgtttttcttaattggttgattgatcgtctttctagttcaattgttgaaaagtaattgaacatctattgaaatctgcttctcgtgatttgattctgggtttcgttgattggtttttttcgaggggtttgtttgttttatccttttttatttctataagatcaatttctcattgagaagaatacgatggcagcagggggtgttgatgtttccagaagttccgttgctgtcaaaaaagactacgacttttacaggaatggttctcgtgatgtgtatgttcgacagagtggtagagatgacgagaggcgtcaaatcaaaaggcctagtgaccatgatctcaggaggaatgatgggcgtcaccgatcacggttggcatatgagaaaggggaactacgggaggaagcagaggttcagagaccctctgagaaaaggaggaagttttcacccatcgtgtggaatgcagaaaaagtgggtagagctccatctagggagaagaccaagtctcctttccctgttccgactacaactgtgatatccaatcaggctgttgctggtaagactacttcaaacgatcaagtgaatgccttgatgtcgccagaacctagttatcttgctccagtgcagccttcagaagccctgctggctgtgaaacatcctgttgatgatttggaggagggtcagttggaggaagaacaggtgatgcaggaggatgtaaaggagggtctgttggaggaagaacaagtgatgcaggaaccaaatataaagacatctaggtgggggacaggtttgacttccccaaaggaggagttaatatctgttaacgtttccaagactaatagatggaacaggagcagtttgacaccggagtgcgaggaagtaatggtgtctgaagaacagcagtgctattcgtctggatctggcagtggacatctcagcgtagagaagcttagtgcagatggaaattctggtcgtgagtattatagttctgatcatgatgagttagaacatgaagatcaagattctttaactccgggagagatgaacatgatgtttgggagcaggtctgtgaatgaatttcagaagctaaacaagataaatgaaggaacatatggaattgtttacaaagcaagggatgagaaaacaaaagagattgttgcgctcaaaaagatcaagatgaaggaagataggttcgaagaagagtatggattccctttgacatcattgagggaaattaacatacttttgtcatgcaatcaccctgcgattgtgaacgtgaaggaggttgtggttggagggaaaaacgataatgatgtttatatggtcatggaacacttagaacacgacctgaggggagtaatggatagaaggaaggaaccttttagcactagcgaagtcaagtgcttgatgatgcagctgttggatggtttgaaatacctccacacaaattggattatccacagggatctgaagccatctaatcttctgatgaacaattgtggggagttaaaaatatgtgattttgggatggcgcgccagtatgggagccctatcaagccttacacccagatggttattacccagtggtacaggccacctgaacttcttctaggagcaaaagagtactctacagcagttgatatgtggtcagtgggttgcattatggctgaactgttgtctcaaaagcctttgttcccgggtaagagtgagcttgaccaacttcagaagatctttgcggtccttggaacaccaaacgaagcaatatggcctgggttctcatcatttccgaatgctaaagccaagtttcctacacagccttacaatatgttacgtaagaagtttccagctatttcatttgtaggtggtcaaattctttctgaacgtggatttgatttgctgaacagtctactaactttggaccctgagaaacgtctaacagtggaagatgctctcaaccatggttggttccatgaagtcccgttaccaaaatccaaagatttcatgccgacatatcctccaaagcggtaactgagaaaaaacgtgctatcatttggacgagaggatgtcaacaaatacacagggaagtcgactggtcgtattttggtattttcctttttactcaaaagacttgctttcatctattcttaactcagttgcgttgctttgttgcctggagattcagggcattctagtgtaccatttattcggattcatgtgtaaatatgagtggtccgtaaaactgaaaggtgtgtttctctcttttcgttaggaccctaatgttattgctatcaagagttgtacacactattgactcacatgctttaatggaagagatctcagtattcactttctctctctagtaattgggttgggatggttattgtttatgtcctcatatttcttctgtgcattgtttttattcacgaggtaaacgcaaagagtttatcacaaacgtgagaatggaagttgacatcagtaagtttattttgattacttatttaccacgctctgttatcaatgttggtttgttgttcgacgtccctttgtctttgaggtgctcgtatttggtctgttggcagtgagaaaaagatgattcatgatgagtttctgtggacataggaggtatggcagtggtttttttcatgttaatccgagaattaagggatttgggataaaaagctatatagaaagaagctaaaataagtttgtcttcaacactataaccctttgtcctcctttctttttaacttctgtaaacagctaagctaaatcaagttcatttcaataacgaataaactagaatcagcattacctttgacgaggccataaacagaaaggag

SEQ ID NO: 4099 - protein, 612 aa, Arabidopsis thaliana
  peptide (1)..(612): Ceres Seq. ID no. 13488126
  misc_feature (297)..(593): Pfam Name: Pfam Description:  Protein kinase domain
  misc_feature (45)..(609): NCBI GI NO: 38344237 NR Description: OJ991113_30.14
  misc_feature (267)..(609): NCBI GI NO: 15220477 NR Description: protein kinase family [Arabidopsis thaliana]
  misc_feature (267)..(609): NCBI GI NO: 17064846 NR Description: putative protein kinase [Arabidopsis thaliana]
  misc_feature (25)..(611): NCBI GI NO: 3978441 NR Description: PITSLRE protein kinase alpha SV9 isoform
  misc_feature (26)..(611): NCBI GI NO: 507427 NR Description: PITSLRE isoform PBETA21
  misc_feature (26)..(611): NCBI GI NO: 1082285 NR Description: protein kinase (EC 2
  misc_feature (26)..(611): NCBI GI NO: 16357492 NR Description: cell division cycle 2-like 2 isoform 1
  misc_feature (26)..(611): NCBI GI NO: 3978440 NR Description: PITSLRE protein kinase alpha SV5 isoform
  misc_feature (26)..(611): NCBI GI NO: 16332358 NR Description: cell division cycle 2-like 1
  misc_feature (26)..(611): NCBI GI NO: 16332362 NR Description: cell division cycle 2-like 1
MAAGGVDVSRSSVAVKKDYDFYRNGSRDVYVRQSGRDDERRQIKRPSDHDLRRNDGRHRSRLAYEKGELREEAEVQRPSEKRRKFSPIVWNAEKVGRAPSREKTKSPFPVPTTTVISNQAVAGKTTSNDQVNALMSPEPSYLAPVQPSEALLAVKHPVDDLEEGQLEEEQVMQEDVKEGLLEEEQVMQEPNIKTSRWGTGLTSPKEELISVNVSKTNRWNRSSLTPECEEVMVSEEQQCYSSGSGSGHLSVEKLSADGNSGREYYSSDHDELEHEDQDSLTPGEMNMMFGSRSVNEFQKLNKINEGTYGIVYKARDEKTKEIVALKKIKMKEDRFEEEYGFPLTSLREINILLSCNHPAIVNVKEVVVGGKNDNDVYMVMEHLEHDLRGVMDRRKEPFSTSEVKCLMMQLLDGLKYLHTNWIIHRDLKPSNLLMNNCGELKICDFGMARQYGSPIKPYTQMVITQWYRPPELLLGAKEYSTAVDMWSVGCIMAELLSQKPLFPGKSELDQLQKIFAVLGTPNEAIWPGFSSFPNAKAKFPTQPYNMLRKKFPAISFVGGQILSERGFDLLNSLLTLDPEKRLTVEDALNHGWFHEVPLPKSKDFMPTYPPKR

SEQ ID NO: 4100 - protein, 478 aa, Arabidopsis thaliana
  peptide (1)..(478): Ceres Seq. ID no. 13488127
  misc_feature (163)..(459): Pfam Name: Pfam Description:  Protein kinase domain
  misc_feature (1)..(475): NCBI GI NO: 38344237 NR Description: OJ991113_30.14
  misc_feature (133)..(475): NCBI GI NO: 15220477 NR Description: protein kinase family [Arabidopsis thaliana]
  misc_feature (133)..(475): NCBI GI NO: 17064846 NR Description: putative protein kinase [Arabidopsis thaliana]
  misc_feature (1)..(477): NCBI GI NO: 3978441 NR Description: PITSLRE protein kinase alpha SV9 isoform
  misc_feature (1)..(477): NCBI GI NO: 507427 NR Description: PITSLRE isoform PBETA21
  misc_feature (1)..(477): NCBI GI NO: 1082285 NR Description: protein kinase (EC 2
  misc_feature (1)..(477): NCBI GI NO: 16357492 NR Description: cell division cycle 2-like 2 isoform 1
  misc_feature (1)..(477): NCBI GI NO: 3978440 NR Description: PITSLRE protein kinase alpha SV5 isoform
  misc_feature (1)..(477): NCBI GI NO: 16332362 NR Description: cell division cycle 2-like 1
  misc_feature (1)..(477): NCBI GI NO: 16332364 NR Description: cell division cycle 2-like 1
MSPEPSYLAPVQPSEALLAVKHPVDDLEEGQLEEEQVMQEDVKEGLLEEEQVMQEPNIKTSRWGTGLTSPKEELISVNVSKTNRWNRSSLTPECEEVMVSEEQQCYSSGSGSGHLSVEKLSADGNSGREYYSSDHDELEHEDQDSLTPGEMNMMFGSRSVNEFQKLNKINEGTYGIVYKARDEKTKEIVALKKIKMKEDRFEEEYGFPLTSLREINILLSCNHPAIVNVKEVVVGGKNDNDVYMVMEHLEHDLRGVMDRRKEPFSTSEVKCLMMQLLDGLKYLHTNWIIHRDLKPSNLLMNNCGELKICDFGMARQYGSPIKPYTQMVITQWYRPPELLLGAKEYSTAVDMWSVGCIMAELLSQKPLFPGKSELDQLQKIFAVLGTPNEAIWPGFSSFPNAKAKFPTQPYNMLRKKFPAISFVGGQILSERGFDLLNSLLTLDPEKRLTVEDALNHGWFHEVPLPKSKDFMPTYPPKR

SEQ ID NO: 4101 - protein, 441 aa, Arabidopsis thaliana
  peptide (1)..(441): Ceres Seq. ID no. 13488128
  misc_feature (126)..(422): Pfam Name: Pfam Description:  Protein kinase domain
  misc_feature (1)..(438): NCBI GI NO: 38344237 NR Description: OJ991113_30.14
  misc_feature (96)..(438): NCBI GI NO: 15220477 NR Description: protein kinase family [Arabidopsis thaliana]
  misc_feature (96)..(438): NCBI GI NO: 17064846 NR Description: putative protein kinase [Arabidopsis thaliana]
  misc_feature (1)..(440): NCBI GI NO: 3978441 NR Description: PITSLRE protein kinase alpha SV9 isoform
  misc_feature (1)..(440): NCBI GI NO: 507427 NR Description: PITSLRE isoform PBETA21
  misc_feature (1)..(440): NCBI GI NO: 16357492 NR Description: cell division cycle 2-like 2 isoform 1
  misc_feature (1)..(440): NCBI GI NO: 1082285 NR Description: protein kinase (EC 2
  misc_feature (1)..(440): NCBI GI NO: 3978440 NR Description: PITSLRE protein kinase alpha SV5 isoform
  misc_feature (1)..(440): NCBI GI NO: 16332358 NR Description: cell division cycle 2-like 1
  misc_feature (1)..(440): NCBI GI NO: 16332362 NR Description: cell division cycle 2-like 1
MQEDVKEGLLEEEQVMQEPNIKTSRWGTGLTSPKEELISVNVSKTNRWNRSSLTPECEEVMVSEEQQCYSSGSGSGHLSVEKLSADGNSGREYYSSDHDELEHEDQDSLTPGEMNMMFGSRSVNEFQKLNKINEGTYGIVYKARDEKTKEIVALKKIKMKEDRFEEEYGFPLTSLREINILLSCNHPAIVNVKEVVVGGKNDNDVYMVMEHLEHDLRGVMDRRKEPFSTSEVKCLMMQLLDGLKYLHTNWIIHRDLKPSNLLMNNCGELKICDFGMARQYGSPIKPYTQMVITQWYRPPELLLGAKEYSTAVDMWSVGCIMAELLSQKPLFPGKSELDQLQKIFAVLGTPNEAIWPGFSSFPNAKAKFPTQPYNMLRKKFPAISFVGGQILSERGFDLLNSLLTLDPEKRLTVEDALNHGWFHEVPLPKSKDFMPTYPPKR

SEQ ID NO: 4102 - DNA, 1418 bp, Arabidopsis thaliana
  misc_feature (1)..(1418): Ceres Seq. ID no. 12562549
cctttctacccatttcgtctccttcattttgacgttttctttagatctgttaataatccatccatggcttggtctagtcactagtggtgttatctctctgtgtggaagaaaaagcaaggttttttgatcacttggattgttttaagatatggcaactttgaacccttttgatttgttggatgatgatgctgaggatccaagccagctcgctgtttccatcgagaagattgataagtccaagaaatctggaccggtttcgagcttgcctgctaagtcagctcctaagcttccctctaagccacttcctcctgctcaagccgtgagagaggccaggagtgatgctccacgtggtggtggaggccgtggaggatttaatcgtggtcgtggtggttacaaccgtgatgatggtaacaatggatatttagggggatacactaagccctcagatgaaggagatgtttcaaagtcttcttacgagaggcgtggcggtggtgaaggggagcgtcctcgaagggcctttgagcgtcgtagtggaactggcagagggagtgacttcaagcgtgacggatctggtcgtgggaattggggaactccaggggaagagatagctgctgagactgaagcagtagctggtgttgagactgagaaggatgttggagagaagccagctgttgatgatgtagctgctgatgctaacaaggagaatactgttgttgaggagaaagagcctgaggataaggaaatgactcttgatgagtatgagaaaatacttgaggagaagaaaaaggcacttcaatcattaaccacctctgagaggaaagttgatacgaaagtgtttgaatcaatgcaacaactgtcaaacaagaagtctaatgatgaaatcttcatcaagctgggttctgataaggacaaacgcaaagatgacaaagaagagaaggctaagaaggctgtgagcatcaatgagtttctgaagccagcagagggtgggaactactaccgaggaggccgtggtggccgtggacgtggtggtcgtggccgtggaggtgtttctagtggcgaatctggtggttaccgtaatgaagctgcaccagctattggagatgctgctcagttcccatctcttgggggcaagtaagatacatccatgataacgtccatactcgtgcatcctcctttaggattttgtgcgaggatttactgtttactggtctctcgttgtcagatgtaaataattaggtgtcgtcgtcagtttttagattttatgctaaactttacacttgttggtgttctttacttttgaaacactacactcttcttagttttaccattttactcgttttgtgtttgttgttttcttattgggatatgaaacatgttttgagacggacatatctaatgttatcggggttgagtctttt

SEQ ID NO: 4103 - protein, 328 aa, Arabidopsis thaliana
  peptide (1)..(328): Ceres Seq. ID no. 12562550
  misc_feature (114)..(271): Pfam Name: Pfam Description:  Hyaluronan / mRNA binding family
  misc_feature (16)..(328): NCBI GI NO: 15235894 NR Description: nuclear antigen homolog; protein id: At4g16830
  misc_feature (29)..(328): NCBI GI NO: 21537052 NR Description: nuclear antigen homolog [Arabidopsis thaliana]
  misc_feature (94)..(328): NCBI GI NO: 7488863 NR Description: probable transcription factor - fava bean
  misc_feature (14)..(328): NCBI GI NO: 6492266 NR Description: nuclear RNA binding protein A [Spinacia oleracea]
  misc_feature (62)..(326): NCBI GI NO: 39725278 NR Description: salt tolerance protein 2 [Beta vulgaris]
  misc_feature (70)..(328): NCBI GI NO: 6492262 NR Description: nuclear RNA binding protein [Nicotiana tabacum]
  misc_feature (5)..(328): NCBI GI NO: 39725276 NR Description: salt tolerance protein 1 [Beta vulgaris]
  misc_feature (1)..(260): NCBI GI NO: 15235894 NR Description: nuclear antigen homolog; protein id: At4g16830
  misc_feature (1)..(306): NCBI GI NO: 21537052 NR Description: nuclear antigen homolog [Arabidopsis thaliana]
  misc_feature (29)..(326): NCBI GI NO: 21593013 NR Description: nuclear RNA binding protein A-like protein
MATLNPFDLLDDDAEDPSQLAVSIEKIDKSKKSGPVSSLPAKSAPKLPSKPLPPAQAVREARSDAPRGGGGRGGFNRGRGGYNRDDGNNGYLGGYTKPSDEGDVSKSSYERRGGGEGERPRRAFERRSGTGRGSDFKRDGSGRGNWGTPGEEIAAETEAVAGVETEKDVGEKPAVDDVAADANKENTVVEEKEPEDKEMTLDEYEKILEEKKKALQSLTTSERKVDTKVFESMQQLSNKKSNDEIFIKLGSDKDKRKDDKEEKAKKAVSINEFLKPAEGGNYYRGGRGGRGRGGRGRGGVSSGESGGYRNEAAPAIGDAAQFPSLGGK

SEQ ID NO: 4104 - DNA, 701 bp, Arabidopsis thaliana
  misc_feature (1)..(701): Ceres Seq. ID no. 13488129
atgccattgccacacactcactcactcgtagtttcgacgctatctctagaacattccgataaaccacaaagaagaagcagagcaaaagtaaagaagaagaagaaaacaaacatgtcgtggcagacttacgtcgacgatcacttaatgtgcgatgttgcaggcaaccgcctcaccgccgccgcaattctcggccaagacggtagcgtctgggctcagagcaacaattttcctcaggtgaagcctgaggaaattcagggcatcaaagacgattttactacacctggaacacttgccccaacaggattgttccttggtggtaacaagtacatggtaatccaaggagagcctaatgccgtcattcgaggaaagaagggagctggtggtgttaccatcaagaagaccaccttagctttggtatttggtatctatgatgaaccaatgactcctggacaatgcaatatggttgtggagaatctcggtgagtacctgattgaatcggggctctgaaacttaagctgctactatattcatattgctttatgtaatcttctagttgtgtcgtgagagaaaaactattcgataatccgactgtgtattacctaccttgtgatggatcttggggttgtatgattatttctaaaacaatatagtattgtctacatttgtgtcgagttgaaatatttaatgaatggcagtgtggt

SEQ ID NO: 4105 - protein, 168 aa, Arabidopsis thaliana
  peptide (1)..(168): Ceres Seq. ID no. 13488130
  misc_feature (39)..(163): Pfam Name: Pfam Description:  Profilin
  misc_feature (1)..(168): NCBI GI NO: 30696765 NR Description: profilin 5 [Arabidopsis thaliana]
  misc_feature (5)..(168): NCBI GI NO: 23397336 NR Description: putative profilin protein [Arabidopsis thaliana]
  misc_feature (38)..(168): NCBI GI NO: 14423852 NR Description: Profilin 5
  misc_feature (38)..(168): NCBI GI NO: 30142164 NR Description: profilin [Cucumis melo var. reticulatus]
  misc_feature (38)..(168): NCBI GI NO: 1346802 NR Description: PROFILIN 1
  misc_feature (38)..(168): NCBI GI NO: 17224229 NR Description: profilin [Lycopersicon esculentum]
  misc_feature (38)..(168): NCBI GI NO: 31077148 NR Description: profilin [Cucumis melo var. reticulatus]
  misc_feature (38)..(168): NCBI GI NO: 34922934 NR Description: Profilin (Allergen Pru p 4.02)
  misc_feature (38)..(168): NCBI GI NO: 14423875 NR Description: Profilin 3 (GD4-5) (Pollen allergen Mal d 4)
  misc_feature (38)..(168): NCBI GI NO: 15224838 NR Description: profilin 1 [Arabidopsis thaliana]
MPLPHTHSLVVSTLSLEHSDKPQRRSRAKVKKKKKTNMSWQTYVDDHLMCDVAGNRLTAAAILGQDGSVWAQSNNFPQVKPEEIQGIKDDFTTPGTLAPTGLFLGGNKYMVIQGEPNAVIRGKKGAGGVTIKKTTLALVFGIYDEPMTPGQCNMVVENLGEYLIESGL

SEQ ID NO: 4106 - protein, 131 aa, Arabidopsis thaliana
  peptide (1)..(131): Ceres Seq. ID no. 13488131
  misc_feature (2)..(126): Pfam Name: Pfam Description:  Profilin
  misc_feature (1)..(131): NCBI GI NO: 30696765 NR Description: profilin 5 [Arabidopsis thaliana]
  misc_feature (1)..(131): NCBI GI NO: 23397336 NR Description: putative profilin protein [Arabidopsis thaliana]
  misc_feature (1)..(131): NCBI GI NO: 14423852 NR Description: Profilin 5
  misc_feature (1)..(131): NCBI GI NO: 30142164 NR Description: profilin [Cucumis melo var. reticulatus]
  misc_feature (1)..(131): NCBI GI NO: 1346802 NR Description: PROFILIN 1
  misc_feature (1)..(131): NCBI GI NO: 17224229 NR Description: profilin [Lycopersicon esculentum]
  misc_feature (1)..(131): NCBI GI NO: 31077148 NR Description: profilin [Cucumis melo var. reticulatus]
  misc_feature (1)..(131): NCBI GI NO: 34922934 NR Description: Profilin (Allergen Pru p 4.02)
  misc_feature (1)..(131): NCBI GI NO: 14423875 NR Description: Profilin 3 (GD4-5) (Pollen allergen Mal d 4)
  misc_feature (1)..(131): NCBI GI NO: 15224838 NR Description: profilin 1 [Arabidopsis thaliana]
MSWQTYVDDHLMCDVAGNRLTAAAILGQDGSVWAQSNNFPQVKPEEIQGIKDDFTTPGTLAPTGLFLGGNKYMVIQGEPNAVIRGKKGAGGVTIKKTTLALVFGIYDEPMTPGQCNMVVENLGEYLIESGL

SEQ ID NO: 4107 - protein, 120 aa, Arabidopsis thaliana
  peptide (1)..(120): Ceres Seq. ID no. 13488132
  misc_feature (1)..(115): Pfam Name: Pfam Description:  Profilin
  misc_feature (1)..(120): NCBI GI NO: 30696765 NR Description: profilin 5 [Arabidopsis thaliana]
  misc_feature (1)..(120): NCBI GI NO: 23397336 NR Description: putative profilin protein [Arabidopsis thaliana]
  misc_feature (1)..(120): NCBI GI NO: 14423852 NR Description: Profilin 5
  misc_feature (1)..(120): NCBI GI NO: 30142164 NR Description: profilin [Cucumis melo var. reticulatus]
  misc_feature (1)..(120): NCBI GI NO: 1346802 NR Description: PROFILIN 1
  misc_feature (1)..(120): NCBI GI NO: 17224229 NR Description: profilin [Lycopersicon esculentum]
  misc_feature (1)..(120): NCBI GI NO: 31077148 NR Description: profilin [Cucumis melo var. reticulatus]
  misc_feature (1)..(120): NCBI GI NO: 34922934 NR Description: Profilin (Allergen Pru p 4.02)
  misc_feature (1)..(120): NCBI GI NO: 14423875 NR Description: Profilin 3 (GD4-5) (Pollen allergen Mal d 4)
  misc_feature (1)..(120): NCBI GI NO: 15224838 NR Description: profilin 1 [Arabidopsis thaliana]
MCDVAGNRLTAAAILGQDGSVWAQSNNFPQVKPEEIQGIKDDFTTPGTLAPTGLFLGGNKYMVIQGEPNAVIRGKKGAGGVTIKKTTLALVFGIYDEPMTPGQCNMVVENLGEYLIESGL

SEQ ID NO: 4108 - DNA, 2006 bp, Arabidopsis thaliana
  misc_feature (1)..(2006): Ceres Seq. ID no. 12562143
ataaaatgtaaagaccgacccgaaataatactcatgtttaaattatcagcaaagagccaagagaggaaacatcacacattggtgacaaaaattcttaggaaaaccaattaatggaggtgcacaaggtggttgctccgccgcataagagcacggtggcaaagctaaagacaaaactgaaggagactttcttcccggacgatcccttaagacagttcagaggacaaccaaaccgtaccaagctcatacgcgccgctcaatacatttttccaatcctccaatggtgtcctgagtacagcttcagcctactcaaatccgacgtcgtttcaggtcttaccatcgctagtttagctattcctcaggggattagttacgcgaagctagcaaatttgccaccaatcgttggtctatactcgagcttcgtgccaccgttggtttatgcggtcttgggaagctcaagagatctagcagtgggaccagtctccatagcgtcgttaatcttaggatccatgctaaggcaacaagtatctcccgtagacgatcctgttctctttctacagctagccttctcttctaccttctttgctggtctctttcaagcctctcttggaatcctcaggctgggatttataatagactttctatcaaaagcgacgctaatagggtttatgggtggagcagccataattgtatcactccaacagctaaagggtctgcttgggataactcatttcacaaagcatatgagtgtagtccctgttctctcctctgttttccaacacaccaacgagtggtcatggcaaacaattgtgatgggagtttgcttcttgctcttcttgctctcgacacgtcacctcagcatgaagaagccgaagctgttttgggtctcagccggagcaccacttctttccgttatcgtctctacacttcttgtctttgttttcagagccgagcgtcacggaatcagcgtcatcgggaaattaccagaaggtttgaatccaccgtcttggaacatgcttcagtttcacggtagtcatctcgcactcgtcgccaaaaccggactcgtcaccggaatcgtctccctcacggaaggaatcgcagtgggaagaacatttgcagcgctaaagaactaccacgtagatggaaacaaagagatgatcgccattggtctgatgaacgtagtaggctctgccacatcttgctacgtcacaaccggagcattctctagatcagcggtcaacaacaacgcgggagctaaaaccgcagtttcaaacattgttatgtcggtcactgttatggttacgcttctcttcctaatgccgcttttcgaatacactcccaatgtggtcctcggtgccatcattgtgaccgcggtcattggtctcatcgaccttcccgcggcctgtcacatatggaagatcgataaatttgatttcttggtgatgctttgcgcgttctttggtgtcattttcctatccgttcaaaacggtctagccattgcggtggggctatcgttgttcaagatattgatgcaagtaacaaggccgaaaatggttataatgggtaatattcctggaacggatatataccgagatcttcatcattacaaagaagcacaaaggatcccgggatttcttgttttaagcatcgaatctcctgtcaatttcgccaattctaactacctcactgaaagaacatctcgttggattgaagaatgcgaagaagaggaagctcaagagaagcattctagcctacagttcttgattcttgaaatgtcagccgtgagcggtgtagacacaaacggagtgtccttttttaaggaacttaagaaaacaaccgccaagaaggacatcgagcttgtgtttgtgaaccctctaagcgaagtggtggagaagcttcaaagagctgacgaacaaaaagagttcatgaggcccgagtttctcttcttaaccgtcgctgaggccgttgcgtcgctctctcttaaagggccatctctcagtaacgtttaa

SEQ ID NO: 4109 - protein, 631 aa, Arabidopsis thaliana
  peptide (1)..(631): Ceres Seq. ID no. 12562144
  misc_feature (165)..(475): Pfam Name: Pfam Description:  Sulfate transporter family
  misc_feature (1)..(622): NCBI GI NO: 1907270 NR Description: sulphate transporter protein
  misc_feature (1)..(622): NCBI GI NO: 15233255 NR Description: putative sulfate transporter
  misc_feature (4)..(622): NCBI GI NO: 11279065 NR Description: sulfate transporter ATST1
  misc_feature (4)..(622): NCBI GI NO: 11279064 NR Description: hypothetical protein
  misc_feature (4)..(622): NCBI GI NO: 15231069 NR Description: sulfate transporter ATST1; protein id: At3g51895
  misc_feature (9)..(619): NCBI GI NO: 34902632 NR Description: Putative sulfate transporter ATST1
  misc_feature (4)..(622): NCBI GI NO: 11279066 NR Description: sulfate transporter AST12
  misc_feature (1)..(626): NCBI GI NO: 13487717 NR Description: sulfate transporter 2 [Lycopersicon esculentum]
  misc_feature (1)..(624): NCBI GI NO: 24421087 NR Description: sulphate transporter [Triticum aestivum]
  misc_feature (52)..(618): NCBI GI NO: 18411773 NR Description: sulfate transporter, putative
MEVHKVVAPPHKSTVAKLKTKLKETFFPDDPLRQFRGQPNRTKLIRAAQYIFPILQWCPEYSFSLLKSDVVSGLTIASLAIPQGISYAKLANLPPIVGLYSSFVPPLVYAVLGSSRDLAVGPVSIASLILGSMLRQQVSPVDDPVLFLQLAFSSTFFAGLFQASLGILRLGFIIDFLSKATLIGFMGGAAIIVSLQQLKGLLGITHFTKHMSVVPVLSSVFQHTNEWSWQTIVMGVCFLLFLLSTRHLSMKKPKLFWVSAGAPLLSVIVSTLLVFVFRAERHGISVIGKLPEGLNPPSWNMLQFHGSHLALVAKTGLVTGIVSLTEGIAVGRTFAALKNYHVDGNKEMIAIGLMNVVGSATSCYVTTGAFSRSAVNNNAGAKTAVSNIVMSVTVMVTLLFLMPLFEYTPNVVLGAIIVTAVIGLIDLPAACHIWKIDKFDFLVMLCAFFGVIFLSVQNGLAIAVGLSLFKILMQVTRPKMVIMGNIPGTDIYRDLHHYKEAQRIPGFLVLSIESPVNFANSNYLTERTSRWIEECEEEEAQEKHSSLQFLILEMSAVSGVDTNGVSFFKELKKTTAKKDIELVFVNPLSEVVEKLQRADEQKEFMRPEFLFLTVAEAVASLSLKGPSLSNV

SEQ ID NO: 4110 - protein, 499 aa, Arabidopsis thaliana
  peptide (1)..(499): Ceres Seq. ID no. 12562145
  misc_feature (33)..(343): Pfam Name: Pfam Description:  Sulfate transporter family
  misc_feature (1)..(490): NCBI GI NO: 1907270 NR Description: sulphate transporter protein
  misc_feature (1)..(490): NCBI GI NO: 15233255 NR Description: putative sulfate transporter
  misc_feature (1)..(490): NCBI GI NO: 11279065 NR Description: sulfate transporter ATST1
  misc_feature (1)..(490): NCBI GI NO: 11279064 NR Description: hypothetical protein
  misc_feature (1)..(490): NCBI GI NO: 15231069 NR Description: sulfate transporter ATST1; protein id: At3g51895
  misc_feature (1)..(487): NCBI GI NO: 34902632 NR Description: Putative sulfate transporter ATST1
  misc_feature (1)..(490): NCBI GI NO: 11279066 NR Description: sulfate transporter AST12
  misc_feature (1)..(494): NCBI GI NO: 13487717 NR Description: sulfate transporter 2 [Lycopersicon esculentum]
  misc_feature (1)..(492): NCBI GI NO: 24421087 NR Description: sulphate transporter [Triticum aestivum]
  misc_feature (1)..(486): NCBI GI NO: 18411773 NR Description: sulfate transporter, putative
MLRQQVSPVDDPVLFLQLAFSSTFFAGLFQASLGILRLGFIIDFLSKATLIGFMGGAAIIVSLQQLKGLLGITHFTKHMSVVPVLSSVFQHTNEWSWQTIVMGVCFLLFLLSTRHLSMKKPKLFWVSAGAPLLSVIVSTLLVFVFRAERHGISVIGKLPEGLNPPSWNMLQFHGSHLALVAKTGLVTGIVSLTEGIAVGRTFAALKNYHVDGNKEMIAIGLMNVVGSATSCYVTTGAFSRSAVNNNAGAKTAVSNIVMSVTVMVTLLFLMPLFEYTPNVVLGAIIVTAVIGLIDLPAACHIWKIDKFDFLVMLCAFFGVIFLSVQNGLAIAVGLSLFKILMQVTRPKMVIMGNIPGTDIYRDLHHYKEAQRIPGFLVLSIESPVNFANSNYLTERTSRWIEECEEEEAQEKHSSLQFLILEMSAVSGVDTNGVSFFKELKKTTAKKDIELVFVNPLSEVVEKLQRADEQKEFMRPEFLFLTVAEAVASLSLKGPSLSNV

SEQ ID NO: 4111 - protein, 446 aa, Arabidopsis thaliana
  peptide (1)..(446): Ceres Seq. ID no. 12562146
  misc_feature (1)..(290): Pfam Name: Pfam Description:  Sulfate transporter family
  misc_feature (1)..(437): NCBI GI NO: 1907270 NR Description: sulphate transporter protein
  misc_feature (1)..(437): NCBI GI NO: 15233255 NR Description: putative sulfate transporter
  misc_feature (1)..(437): NCBI GI NO: 11279065 NR Description: sulfate transporter ATST1
  misc_feature (1)..(437): NCBI GI NO: 11279064 NR Description: hypothetical protein
  misc_feature (1)..(437): NCBI GI NO: 15231069 NR Description: sulfate transporter ATST1; protein id: At3g51895
  misc_feature (1)..(434): NCBI GI NO: 34902632 NR Description: Putative sulfate transporter ATST1
  misc_feature (1)..(437): NCBI GI NO: 11279066 NR Description: sulfate transporter AST12
  misc_feature (1)..(441): NCBI GI NO: 13487717 NR Description: sulfate transporter 2 [Lycopersicon esculentum]
  misc_feature (1)..(439): NCBI GI NO: 24421087 NR Description: sulphate transporter [Triticum aestivum]
  misc_feature (1)..(433): NCBI GI NO: 18411773 NR Description: sulfate transporter, putative
MGGAAIIVSLQQLKGLLGITHFTKHMSVVPVLSSVFQHTNEWSWQTIVMGVCFLLFLLSTRHLSMKKPKLFWVSAGAPLLSVIVSTLLVFVFRAERHGISVIGKLPEGLNPPSWNMLQFHGSHLALVAKTGLVTGIVSLTEGIAVGRTFAALKNYHVDGNKEMIAIGLMNVVGSATSCYVTTGAFSRSAVNNNAGAKTAVSNIVMSVTVMVTLLFLMPLFEYTPNVVLGAIIVTAVIGLIDLPAACHIWKIDKFDFLVMLCAFFGVIFLSVQNGLAIAVGLSLFKILMQVTRPKMVIMGNIPGTDIYRDLHHYKEAQRIPGFLVLSIESPVNFANSNYLTERTSRWIEECEEEEAQEKHSSLQFLILEMSAVSGVDTNGVSFFKELKKTTAKKDIELVFVNPLSEVVEKLQRADEQKEFMRPEFLFLTVAEAVASLSLKGPSLSNV

SEQ ID NO: 4112 - DNA, 1795 bp, Arabidopsis thaliana
  misc_feature (1)..(1795): Ceres Seq. ID no. 12579714
aacatcctaatcgaaaaaacaatctatcttttgggtccctaaaaaagctccttcgtttatcttgttttctaagttatctttttgtatgagtttcaaagcttatcattatctcactcttcttccatagctatgactactttaacgaagattcaagtgtacccacaagtcttggagcaccgtctcttcttcagagatccgatacgggtcgggtcaagattgacttgtagagaacgtagtaatagggtttatgtgcatcggtgtgagaaaaaagttgaaagaaagagaaaagttgagaaatttaagggaaatgggtcgtgggattctttgaaatctgggtttttagggtttagtaaattagggttcttgtctaaagatgagtataatcagaaagttgaaaacttggagatggttttctcttcggttgctgttcaaattgcgagatacattgtgacgatgacaagtactggagctattcttttgattgggtttcaattatcaggtggagatagttcgatgaactcattggtttggtatagttggcttggtggaattatcattggaaccatgactggtgctaacatggttttggaagatcattatcgagccggtccacggaatgttgttataaccggaagcactaggggactagggaaagctcttgctagagagtttcttctctctggagacagagtcattgtcacatctcgcagttctgaatctgttgatatgactgtcaaagagctagagcaaaatctcaaagagattatgagtaacgctagcgagtcagctagaaagaaactgagtgatgctaaggtagttggtattgcctgtgatgtttgcaaacccgaagacgttgagaagctgtcgaatttcgctgtaaaagagcttggttccatcaacatatggataaacaatgctggtactaacaaaggttttagaccgctactcgagttcacggaagaagatatcacacagattgtctccacaaatttgattggatcaattctatgtacacgaggggctatggatgtgatgagcagacagcacagtggtggacacatctttaacatggatggtgctggctctggaggttcaagtactcctctcactgccgtatatggttcaacaaaatgtggacttaggcagtttcatgggtctatagtgaaagaaagccaaaaaacaaacgttggccttcacactgcatcccctggcatggttctgacagaacttcttctcagtggttcgagcattaaaaacaagcagatgtttaacataatctgtgagcttcctgagacagtagctagaactttggtaccacgaatgcgagttgtgaaaggttcgggaaaagccgtcaattacctaactcctcctcggatattgttagctattgtcacttcctggctaaggagaggccgatggtttgatgaccaaggacgggcgttatatgcagcagaagcagatagactaaggaactgggcagagaacaggacgaggttgtcgttaacagacgcgatggagatgtatacagagaatacttgggtctctgttttctctctttctgttgtttgcgctttcatcatcttacaaagcacaacacctagctcttttccaggcacataacaaacatcttcctcggatgtgttttaagaaaattgtaaacgtacatgttatgtataaaaaacatatatataacagaaccgatttgttcatgtaaacacttcttatagttgtagaatgtgtcgttgttgaaaacaatgaaaaaatagattgtaataaacttttatcagattgtagt

SEQ ID NO: 4113 - protein, 496 aa, Arabidopsis thaliana
  peptide (1)..(496): Ceres Seq. ID no. 12579715
  misc_feature (1)..(496): NCBI GI NO: 18413962 NR Description: putative protein; protein id: At4g13250
  misc_feature (70)..(496): NCBI GI NO: 7485669 NR Description: hypothetical protein F17N18
  misc_feature (165)..(488): NCBI GI NO: 34904226 NR Description: P0443E07.30
  misc_feature (83)..(169): NCBI GI NO: 34904226 NR Description: P0443E07.30
  misc_feature (161)..(405): NCBI GI NO: 10178029 NR Description: gene_id:MUG13
  misc_feature (161)..(405): NCBI GI NO: 18414726 NR Description: putative protein; protein id: At5g04900
  misc_feature (140)..(401): NCBI GI NO: 29244639 NR Description: putative oxidoreductase protein
  misc_feature (164)..(436): NCBI GI NO: 21673969 NR Description: oxidoreductase
  misc_feature (228)..(391): NCBI GI NO: 15672756 NR Description: 3-oxoacyl-acyl carrier protein reductase (EC 1
  misc_feature (162)..(227): NCBI GI NO: 15672756 NR Description: 3-oxoacyl-acyl carrier protein reductase (EC 1
MTTLTKIQVYPQVLEHRLFFRDPIRVGSRLTCRERSNRVYVHRCEKKVERKRKVEKFKGNGSWDSLKSGFLGFSKLGFLSKDEYNQKVENLEMVFSSVAVQIARYIVTMTSTGAILLIGFQLSGGDSSMNSLVWYSWLGGIIIGTMTGANMVLEDHYRAGPRNVVITGSTRGLGKALAREFLLSGDRVIVTSRSSESVDMTVKELEQNLKEIMSNASESARKKLSDAKVVGIACDVCKPEDVEKLSNFAVKELGSINIWINNAGTNKGFRPLLEFTEEDITQIVSTNLIGSILCTRGAMDVMSRQHSGGHIFNMDGAGSGGSSTPLTAVYGSTKCGLRQFHGSIVKESQKTNVGLHTASPGMVLTELLLSGSSIKNKQMFNIICELPETVARTLVPRMRVVKGSGKAVNYLTPPRILLAIVTSWLRRGRWFDDQGRALYAAEADRLRNWAENRTRLSLTDAMEMYTENTWVSVFSLSVVCAFIILQSTTPSSFPGT

SEQ ID NO: 4114 - protein, 404 aa, Arabidopsis thaliana
  peptide (1)..(404): Ceres Seq. ID no. 12579716
  misc_feature (1)..(404): NCBI GI NO: 18413962 NR Description: putative protein; protein id: At4g13250
  misc_feature (1)..(404): NCBI GI NO: 7485669 NR Description: hypothetical protein F17N18
  misc_feature (73)..(396): NCBI GI NO: 34904226 NR Description: P0443E07.30
  misc_feature (1)..(77): NCBI GI NO: 34904226 NR Description: P0443E07.30
  misc_feature (69)..(313): NCBI GI NO: 10178029 NR Description: gene_id:MUG13
  misc_feature (69)..(313): NCBI GI NO: 18414726 NR Description: putative protein; protein id: At5g04900
  misc_feature (48)..(309): NCBI GI NO: 29244639 NR Description: putative oxidoreductase protein
  misc_feature (72)..(344): NCBI GI NO: 21673969 NR Description: oxidoreductase
  misc_feature (136)..(299): NCBI GI NO: 15672756 NR Description: 3-oxoacyl-acyl carrier protein reductase (EC 1
  misc_feature (70)..(135): NCBI GI NO: 15672756 NR Description: 3-oxoacyl-acyl carrier protein reductase (EC 1
MVFSSVAVQIARYIVTMTSTGAILLIGFQLSGGDSSMNSLVWYSWLGGIIIGTMTGANMVLEDHYRAGPRNVVITGSTRGLGKALAREFLLSGDRVIVTSRSSESVDMTVKELEQNLKEIMSNASESARKKLSDAKVVGIACDVCKPEDVEKLSNFAVKELGSINIWINNAGTNKGFRPLLEFTEEDITQIVSTNLIGSILCTRGAMDVMSRQHSGGHIFNMDGAGSGGSSTPLTAVYGSTKCGLRQFHGSIVKESQKTNVGLHTASPGMVLTELLLSGSSIKNKQMFNIICELPETVARTLVPRMRVVKGSGKAVNYLTPPRILLAIVTSWLRRGRWFDDQGRALYAAEADRLRNWAENRTRLSLTDAMEMYTENTWVSVFSLSVVCAFIILQSTTPSSFPGT

SEQ ID NO: 4115 - protein, 388 aa, Arabidopsis thaliana
  peptide (1)..(388): Ceres Seq. ID no. 12579717
  misc_feature (1)..(388): NCBI GI NO: 18413962 NR Description: putative protein; protein id: At4g13250
  misc_feature (1)..(388): NCBI GI NO: 7485669 NR Description: hypothetical protein F17N18
  misc_feature (57)..(380): NCBI GI NO: 34904226 NR Description: P0443E07.30
  misc_feature (1)..(61): NCBI GI NO: 34904226 NR Description: P0443E07.30
  misc_feature (53)..(297): NCBI GI NO: 10178029 NR Description: gene_id:MUG13
  misc_feature (53)..(297): NCBI GI NO: 18414726 NR Description: putative protein; protein id: At5g04900
  misc_feature (32)..(293): NCBI GI NO: 29244639 NR Description: putative oxidoreductase protein
  misc_feature (56)..(328): NCBI GI NO: 21673969 NR Description: oxidoreductase
  misc_feature (120)..(283): NCBI GI NO: 15672756 NR Description: 3-oxoacyl-acyl carrier protein reductase (EC 1
  misc_feature (54)..(119): NCBI GI NO: 15672756 NR Description: 3-oxoacyl-acyl carrier protein reductase (EC 1
MTSTGAILLIGFQLSGGDSSMNSLVWYSWLGGIIIGTMTGANMVLEDHYRAGPRNVVITGSTRGLGKALAREFLLSGDRVIVTSRSSESVDMTVKELEQNLKEIMSNASESARKKLSDAKVVGIACDVCKPEDVEKLSNFAVKELGSINIWINNAGTNKGFRPLLEFTEEDITQIVSTNLIGSILCTRGAMDVMSRQHSGGHIFNMDGAGSGGSSTPLTAVYGSTKCGLRQFHGSIVKESQKTNVGLHTASPGMVLTELLLSGSSIKNKQMFNIICELPETVARTLVPRMRVVKGSGKAVNYLTPPRILLAIVTSWLRRGRWFDDQGRALYAAEADRLRNWAENRTRLSLTDAMEMYTENTWVSVFSLSVVCAFIILQSTTPSSFPGT

SEQ ID NO: 4116 - DNA, 1399 bp, Arabidopsis thaliana
  misc_feature (1)..(1399): Ceres Seq. ID no. 12423140
agataaactgatattattgtctttcttccgctcctttgtctctctatctctttctcacaattagattctgtgcttcttctgcgatcaactaagatccgatccgcgagcgtttcagacttcgatcagatccgattaagagaagcaaatcgggtcgggtatgactcgtcgatgttctcactgcaatcacaatggccacaactctcggacttgtcccaatcgcggcgtgaagctctttggtgttcggctcaccgaaggttcgatccggaaaagtgcaagtatgggtaatcttagccattacacgggttctggatcgggtgggcatggaaccgggtccaacactccgggttctccgggtgatgtccctgaccatgtcgctggtgatggttacgcttctgaggatttcgttgctggctcttcctctagccgcgagagaaagaaaggaactccatggacagaggaagaacacaggatgttcttattaggtttacagaagctgggtaaaggtgattggagaggtatctcaagaaactatgtgaccactaggacacctacacaagttgctagccatgctcagaagtatttcatcagacaatccaatgtctctcgtcgcaaaagacgttctagtctctttgatatggttcctgatgaggttggagatattcccatggatttgcaagaaccagaggaagataatattcctgtggaaactgaaatgcaaggtgctgactctattcatcagacacttgctcctagctcacttcacgcaccgtcaatcttggaaatcgaagaatgtgaatcaatggactccacaaactctaccaccggggaaccaaccgcaactgccgctgctgcttcttcttcttccagactagaagaaaccacacaactgcaatcacaactgcaaccgcagccgcaactacctggctcattccccatactatatccgacctacttttcaccatattacccgtttccattcccaatatggcctgctggttatgttcctgaaccacccaagaaagaggaaactcatgaaattctcagaccaactgctgtgcactcgaaagctcctatcaatgttgacgagcttcttggtatgtctaagctcagccttgcagagtccaacaaacatggagaatccgatcagtctctttcattgaagctaggtggcgggtcatcttcaagacaatcagcatttcacccgaatcctagctctgatagttcagacatcaaaagcgtgatacacgctttataaaagacctgaggaagtgatggtctaaaatgggatctggtttggggtttacaggttagttgttggtcacagtaacttaaataagtttttctttgttaggttgtttaacttgggtaggatgttttagttcagctttgatcattaggg

SEQ ID NO: 4117 - protein, 365 aa, Arabidopsis thaliana
  peptide (1)..(365): Ceres Seq. ID no. 12423141
  misc_feature (95)..(142): Pfam Name: Pfam Description:  Myb-like DNA-binding domain
  misc_feature (1)..(365): NCBI GI NO: 15238083 NR Description: Myb-related transcription activator-like
  misc_feature (1)..(230): NCBI GI NO: 24850307 NR Description: transcription factor MYBS3
  misc_feature (201)..(351): NCBI GI NO: 24850307 NR Description: transcription factor MYBS3
  misc_feature (1)..(230): NCBI GI NO: 37536856 NR Description: putative Myb-related protein
  misc_feature (201)..(351): NCBI GI NO: 37536856 NR Description: putative Myb-related protein
  misc_feature (1)..(200): NCBI GI NO: 28848628 NR Description: ZmMybst1 [Zea mays]
  misc_feature (233)..(353): NCBI GI NO: 28848628 NR Description: ZmMybst1 [Zea mays]
  misc_feature (1)..(265): NCBI GI NO: 7705206 NR Description: MybSt1 [Solanum tuberosum]
  misc_feature (1)..(265): NCBI GI NO: 1076660 NR Description: D13F(MYBST1) protein - potato
  misc_feature (1)..(205): NCBI GI NO: 34906364 NR Description: unnamed protein product
MTRRCSHCNHNGHNSRTCPNRGVKLFGVRLTEGSIRKSASMGNLSHYTGSGSGGHGTGSNTPGSPGDVPDHVAGDGYASEDFVAGSSSSRERKKGTPWTEEEHRMFLLGLQKLGKGDWRGISRNYVTTRTPTQVASHAQKYFIRQSNVSRRKRRSSLFDMVPDEVGDIPMDLQEPEEDNIPVETEMQGADSIHQTLAPSSLHAPSILEIEECESMDSTNSTTGEPTATAAAASSSSRLEETTQLQSQLQPQPQLPGSFPILYPTYFSPYYPFPFPIWPAGYVPEPPKKEETHEILRPTAVHSKAPINVDELLGMSKLSLAESNKHGESDQSLSLKLGGGSSSRQSAFHPNPSSDSSDIKSVIHAL

SEQ ID NO: 4118 - protein, 325 aa, Arabidopsis thaliana
  peptide (1)..(325): Ceres Seq. ID no. 12423142
  misc_feature (55)..(102): Pfam Name: Pfam Description:  Myb-like DNA-binding domain
  misc_feature (1)..(325): NCBI GI NO: 15238083 NR Description: Myb-related transcription activator-like
  misc_feature (1)..(190): NCBI GI NO: 24850307 NR Description: transcription factor MYBS3
  misc_feature (161)..(311): NCBI GI NO: 24850307 NR Description: transcription factor MYBS3
  misc_feature (1)..(190): NCBI GI NO: 37536856 NR Description: putative Myb-related protein
  misc_feature (161)..(311): NCBI GI NO: 37536856 NR Description: putative Myb-related protein
  misc_feature (1)..(160): NCBI GI NO: 28848628 NR Description: ZmMybst1 [Zea mays]
  misc_feature (193)..(313): NCBI GI NO: 28848628 NR Description: ZmMybst1 [Zea mays]
  misc_feature (1)..(225): NCBI GI NO: 7705206 NR Description: MybSt1 [Solanum tuberosum]
  misc_feature (1)..(225): NCBI GI NO: 1076660 NR Description: D13F(MYBST1) protein - potato
  misc_feature (1)..(165): NCBI GI NO: 34906364 NR Description: unnamed protein product
MGNLSHYTGSGSGGHGTGSNTPGSPGDVPDHVAGDGYASEDFVAGSSSSRERKKGTPWTEEEHRMFLLGLQKLGKGDWRGISRNYVTTRTPTQVASHAQKYFIRQSNVSRRKRRSSLFDMVPDEVGDIPMDLQEPEEDNIPVETEMQGADSIHQTLAPSSLHAPSILEIEECESMDSTNSTTGEPTATAAAASSSSRLEETTQLQSQLQPQPQLPGSFPILYPTYFSPYYPFPFPIWPAGYVPEPPKKEETHEILRPTAVHSKAPINVDELLGMSKLSLAESNKHGESDQSLSLKLGGGSSSRQSAFHPNPSSDSSDIKSVIHAL

SEQ ID NO: 4119 - protein, 261 aa, Arabidopsis thaliana
  peptide (1)..(261): Ceres Seq. ID no. 12423143
  misc_feature (1)..(38): Pfam Name: Pfam Description:  Myb-like DNA-binding domain
  misc_feature (1)..(261): NCBI GI NO: 15238083 NR Description: Myb-related transcription activator-like
  misc_feature (1)..(126): NCBI GI NO: 24850307 NR Description: transcription factor MYBS3
  misc_feature (97)..(247): NCBI GI NO: 24850307 NR Description: transcription factor MYBS3
  misc_feature (1)..(126): NCBI GI NO: 37536856 NR Description: putative Myb-related protein
  misc_feature (97)..(247): NCBI GI NO: 37536856 NR Description: putative Myb-related protein
  misc_feature (1)..(96): NCBI GI NO: 28848628 NR Description: ZmMybst1 [Zea mays]
  misc_feature (129)..(249): NCBI GI NO: 28848628 NR Description: ZmMybst1 [Zea mays]
  misc_feature (1)..(161): NCBI GI NO: 7705206 NR Description: MybSt1 [Solanum tuberosum]
  misc_feature (1)..(161): NCBI GI NO: 1076660 NR Description: D13F(MYBST1) protein - potato
  misc_feature (1)..(101): NCBI GI NO: 34906364 NR Description: unnamed protein product
MFLLGLQKLGKGDWRGISRNYVTTRTPTQVASHAQKYFIRQSNVSRRKRRSSLFDMVPDEVGDIPMDLQEPEEDNIPVETEMQGADSIHQTLAPSSLHAPSILEIEECESMDSTNSTTGEPTATAAAASSSSRLEETTQLQSQLQPQPQLPGSFPILYPTYFSPYYPFPFPIWPAGYVPEPPKKEETHEILRPTAVHSKAPINVDELLGMSKLSLAESNKHGESDQSLSLKLGGGSSSRQSAFHPNPSSDSSDIKSVIHAL

SEQ ID NO: 4120 - DNA, 2727 bp, Arabidopsis thaliana
  misc_feature (1)..(2727): Ceres Seq. ID no. 13574992
atagtactaggaatattttcgcagaagaaatatccaaagttgatgatttatctgagtaaactaacaattataaaagttattaatcaaaaatgaaaaaaagaagtaaagaatgatattttcctttataattatgagagcaccaatgtcatgtcggtaaaactccccccactcacttcactcgctccactccttcaatggcttcctccaccatcgttcttcttctcttcctctcttttccgtttatctctttcgcagcttctcaggccgcgaagactttcattttccgtatcgatggtggatctatgccttctattttcccgacgcactaccattggtatagcaccgagttcgccgaagaatctcgaatcgtccatgtttaccacacagtcttccatggtttctccgccgttgttactccagatgaagcagataatctccgtaaccacccagcagttcttgctgttttcgaagaccgacgtcgagagcttcacaccacacgttctcctcaatttcttggtttacaaaaccaaaaaggactatggtcagaatctgattacggatcagacgtaatcattggcgtttttgacaccggaatttggccggagcggaggagtttctcagatcttaacctcggtccaattccaaaaaggtggagaggcgtttgcgaatccggagccagattcagtcctcggaactgtaaccgtaaaattatcggagcaagattcttcgctaagggacaacaagccgctgtaatcggaggaatcaacaaaaccgttgagtttctatctcctcgtgacgccgatggacacggtactcacacttcctcaaccgccgctggccgtcacgcttttaaagcgagtatgtccggttacgcctccggtgtagccaaaggtgttgctccaaaagctcgtatcgccgcctacaaagtctgttggaaagattccggttgtctcgattccgatattctcgccgcctttgatgccgctgttagagacggtgtcgacgttatatcgatctcaatcggtggtggagacgggattacttcgccgtattacctcgatccaatcgctataggctcgtacggcgccgcgtcgaaaggaatcttcgtctcttcctctgccggaaacgaaggacctaacggtatgtcagttacgaacctcgcgccgtgggtaaccaccgttggtgctagtacaatcgatcggaatttcccagcggatgctattctcggcgacggacatcgtctcagaggagtgtctctttacgctggagtacctttaaacggtcgtatgtttccggtggtttatcccggtaaatcgggaatgtcatcagcgtctctatgtatggagaacacgcttgatccgaagcaagtgaggggtaaaatagtaatctgcgatagaggaagcagtccacgcgtagccaaaggattggttgtgaagaaagcaggtggtgtcggaatgattctcgctaatggagcatctaacggtgaaggattagtcggagatgctcatcttattccagcctgtgccgttggatcaaacgaaggagatagaatcaaagcatatgcttcttcacatccgaatccaattgcttcaattgatttcagaggaactatagttgggattaaaccggctccggttattgcttctttctccggtagaggaccaaacggtttaagcccggagattcttaaaccggatttgattgctcccggagttaacatcctcgccgcatggacagacgctgttggacctacaggtttgccgtcagatccaaggaaaacggaattcaacattctctccggtacttcaatggcatgtcctcacgttagtggtgcggcggcgcttctcaaatccgctcatccagattggagccctgccgtgatacgatcggcaatgatgacaacgactaacctcgtcgataactctaaccgctcgttgatcgatgaatccaccgggaaatcggctacgccttatgattacgggtcgggtcatttaaatttgggccgggctatgaatccgggtcttgtctacgatataactaatgatgattacattacgtttctttgctccatcgggtacggaccaaagacgatccaagtgataacaagaacaccggtgagatgtccgacgaccaggaaaccgtctcccgggaatttgaattatccttcgatcacggcggtgtttcctactaatagaagaggattggtgagtaaaactgttataaggacggcgacgaatgtcgggcaggctgaggcggtttatcgggcgaggatagagtcgccgagaggagtgacggtgacagtgaaaccacctaggcttgtgtttacttcggccgttaagagacggagctatgcggttacagtgacggttaatacaaggaatgttgtgttgggagaaacaggtgctgtgtttgggtcagtcacgtggtttgatggtgggaaacacgtggttcggagccccatcgtggtgacccaaatggatacgttgtgattccgggtcgggtttgggatgatcatgcggtcatgactcatgatcgtaaaccctttatgtggtgtagcaataactgtagaattttgagttagttggcttttatttataatcttaattatgttctgtgtttttcttattcctaatgagattttatcctatcttttatctatagttaagcaaaatgagaggaaacaatgtttaatacttgtattcattataaaaaagaaattatgaaggc

SEQ ID NO: 4121 - protein, 764 aa, Arabidopsis thaliana
  peptide (1)..(764): Ceres Seq. ID no. 13574993
  misc_feature (359)..(457): Pfam Name: Pfam Description:  PA domain
  misc_feature (4)..(764): NCBI GI NO: 13430434 NR Description: putative subtilisin serine protease
  misc_feature (9)..(764): NCBI GI NO: 18400323 NR Description: subtilisin-like serine protease
  misc_feature (9)..(764): NCBI GI NO: 21536632 NR Description: subtilisin-like serine protease
  misc_feature (1)..(759): NCBI GI NO: 18425181 NR Description: subtilisin-like serine protease ARA12
  misc_feature (1)..(759): NCBI GI NO: 20147211 NR Description: AT5g67360/K8K14_8 [Arabidopsis thaliana]
  misc_feature (1)..(756): NCBI GI NO: 18396193 NR Description: subtilisin-like serine protease, putative
  misc_feature (8)..(759): NCBI GI NO: 1076414 NR Description: subtilisin-like proteinase (EC 3
  misc_feature (26)..(764): NCBI GI NO: 18423316 NR Description: subtilisin-like serine protease
  misc_feature (26)..(759): NCBI GI NO: 14488360 NR Description: putative serine protease
  misc_feature (1)..(759): NCBI GI NO: 30678198 NR Description: subtilisin-like serine protease, putative
MASSTIVLLLFLSFPFISFAASQAAKTFIFRIDGGSMPSIFPTHYHWYSTEFAEESRIVHVYHTVFHGFSAVVTPDEADNLRNHPAVLAVFEDRRRELHTTRSPQFLGLQNQKGLWSESDYGSDVIIGVFDTGIWPERRSFSDLNLGPIPKRWRGVCESGARFSPRNCNRKIIGARFFAKGQQAAVIGGINKTVEFLSPRDADGHGTHTSSTAAGRHAFKASMSGYASGVAKGVAPKARIAAYKVCWKDSGCLDSDILAAFDAAVRDGVDVISISIGGGDGITSPYYLDPIAIGSYGAASKGIFVSSSAGNEGPNGMSVTNLAPWVTTVGASTIDRNFPADAILGDGHRLRGVSLYAGVPLNGRMFPVVYPGKSGMSSASLCMENTLDPKQVRGKIVICDRGSSPRVAKGLVVKKAGGVGMILANGASNGEGLVGDAHLIPACAVGSNEGDRIKAYASSHPNPIASIDFRGTIVGIKPAPVIASFSGRGPNGLSPEILKPDLIAPGVNILAAWTDAVGPTGLPSDPRKTEFNILSGTSMACPHVSGAAALLKSAHPDWSPAVIRSAMMTTTNLVDNSNRSLIDESTGKSATPYDYGSGHLNLGRAMNPGLVYDITNDDYITFLCSIGYGPKTIQVITRTPVRCPTTRKPSPGNLNYPSITAVFPTNRRGLVSKTVIRTATNVGQAEAVYRARIESPRGVTVTVKPPRLVFTSAVKRRSYAVTVTVNTRNVVLGETGAVFGSVTWFDGGKHVVRSPIVVTQMDTL

SEQ ID NO: 4122 - protein, 728 aa, Arabidopsis thaliana
  peptide (1)..(728): Ceres Seq. ID no. 13574994
  misc_feature (323)..(421): Pfam Name: Pfam Description:  PA domain
  misc_feature (1)..(728): NCBI GI NO: 13430434 NR Description: putative subtilisin serine protease
  misc_feature (1)..(728): NCBI GI NO: 18400323 NR Description: subtilisin-like serine protease
  misc_feature (1)..(728): NCBI GI NO: 21536632 NR Description: subtilisin-like serine protease
  misc_feature (1)..(723): NCBI GI NO: 18425181 NR Description: subtilisin-like serine protease ARA12
  misc_feature (1)..(723): NCBI GI NO: 20147211 NR Description: AT5g67360/K8K14_8 [Arabidopsis thaliana]
  misc_feature (1)..(720): NCBI GI NO: 18396193 NR Description: subtilisin-like serine protease, putative
  misc_feature (1)..(723): NCBI GI NO: 1076414 NR Description: subtilisin-like proteinase (EC 3
  misc_feature (1)..(728): NCBI GI NO: 18423316 NR Description: subtilisin-like serine protease
  misc_feature (1)..(723): NCBI GI NO: 14488360 NR Description: putative serine protease
  misc_feature (1)..(723): NCBI GI NO: 30678198 NR Description: subtilisin-like serine protease, putative
MPSIFPTHYHWYSTEFAEESRIVHVYHTVFHGFSAVVTPDEADNLRNHPAVLAVFEDRRRELHTTRSPQFLGLQNQKGLWSESDYGSDVIIGVFDTGIWPERRSFSDLNLGPIPKRWRGVCESGARFSPRNCNRKIIGARFFAKGQQAAVIGGINKTVEFLSPRDADGHGTHTSSTAAGRHAFKASMSGYASGVAKGVAPKARIAAYKVCWKDSGCLDSDILAAFDAAVRDGVDVISISIGGGDGITSPYYLDPIAIGSYGAASKGIFVSSSAGNEGPNGMSVTNLAPWVTTVGASTIDRNFPADAILGDGHRLRGVSLYAGVPLNGRMFPVVYPGKSGMSSASLCMENTLDPKQVRGKIVICDRGSSPRVAKGLVVKKAGGVGMILANGASNGEGLVGDAHLIPACAVGSNEGDRIKAYASSHPNPIASIDFRGTIVGIKPAPVIASFSGRGPNGLSPEILKPDLIAPGVNILAAWTDAVGPTGLPSDPRKTEFNILSGTSMACPHVSGAAALLKSAHPDWSPAVIRSAMMTTTNLVDNSNRSLIDESTGKSATPYDYGSGHLNLGRAMNPGLVYDITNDDYITFLCSIGYGPKTIQVITRTPVRCPTTRKPSPGNLNYPSITAVFPTNRRGLVSKTVIRTATNVGQAEAVYRARIESPRGVTVTVKPPRLVFTSAVKRRSYAVTVTVNTRNVVLGETGAVFGSVTWFDGGKHVVRSPIVVTQMDTL

SEQ ID NO: 4123 - protein, 542 aa, Arabidopsis thaliana
  peptide (1)..(542): Ceres Seq. ID no. 13574995
  misc_feature (137)..(235): Pfam Name: Pfam Description:  PA domain
  misc_feature (1)..(542): NCBI GI NO: 13430434 NR Description: putative subtilisin serine protease
  misc_feature (1)..(542): NCBI GI NO: 18400323 NR Description: subtilisin-like serine protease
  misc_feature (1)..(542): NCBI GI NO: 21536632 NR Description: subtilisin-like serine protease
  misc_feature (1)..(537): NCBI GI NO: 18425181 NR Description: subtilisin-like serine protease ARA12
  misc_feature (1)..(537): NCBI GI NO: 20147211 NR Description: AT5g67360/K8K14_8 [Arabidopsis thaliana]
  misc_feature (1)..(534): NCBI GI NO: 18396193 NR Description: subtilisin-like serine protease, putative
  misc_feature (1)..(537): NCBI GI NO: 1076414 NR Description: subtilisin-like proteinase (EC 3
  misc_feature (1)..(542): NCBI GI NO: 18423316 NR Description: subtilisin-like serine protease
  misc_feature (1)..(537): NCBI GI NO: 14488360 NR Description: putative serine protease
  misc_feature (1)..(537): NCBI GI NO: 30678198 NR Description: subtilisin-like serine protease, putative
MSGYASGVAKGVAPKARIAAYKVCWKDSGCLDSDILAAFDAAVRDGVDVISISIGGGDGITSPYYLDPIAIGSYGAASKGIFVSSSAGNEGPNGMSVTNLAPWVTTVGASTIDRNFPADAILGDGHRLRGVSLYAGVPLNGRMFPVVYPGKSGMSSASLCMENTLDPKQVRGKIVICDRGSSPRVAKGLVVKKAGGVGMILANGASNGEGLVGDAHLIPACAVGSNEGDRIKAYASSHPNPIASIDFRGTIVGIKPAPVIASFSGRGPNGLSPEILKPDLIAPGVNILAAWTDAVGPTGLPSDPRKTEFNILSGTSMACPHVSGAAALLKSAHPDWSPAVIRSAMMTTTNLVDNSNRSLIDESTGKSATPYDYGSGHLNLGRAMNPGLVYDITNDDYITFLCSIGYGPKTIQVITRTPVRCPTTRKPSPGNLNYPSITAVFPTNRRGLVSKTVIRTATNVGQAEAVYRARIESPRGVTVTVKPPRLVFTSAVKRRSYAVTVTVNTRNVVLGETGAVFGSVTWFDGGKHVVRSPIVVTQMDTL

SEQ ID NO: 4124 - DNA, 739 bp, Arabidopsis thaliana
  misc_feature (1)..(739): Ceres Seq. ID no. 12482372
acataatcatcgctattctctctctctctctctctctctctctctctcgctctcatatttgcagttgacaattcgttctctttgggaaattagagatgcaggcatcaagagcgcgactgtttaaagaatacaaagaggtacagcgagagaaagtagcagatcctgatattcaattgatctgtgacgataccaacatattcaaatggaccgctcttatcaaaggaccttcggagactccttacgaaggcggtgtttttcagcttgctttttctgttcctgaaccttatcctttgcaacctcctcaagttcgattcttgaccaagatattccatcctaatgttcatttcaagacaggagaaatatgtctcgacattttgaagaatgcttggagtcctgcttggacgcttcagtctgtgtgtagagctatcatagcattgatggctcatcctgagccggacagtcctcttaactgcgactcagggaatcttctaagatctggtgatgtgagagggttcaattcaatggcacaaatgtatacacgcctcgccgctatgcctaagaaaggatgatgatgatgatgatcctcttgctttttttttgtttttttttttgaaatttgtaatgatattgatttgcgagagtgaatacattattaacgagaagaagatgattcttctttattagttcacaatattacaatctgtcaagttgtcatatcttcttgtttaaggaatttgtc

SEQ ID NO: 4125 - protein, 157 aa, Arabidopsis thaliana
  peptide (1)..(157): Ceres Seq. ID no. 12482373
  misc_feature (1)..(157): NCBI GI NO: 18420949 NR Description: E2, ubiquitin-conjugating enzyme, putative
  misc_feature (7)..(153): NCBI GI NO: 34391431 NR Description: ubiquitin-conjugating enzyme E2 [Pavlova lutheri]
  misc_feature (6)..(150): NCBI GI NO: 28829309 NR Description: similar to Arabidopsis thaliana (Mouse-ear cress)
  misc_feature (4)..(153): NCBI GI NO: 23612144 NR Description: ubiquitin-conjugating enzyme E2, putative
  misc_feature (31)..(153): NCBI GI NO: 23491070 NR Description: probable ubiquitin-conjugating enzyme e2-17 kDa
  misc_feature (3)..(145): NCBI GI NO: 13812330 NR Description: ubiquitin-conjugating enzyme E2-21 KD
  misc_feature (1)..(155): NCBI GI NO: 19111870 NR Description: putative ubiquitin conjugating enzyme, e2
  misc_feature (1)..(74): NCBI GI NO: 3915186 NR Description: Ubiquitin-conjugating enzyme E2-21 kDa
  misc_feature (76)..(147): NCBI GI NO: 3915186 NR Description: Ubiquitin-conjugating enzyme E2-21 kDa
  misc_feature (7)..(156): NCBI GI NO: 23487093 NR Description: ubiquitin conjugating enzyme
MQASRARLFKEYKEVQREKVADPDIQLICDDTNIFKWTALIKGPSETPYEGGVFQLAFSVPEPYPLQPPQVRFLTKIFHPNVHFKTGEICLDILKNAWSPAWTLQSVCRAIIALMAHPEPDSPLNCDSGNLLRSGDVRGFNSMAQMYTRLAAMPKKG

SEQ ID NO: 4126 - DNA, 894 bp, Arabidopsis thaliana
  misc_feature (1)..(894): Ceres Seq. ID no. 12423070
actagttaattaatgtgtgatattaattggcaggtgagtgttcctccgagtagtttgttcaagacggtgacggtcagatgcggccactgttcgaaccttttgtcggtgaccgtgagcatgagagctcttcttcttccatccgtttccaaccttggccattcctttttacctccccctcctcctcctcctcctccaaatcttttggaggaaatgcgaagcggagggcagaatataaacatgaacatgatgatgagccatcacgcttcagctcaccacccgaacgagcatttggttatggcgactcgcaacggaagatcagtggatcatctacaagagatgcctcggccaccaccagccaatagacccccagagaagcgacaaagagtaccatctgcatacaaccgattcatcaaagaggagatccaacgtataaaggcaggcaaccctgatatcagccacagagaagccttcagtgctgctgccaaaaactgggctcatttccctcacatacactttggactcatggctgaccatcctcccacgaagaaggctaacgtgcgccaacaggaaggagaggatgggatgatgggaagagaagggttttacggttcagctgccaacgttggggtggcccataactagctacgaagactttcccaatcttttgtaatcttcaaaatgtggttactttcagctcaaacttaactttcttattactattttatgatatttgataatcgatcaggagaccttttttttttttcttaaagaaattttcggaactactagaattttctcttggaattgaaaatatattgttttctcagttgccgtgttatatatttaatatcaaaagcatgcagtagctaagctagctaggctttaccatacgtt

SEQ ID NO: 4127 - protein, 209 aa, Arabidopsis thaliana
  peptide (1)..(209): Ceres Seq. ID no. 12423071
  misc_feature (2)..(170): Pfam Name: Pfam Description:  YABBY protein
  misc_feature (2)..(209): NCBI GI NO: 18411242 NR Description: putative YABBY3 axial regulator
  misc_feature (2)..(206): NCBI GI NO: 18406725 NR Description: expressed protein; protein id: At2g45190
  misc_feature (42)..(209): NCBI GI NO: 37535908 NR Description: hypothetical protein
  misc_feature (2)..(61): NCBI GI NO: 37535908 NR Description: hypothetical protein
  misc_feature (2)..(207): NCBI GI NO: 27804377 NR Description: MADS-box transcription factor CDM51
  misc_feature (119)..(186): NCBI GI NO: 7486543 NR Description: hypothetical protein F6N15
  misc_feature (185)..(209): NCBI GI NO: 7486543 NR Description: hypothetical protein F6N15
  misc_feature (110)..(207): NCBI GI NO: 37551421 NR Description: FIL-like protein [Triticum aestivum]
  misc_feature (2)..(45): NCBI GI NO: 37551421 NR Description: FIL-like protein [Triticum aestivum]
  misc_feature (2)..(207): NCBI GI NO: 38605890 NR Description: OSJNBb0020O11.2
MCDINWQVSVPPSSLFKTVTVRCGHCSNLLSVTVSMRALLLPSVSNLGHSFLPPPPPPPPPNLLEEMRSGGQNINMNMMMSHHASAHHPNEHLVMATRNGRSVDHLQEMPRPPPANRPPEKRQRVPSAYNRFIKEEIQRIKAGNPDISHREAFSAAAKNWAHFPHIHFGLMADHPPTKKANVRQQEGEDGMMGREGFYGSAANVGVAHN

SEQ ID NO: 4128 - protein, 174 aa, Arabidopsis thaliana
  peptide (1)..(174): Ceres Seq. ID no. 12423072
  misc_feature (1)..(135): Pfam Name: Pfam Description:  YABBY protein
  misc_feature (1)..(174): NCBI GI NO: 18411242 NR Description: putative YABBY3 axial regulator
  misc_feature (1)..(171): NCBI GI NO: 18406725 NR Description: expressed protein; protein id: At2g45190
  misc_feature (7)..(174): NCBI GI NO: 37535908 NR Description: hypothetical protein
  misc_feature (1)..(26): NCBI GI NO: 37535908 NR Description: hypothetical protein
  misc_feature (1)..(172): NCBI GI NO: 27804377 NR Description: MADS-box transcription factor CDM51
  misc_feature (84)..(151): NCBI GI NO: 7486543 NR Description: hypothetical protein F6N15
  misc_feature (150)..(174): NCBI GI NO: 7486543 NR Description: hypothetical protein F6N15
  misc_feature (75)..(172): NCBI GI NO: 37551421 NR Description: FIL-like protein [Triticum aestivum]
  misc_feature (1)..(172): NCBI GI NO: 38605890 NR Description: OSJNBb0020O11.2
  misc_feature (81)..(147): NCBI GI NO: 30683176 NR Description: expressed protein [Arabidopsis thaliana]
MRALLLPSVSNLGHSFLPPPPPPPPPNLLEEMRSGGQNINMNMMMSHHASAHHPNEHLVMATRNGRSVDHLQEMPRPPPANRPPEKRQRVPSAYNRFIKEEIQRIKAGNPDISHREAFSAAAKNWAHFPHIHFGLMADHPPTKKANVRQQEGEDGMMGREGFYGSAANVGVAHN

SEQ ID NO: 4129 - protein, 143 aa, Arabidopsis thaliana
  peptide (1)..(143): Ceres Seq. ID no. 12423073
  misc_feature (1)..(104): Pfam Name: Pfam Description:  YABBY protein
  misc_feature (1)..(143): NCBI GI NO: 18411242 NR Description: putative YABBY3 axial regulator
  misc_feature (1)..(140): NCBI GI NO: 18406725 NR Description: expressed protein; protein id: At2g45190
  misc_feature (1)..(143): NCBI GI NO: 37535908 NR Description: hypothetical protein
  misc_feature (1)..(141): NCBI GI NO: 27804377 NR Description: MADS-box transcription factor CDM51
  misc_feature (53)..(120): NCBI GI NO: 7486543 NR Description: hypothetical protein F6N15
  misc_feature (119)..(143): NCBI GI NO: 7486543 NR Description: hypothetical protein F6N15
  misc_feature (44)..(141): NCBI GI NO: 37551421 NR Description: FIL-like protein [Triticum aestivum]
  misc_feature (1)..(141): NCBI GI NO: 38605890 NR Description: OSJNBb0020O11.2
  misc_feature (50)..(116): NCBI GI NO: 30683176 NR Description: expressed protein [Arabidopsis thaliana]
  misc_feature (29)..(107): NCBI GI NO: 11280863 NR Description: hypothetical protein [imported] - rice
MRSGGQNINMNMMMSHHASAHHPNEHLVMATRNGRSVDHLQEMPRPPPANRPPEKRQRVPSAYNRFIKEEIQRIKAGNPDISHREAFSAAAKNWAHFPHIHFGLMADHPPTKKANVRQQEGEDGMMGREGFYGSAANVGVAHN

SEQ ID NO: 4130 - DNA, 1112 bp, Arabidopsis thaliana
  misc_feature (1)..(1112): Ceres Seq. ID no. 12328337
aaacaatggatgagttataggtttggttaagacttgaaaagtcattgatcacggcttttgtccattattccgtgtttaaagtaatttacattctcttttaagatctctcagtccaaagacaatgcaaacaataataatttctccacttgtttctcatcgtctctgtcttgctcgtgctgttccttgcaaccgtcttctcaacaaccaccaccgtgctcctccttcgatccgcctctcaaaccaccgttcaaccacctcactccgcctcttctcctccgccgcagccagtcgggacagtgaaatggcgactgaagatgtgcaagatcccagaatcgctaagattgcctcttccattagagtcatccccgacttccctaaaccaggaatcatgtttcaggacataacgacgcttcttctcgacactgaggcctttaaggatactattgctttgtttgttgatagatacaaagataaaggcatatctgttgttgcaggtgttgaagctagaggtttcatttttggccctcctattgcgttggctattggtgccaaatttgttcccatgaggaagcccaagaagctacctgggaaggttatttcggaggagtattcgttggagtatggaacagatacgattgagatgcacgtaggtgcagtagagcctggtgagcgtgctattattattgatgacctcattgccacgggtgggactctcgctgctgcaatccgactacttgaacgagtaggagtgaagattgttgaatgtgcttgcgtaattgagttaccagagcttaagggaaaggagaaactaggagagacgtcgctatttgttcttgtaaagtcggctgcttaacaagaaactggaagagaaggttattggatcgagtgttgatgctatttttcatgtatggtgagacattttgcgtgggatttgatccttgttgtttcaacttatcataattggttcagactagaaaatggcatttgaatgtcaggattcgattgcagtttcctattgttccacttaaaatccccgattaataaggtgttatgggttttatttatagaatcaagttgtaatagtagactccaacaggggctaaagtcttggt

SEQ ID NO: 4131 - protein, 243 aa, Arabidopsis thaliana
  peptide (1)..(243): Ceres Seq. ID no. 12328338
  misc_feature (1)..(243): NCBI GI NO: 18396344 NR Description: adenine phosphoribosyltransferase 1, APRT
  misc_feature (61)..(243): NCBI GI NO: 30689934 NR Description: adenine phosphoribosyltransferase 1, APRT
  misc_feature (61)..(155): NCBI GI NO: 25286872 NR Description: protein F17L21.24
  misc_feature (154)..(243): NCBI GI NO: 25286872 NR Description: protein F17L21.24
  misc_feature (52)..(243): NCBI GI NO: 32492063 NR Description: adenine phosphoribosyltransferase [Brassica napus]
  misc_feature (68)..(241): NCBI GI NO: 9711921 NR Description: Adenine phosphoribosyltransferase
  misc_feature (68)..(241): NCBI GI NO: 2499932 NR Description: Adenine phosphoribosyltransferase 1 (APRT)
  misc_feature (64)..(241): NCBI GI NO: 33354190 NR Description: putative adenine phosphoribosyl transferase
  misc_feature (64)..(240): NCBI GI NO: 15235709 NR Description: adenine phosphoribosyltransferase (EC 2
  misc_feature (61)..(240): NCBI GI NO: 15234553 NR Description: putative adenine phosphoribosyltransferase
MQTIIISPLVSHRLCLARAVPCNRLLNNHHRAPPSIRLSNHRSTTSLRLFSSAAASRDSEMATEDVQDPRIAKIASSIRVIPDFPKPGIMFQDITTLLLDTEAFKDTIALFVDRYKDKGISVVAGVEARGFIFGPPIALAIGAKFVPMRKPKKLPGKVISEEYSLEYGTDTIEMHVGAVEPGERAIIIDDLIATGGTLAAAIRLLERVGVKIVECACVIELPELKGKEKLGETSLFVLVKSAA

SEQ ID NO: 4132 - protein, 183 aa, Arabidopsis thaliana
  peptide (1)..(183): Ceres Seq. ID no. 12328339
  misc_feature (1)..(183): NCBI GI NO: 18396344 NR Description: adenine phosphoribosyltransferase 1, APRT
  misc_feature (1)..(183): NCBI GI NO: 30689934 NR Description: adenine phosphoribosyltransferase 1, APRT
  misc_feature (1)..(95): NCBI GI NO: 25286872 NR Description: protein F17L21.24
  misc_feature (94)..(183): NCBI GI NO: 25286872 NR Description: protein F17L21.24
  misc_feature (1)..(183): NCBI GI NO: 32492063 NR Description: adenine phosphoribosyltransferase [Brassica napus]
  misc_feature (8)..(181): NCBI GI NO: 9711921 NR Description: Adenine phosphoribosyltransferase
  misc_feature (8)..(181): NCBI GI NO: 2499932 NR Description: Adenine phosphoribosyltransferase 1 (APRT)
  misc_feature (4)..(181): NCBI GI NO: 33354190 NR Description: putative adenine phosphoribosyl transferase
  misc_feature (4)..(180): NCBI GI NO: 15235709 NR Description: adenine phosphoribosyltransferase (EC 2
  misc_feature (1)..(180): NCBI GI NO: 15234553 NR Description: putative adenine phosphoribosyltransferase
MATEDVQDPRIAKIASSIRVIPDFPKPGIMFQDITTLLLDTEAFKDTIALFVDRYKDKGISVVAGVEARGFIFGPPIALAIGAKFVPMRKPKKLPGKVISEEYSLEYGTDTIEMHVGAVEPGERAIIIDDLIATGGTLAAAIRLLERVGVKIVECACVIELPELKGKEKLGETSLFVLVKSAA

SEQ ID NO: 4133 - protein, 154 aa, Arabidopsis thaliana
  peptide (1)..(154): Ceres Seq. ID no. 12328340
  misc_feature (1)..(154): NCBI GI NO: 18396344 NR Description: adenine phosphoribosyltransferase 1, APRT
  misc_feature (1)..(154): NCBI GI NO: 30689934 NR Description: adenine phosphoribosyltransferase 1, APRT
  misc_feature (1)..(66): NCBI GI NO: 25286872 NR Description: protein F17L21.24
  misc_feature (65)..(154): NCBI GI NO: 25286872 NR Description: protein F17L21.24
  misc_feature (1)..(154): NCBI GI NO: 32492063 NR Description: adenine phosphoribosyltransferase [Brassica napus]
  misc_feature (1)..(152): NCBI GI NO: 9711921 NR Description: Adenine phosphoribosyltransferase
  misc_feature (1)..(152): NCBI GI NO: 2499932 NR Description: Adenine phosphoribosyltransferase 1 (APRT)
  misc_feature (1)..(152): NCBI GI NO: 33354190 NR Description: putative adenine phosphoribosyl transferase
  misc_feature (1)..(151): NCBI GI NO: 15235709 NR Description: adenine phosphoribosyltransferase (EC 2
  misc_feature (1)..(151): NCBI GI NO: 15234553 NR Description: putative adenine phosphoribosyltransferase
MFQDITTLLLDTEAFKDTIALFVDRYKDKGISVVAGVEARGFIFGPPIALAIGAKFVPMRKPKKLPGKVISEEYSLEYGTDTIEMHVGAVEPGERAIIIDDLIATGGTLAAAIRLLERVGVKIVECACVIELPELKGKEKLGETSLFVLVKSAA

SEQ ID NO: 4134 - DNA, 807 bp, Arabidopsis thaliana
  misc_feature (1)..(807): Ceres Seq. ID no. 12338926
actgcaaacgcttttgagacaaagttcgtcacttcgatctgaattataacacttcgtgcgagaatcgaaataatcgaaggttcaagatgggttggatcggagaaactgtagattctatcaaatctattcagattcgtcagcttttcactcaggccatcagtctagggatgattgtcacatctgctttgatcatatggaaagctttgatgtgtgtcactggaagcgaatctccggtggtggttgttctctctggaagcatggaacccggttttaagaggggggatatattgttcttgcacatgagtaaagacccgattcgagcaggtgaaattgttgttttcaatgttgatggtcgtgatattcccattgtccatcgtgtcattaaggttcacgaaagggaaaatacaggagaagttgatgttctaacgaaaggtgacaataactatggagatgacagacttctgtatgctgaaggacagctttggcttcatcgacatcatataatgggtcgtgctgtcgggttcttgccttatgttggatgggtgactattatcatgacagaaaagcctatcatcaagtatattctcataggtgcattgggtttactcgttataacgtcaaaggattgagtcttttggaaaggagtggactctgcagagtgcaaacccttaaagtcttgttatttcaatggaaaaaaagaaaaagacaaacaatttaaatactcgtttttgtggttagataattttaaagagtagaatcttctttttcctgtcaaactaaattataaacagtggaaagttaattttt

SEQ ID NO: 4135 - protein, 180 aa, Arabidopsis thaliana
  peptide (1)..(180): Ceres Seq. ID no. 12338927
  misc_feature (1)..(157): Pfam Name: Pfam Description:  Signal peptidase I
  misc_feature (1)..(180): NCBI GI NO: 15219044 NR Description: signal peptidase subunit, putative
  misc_feature (27)..(120): NCBI GI NO: 34898642 NR Description: putative signal peptidase subunit
  misc_feature (116)..(180): NCBI GI NO: 34898642 NR Description: putative signal peptidase subunit
  misc_feature (1)..(27): NCBI GI NO: 34898642 NR Description: putative signal peptidase subunit
  misc_feature (1)..(180): NCBI GI NO: 18400874 NR Description: putative signal peptidase 21kDa subunit
  misc_feature (11)..(180): NCBI GI NO: 15150809 NR Description: similar to signal peptidase complex (18kD)
  misc_feature (11)..(180): NCBI GI NO: 24025634 NR Description: signal peptidase 21kDa subunit [Rattus norvegicus]
  misc_feature (11)..(180): NCBI GI NO: 134792 NR Description: Microsomal signal peptidase 21 kDa subunit
  misc_feature (11)..(180): NCBI GI NO: 21313554 NR Description: RIKEN cDNA 1810029G24 [Mus musculus]
  misc_feature (11)..(180): NCBI GI NO: 31195617 NR Description: ENSANGP00000013674 [Anopheles gambiae]
MGWIGETVDSIKSIQIRQLFTQAISLGMIVTSALIIWKALMCVTGSESPVVVVLSGSMEPGFKRGDILFLHMSKDPIRAGEIVVFNVDGRDIPIVHRVIKVHERENTGEVDVLTKGDNNYGDDRLLYAEGQLWLHRHHIMGRAVGFLPYVGWVTIIMTEKPIIKYILIGALGLLVITSKD

SEQ ID NO: 4136 - protein, 153 aa, Arabidopsis thaliana
  peptide (1)..(153): Ceres Seq. ID no. 12338929
  misc_feature (1)..(130): Pfam Name: Pfam Description:  Signal peptidase I
  misc_feature (1)..(153): NCBI GI NO: 15219044 NR Description: signal peptidase subunit, putative
  misc_feature (1)..(93): NCBI GI NO: 34898642 NR Description: putative signal peptidase subunit
  misc_feature (89)..(153): NCBI GI NO: 34898642 NR Description: putative signal peptidase subunit
  misc_feature (1)..(153): NCBI GI NO: 18400874 NR Description: putative signal peptidase 21kDa subunit
  misc_feature (1)..(153): NCBI GI NO: 15150809 NR Description: similar to signal peptidase complex (18kD)
  misc_feature (1)..(153): NCBI GI NO: 24025634 NR Description: signal peptidase 21kDa subunit [Rattus norvegicus]
  misc_feature (1)..(153): NCBI GI NO: 134792 NR Description: Microsomal signal peptidase 21 kDa subunit
  misc_feature (1)..(153): NCBI GI NO: 21313554 NR Description: RIKEN cDNA 1810029G24 [Mus musculus]
  misc_feature (1)..(153): NCBI GI NO: 31195617 NR Description: ENSANGP00000013674 [Anopheles gambiae]
  misc_feature (1)..(153): NCBI GI NO: 31207577 NR Description: ENSANGP00000020448 [Anopheles gambiae]
MIVTSALIIWKALMCVTGSESPVVVVLSGSMEPGFKRGDILFLHMSKDPIRAGEIVVFNVDGRDIPIVHRVIKVHERENTGEVDVLTKGDNNYGDDRLLYAEGQLWLHRHHIMGRAVGFLPYVGWVTIIMTEKPIIKYILIGALGLLVITSKD

SEQ ID NO: 4137 - protein, 140 aa, Arabidopsis thaliana
  peptide (1)..(140): Ceres Seq. ID no. 12338930
  misc_feature (1)..(117): Pfam Name: Pfam Description:  Signal peptidase I
  misc_feature (1)..(140): NCBI GI NO: 15219044 NR Description: signal peptidase subunit, putative
  misc_feature (1)..(80): NCBI GI NO: 34898642 NR Description: putative signal peptidase subunit
  misc_feature (76)..(140): NCBI GI NO: 34898642 NR Description: putative signal peptidase subunit
  misc_feature (1)..(140): NCBI GI NO: 18400874 NR Description: putative signal peptidase 21kDa subunit
  misc_feature (1)..(140): NCBI GI NO: 15150809 NR Description: similar to signal peptidase complex (18kD)
  misc_feature (1)..(140): NCBI GI NO: 24025634 NR Description: signal peptidase 21kDa subunit [Rattus norvegicus]
  misc_feature (1)..(140): NCBI GI NO: 134792 NR Description: Microsomal signal peptidase 21 kDa subunit
  misc_feature (1)..(140): NCBI GI NO: 21313554 NR Description: RIKEN cDNA 1810029G24 [Mus musculus]
  misc_feature (1)..(140): NCBI GI NO: 31195617 NR Description: ENSANGP00000013674 [Anopheles gambiae]
  misc_feature (1)..(140): NCBI GI NO: 31207577 NR Description: ENSANGP00000020448 [Anopheles gambiae]
MCVTGSESPVVVVLSGSMEPGFKRGDILFLHMSKDPIRAGEIVVFNVDGRDIPIVHRVIKVHERENTGEVDVLTKGDNNYGDDRLLYAEGQLWLHRHHIMGRAVGFLPYVGWVTIIMTEKPIIKYILIGALGLLVITSKD

SEQ ID NO: 4138 - DNA, 928 bp, Arabidopsis thaliana
  misc_feature (1)..(928): Ceres Seq. ID no. 13487201
ataaatacgctttctacattttcggatcgttgaacaacatctctctctctctctctctaaacccattagagtaatttagctcctcatagattctcgagaagaacacttccatggcgactaaagtatatatcgtgtactactctatgtatggtcatgttgagaaattggctgaagaaataaggaaaggagctgcttctgttgaaggtgttgaagctaaactatggcaggtaccagagacgcttcacgaagaggcactctctaagatgagcgcaccaccaaagagtgaatccccaatcataaccccgaatgagctagctgaagctgatgggtttgtctttggtttcccaacaagatttggtatgatggctgctcagttcaaagcctttttggatgcaaccggtggactctggagggctcaggcactcgccggtaaaccagctggtatcttctacagcactggctctcaaggtggtggccaagaaaccacagcattgacggcaataactcagctggttcaccacgggatgttatttgtcccaatcggttacacatttggcgcgggaatgttcgaaatggagaatgtgaaaggtggaagcccatatggagctggaacatttgcaggagacggttcaaggcagccaacagagctggagctacagcaagcatttcaccaaggccagtacattgccagcatcaccaagaagctcaagggatctactgcttagagcttaaaaagattatggtatcaataagaaaaaaagaaaaaaacagtttggttctgcttttttttatattctttctctttgaatttgggggcttttgtgatttttcgggtttaattatcttaaaatacatgatattatttcacagcaataattcttatcttggttttacgtatagatgataatgtatgatttgtacttgtgtc

SEQ ID NO: 4139 - protein, 204 aa, Arabidopsis thaliana [sequence omitted]

SEQ ID NO: 4140 - protein, 193 aa, Arabidopsis thaliana
  peptide (1)..(193): Ceres Seq. ID no. 13487203
  misc_feature (1)..(193): NCBI GI NO: 15239652 NR Description: quinone reductase, putative [Arabidopsis thaliana]
  misc_feature (1)..(193): NCBI GI NO: 30687535 NR Description: quinone reductase family [Arabidopsis thaliana]
  misc_feature (1)..(192): NCBI GI NO: 5031275 NR Description: unknown [Prunus armeniaca]
  misc_feature (1)..(193): NCBI GI NO: 7445353 NR Description: hypothetical protein M4I22
  misc_feature (1)..(191): NCBI GI NO: 21068664 NR Description: putative quinone oxidoreductase [Cicer arietinum]
  misc_feature (1)..(191): NCBI GI NO: 38636776 NR Description: putative quinone-oxidoreductase QR2
  misc_feature (1)..(193): NCBI GI NO: 12484052 NR Description: quinone-oxidoreductase QR2
  misc_feature (1)..(191): NCBI GI NO: 34910128 NR Description: putative 1,4-benzoquinone reductase
  misc_feature (27)..(189): NCBI GI NO: 37724581 NR Description: putative quinone reductase [Vitis vinifera]
  misc_feature (1)..(189): NCBI GI NO: 2564066 NR Description: LEDI-3 protein [Lithospermum erythrorhizon]
MYGHVEKLAEEIRKGAASVEGVEAKLWQVPETLHEEALSKMSAPPKSESPIITPNELAEADGFVFGFPTRFGMMAAQFKAFLDATGGLWRAQALAGKPAGIFYSTGSQGGGQETTALTAITQLVHHGMLFVPIGYTFGAGMFEMENVKGGSPYGAGTFAGDGSRQPTELELQQAFHQGQYIASITKKLKGSTA

SEQ ID NO: 4141 - protein, 153 aa, Arabidopsis thaliana
  peptide (1)..(153): Ceres Seq. ID no. 13487204
  misc_feature (1)..(153): NCBI GI NO: 15239652 NR Description: quinone reductase, putative [Arabidopsis thaliana]
  misc_feature (1)..(153): NCBI GI NO: 30687535 NR Description: quinone reductase family [Arabidopsis thaliana]
  misc_feature (1)..(152): NCBI GI NO: 5031275 NR Description: unknown [Prunus armeniaca]
  misc_feature (1)..(153): NCBI GI NO: 7445353 NR Description: hypothetical protein M4I22
  misc_feature (1)..(151): NCBI GI NO: 21068664 NR Description: putative quinone oxidoreductase [Cicer arietinum]
  misc_feature (1)..(151): NCBI GI NO: 38636776 NR Description: putative quinone-oxidoreductase QR2
  misc_feature (1)..(153): NCBI GI NO: 12484052 NR Description: quinone-oxidoreductase QR2
  misc_feature (1)..(151): NCBI GI NO: 34910128 NR Description: putative 1,4-benzoquinone reductase
  misc_feature (1)..(149): NCBI GI NO: 37724581 NR Description: putative quinone reductase [Vitis vinifera]
  misc_feature (1)..(149): NCBI GI NO: 2564066 NR Description: LEDI-3 protein [Lithospermum erythrorhizon]
MSAPPKSESPIITPNELAEADGFVFGFPTRFGMMAAQFKAFLDATGGLWRAQALAGKPAGIFYSTGSQGGGQETTALTAITQLVHHGMLFVPIGYTFGAGMFEMENVKGGSPYGAGTFAGDGSRQPTELELQQAFHQGQYIASITKKLKGSTA

SEQ ID NO: 4142 - DNA, 1761 bp, Arabidopsis thaliana
  misc_feature (1)..(1761): Ceres Seq. ID no. 12328341
caacataatgtccattacaaacaacaacagcatcataaatctcatcacgacgaactttcttctctttctccgtcgattcaatcctccacttcccgattccttcctccgccgccggagaaaccttcacaacctccgtctcaaacctaaccatctcctcaatcccaaactccttagcgaaatctttcaaatacgccaaaacttcgccatgactcggaaacctcctcggatctctagacacaccggaacgaaccacgaacgggaaatctctgtatccggtactctctcgtgtaccgttgattcgtagagatctatagacgcttgaatgaacaacggatcgggtcgggtcaacacttaacggatccgattcgacttcatcggtgtagatccaggttcctccgacttgtttttgtttctcgaaaacgaccaccgagtgaccttctcgtcgaagctctcgtgccgctactagacctgcaggtccagcaccgataaccgccacgtggtgtgatctggttggtgataatgcaggtgccatttgtgtgttctttgattagaatctatgaatcacaatcacacacacttgttacaatttatgattacaatgtttttaataatcaatttggtgtgttagaaacttacacgaatctgttattacagacgtagattgccacgttttggttgatagagagaaatgcttttattatataacttgtgtcattgtatttcttctccaccgagacagtgaaacatcaatcaatatgagcaatcatcaaactgtgagatttcttttctctcatttaccattttgcccttccactttcttgatgattgtttgttttttttgtggacagaagcaggtattgaagcaattggagccatggtgtgaacttaaagataaagtggttcttgtgacaggtgcttcatctggtatagggagagagatctgtcttgatctatgcaaagctggttgtaagattgtagcagcagctcgtcgtgttgatcgtctcaactctctctgttctgaaatcaacagctttggtgcaatcggagtccaagccgcagctcttgagctagacgtttcatcagacgcagacactattcgaaaagcggttaaagaagcttgggaaatctttggaacgatcgatgttttgattaacaatgctggaatcagaggcaatgtcaagtctagtttggatttatcagaagaagaatgggacaaagtctttagaaccaacttgaccggatcttggttaatatccaaatacgtctgccttttgatgcgtgacgctaagcgcgggggctcggtgattaacgtctcgtcaatctctgggcttcatcgcggtttgttgcgcggtggactagcgtatgcttgttccaaaggtggtgttgacaccatgacaaggatgatggctattgagttagcggtttataatatcagagtgaactcgatcgcaccggggattttcaggtcagagatcacacaaggtcttttccagaaagagtggctcgagaaggttacggaaaagattgtaccattaaagatgcaacagactgtggatccggggcttacatctctcgttcgctatctcattcacgattcttctcaatatgtcaccgggaatacatacattgtcgattccggaactacactgcccggtgtgcccattttttcttctctttgaaaatcttagtcaaaatcttctgtgcttgtacatacaccgtgataagaatgatgtctttccaataaatggcagtactggcatt

SEQ ID NO: 4143 - protein, 307 aa, Arabidopsis thaliana
  peptide (1)..(307): Ceres Seq. ID no. 12328342
  misc_feature (1)..(307): NCBI GI NO: 15221517 NR Description: similar to glucose 1-dehydrogenase
  misc_feature (23)..(307): NCBI GI NO: 15222406 NR Description: reductase, putative; protein id: At1g63380.1
  misc_feature (31)..(307): NCBI GI NO: 18410245 NR Description: oxidoreductase -like protein
  misc_feature (34)..(307): NCBI GI NO: 11250516 NR Description: oxidoreductase-like protein - Arabidopsis thaliana
  misc_feature (21)..(307): NCBI GI NO: 15233243 NR Description: beta-ketoacyl-ACP reductase - like protein
  misc_feature (27)..(307): NCBI GI NO: 15231362 NR Description: dehydrogenase -like protein; protein id: At3g46170
  misc_feature (32)..(307): NCBI GI NO: 18398539 NR Description: similar to oxidoreductase -like protein
  misc_feature (35)..(307): NCBI GI NO: 13549123 NR Description: putative short-chain type alcohol dehydrogenase
  misc_feature (35)..(307): NCBI GI NO: 23451057 NR Description: putative short-chain type alcohol dehydrogenase
  misc_feature (40)..(307): NCBI GI NO: 28411870 NR Description: putative 3-ketoacyl-acyl carrier protein reductase
MSNHQTVRFLFSHLPFCPSTFLMIVCFFCGQKQVLKQLEPWCELKDKVVLVTGASSGIGREICLDLCKAGCKIVAAARRVDRLNSLCSEINSFGAIGVQAAALELDVSSDADTIRKAVKEAWEIFGTIDVLINNAGIRGNVKSSLDLSEEEWDKVFRTNLTGSWLISKYVCLLMRDAKRGGSVINVSSISGLHRGLLRGGLAYACSKGGVDTMTRMMAIELAVYNIRVNSIAPGIFRSEITQGLFQKEWLEKVTEKIVPLKMQQTVDPGLTSLVRYLIHDSSQYVTGNTYIVDSGTTLPGVPIFSSL

SEQ ID NO: 4144 - protein, 285 aa, Arabidopsis thaliana
  peptide (1)..(285): Ceres Seq. ID no. 12328343
  misc_feature (1)..(285): NCBI GI NO: 15221517 NR Description: similar to glucose 1-dehydrogenase
  misc_feature (1)..(285): NCBI GI NO: 15222406 NR Description: reductase, putative; protein id: At1g63380.1
  misc_feature (9)..(285): NCBI GI NO: 18410245 NR Description: oxidoreductase -like protein
  misc_feature (12)..(285): NCBI GI NO: 11250516 NR Description: oxidoreductase-like protein - Arabidopsis thaliana
  misc_feature (1)..(285): NCBI GI NO: 15233243 NR Description: beta-ketoacyl-ACP reductase - like protein
  misc_feature (5)..(285): NCBI GI NO: 15231362 NR Description: dehydrogenase -like protein; protein id: At3g46170
  misc_feature (10)..(285): NCBI GI NO: 18398539 NR Description: similar to oxidoreductase -like protein
  misc_feature (13)..(285): NCBI GI NO: 13549123 NR Description: putative short-chain type alcohol dehydrogenase
  misc_feature (13)..(285): NCBI GI NO: 23451057 NR Description: putative short-chain type alcohol dehydrogenase
  misc_feature (18)..(285): NCBI GI NO: 28411870 NR Description: putative 3-ketoacyl-acyl carrier protein reductase
MIVCFFCGQKQVLKQLEPWCELKDKVVLVTGASSGIGREICLDLCKAGCKIVAAARRVDRLNSLCSEINSFGAIGVQAAALELDVSSDADTIRKAVKEAWEIFGTIDVLINNAGIRGNVKSSLDLSEEEWDKVFRTNLTGSWLISKYVCLLMRDAKRGGSVINVSSISGLHRGLLRGGLAYACSKGGVDTMTRMMAIELAVYNIRVNSIAPGIFRSEITQGLFQKEWLEKVTEKIVPLKMQQTVDPGLTSLVRYLIHDSSQYVTGNTYIVDSGTTLPGVPIFSSL

SEQ ID NO: 4145 - DNA, 1216 bp, Arabidopsis thaliana
  misc_feature (1)..(1216): Ceres Seq. ID no. 13487632
aattttcaacaagcaaagttcatgatggggaataagcgaaatctcggatttgtgatcttcttctgggctctggtggttgcagtagtagccacggccatcgagcatcgtcgcaatgagaggactaaaggcgtcaatggtcttgacaagatcatcatccgcgaccgtcgtggccgatctgctgaggtttacttgtatggaggtcaagtcagttcttggaaaaatgagaatggagaggagttacttgttatgagtagcaaggctatattccagcctccaacaccgattcgtggaggaattccagtattgtttccgcaatacagtaacaccggtccacttccctcacatggatttgtaagacagaggttctgggaggttgagactaaaccacctcctttgccatcactttctactgctcatgttgacctgatcgtaagatcatccaatgaggatttgaagatctggccgcataagtttgagtatagactgagagtagcattgggacatgatggagatttgacgttaacatctcgtgttaagaatactgatacaaaaccatttaacttcacatttgctcttcacccctacttcgctgtttccaatatcagtgaaatccatgtcgaaggattacacaacttggattaccttgaccaacaaaagaacagaacacgtttcactgatcatgagaaggttataactttcaatgctcaacttgacaggttgtacctaagcactccagatcaactaagaatcgtggaccataagaaaaagaagactattgttgtacacaaggagggacaagttgatgccgtggtgtggaatccatgggataagaaagtatccgatttgggagttgaagactataagcgttttgtaacggtggaaagcgcggctgtcgcgaaaccgatcacagtgaaccccggcaaagaatggaaaggaatactccatgtttctgtggttccatcaaatcggaaagcttgaccctataaaagtcttgcattcatcatcctcatcctttaaaaaaaaaacttaaaactgtctttattaaagtatacttaatgttcccgagagacatcacatggtgaacacaaagttagttgggttccaaactggactcttgaccagttttattgttttgtaactttagcattcatgaataaaaaaagtgcgttaattacaataattgttaaatgtaattaaataaaagtgcgttaactac

SEQ ID NO: 4146 - protein, 325 aa, Arabidopsis thaliana
  peptide (1)..(325): Ceres Seq. ID no. 13487633
  misc_feature (48)..(317): Pfam Name: Pfam Description:  Aldose 1-epimerase
  misc_feature (8)..(325): NCBI GI NO: 18416643 NR Description: aldose 1-epimerase family [Arabidopsis thaliana]
  misc_feature (9)..(325): NCBI GI NO: 21593295 NR Description: possible apospory-associated like protein
  misc_feature (9)..(325): NCBI GI NO: 7485483 NR Description: hypothetical protein F14M19
  misc_feature (105)..(325): NCBI GI NO: 4538919 NR Description: possible apospory-associated like protein
  misc_feature (32)..(322): NCBI GI NO: 15242099 NR Description: aldose 1-epimerase family [Arabidopsis thaliana]
  misc_feature (42)..(322): NCBI GI NO: 19387263 NR Description: putative apospory-associated protein C
  misc_feature (39)..(322): NCBI GI NO: 38344152 NR Description: OSJNBa0041A02.19
  misc_feature (39)..(322): NCBI GI NO: 2501555 NR Description: POSSIBLE APOSPORY-ASSOCIATED PROTEIN C
  misc_feature (39)..(322): NCBI GI NO: 40253263 NR Description: putative Aldose 1-epimerase
  misc_feature (42)..(321): NCBI GI NO: 15236591 NR Description: aldose 1-epimerase family [Arabidopsis thaliana]
NFQQAKFMMGNKRNLGFVIFFWALVVAVVATAIEHRRNERTKGVNGLDKIIIRDRRGRSAEVYLYGGQVSSWKNENGEELLVMSSKAIFQPPTPIRGGIPVLFPQYSNTGPLPSHGFVRQRFWEVETKPPPLPSLSTAHVDLIVRSSNEDLKIWPHKFEYRLRVALGHDGDLTLTSRVKNTDTKPFNFTFALHPYFAVSNISEIHVEGLHNLDYLDQQKNRTRFTDHEKVITFNAQLDRLYLSTPDQLRIVDHKKKKTIVVHKEGQVDAVVWNPWDKKVSDLGVEDYKRFVTVESAAVAKPITVNPGKEWKGILHVSVVPSNRKA

SEQ ID NO: 4147 - protein, 318 aa, Arabidopsis thaliana
  peptide (1)..(318): Ceres Seq. ID no. 13487634
  misc_feature (41)..(310): Pfam Name: Pfam Description:  Aldose 1-epimerase
  misc_feature (1)..(318): NCBI GI NO: 18416643 NR Description: aldose 1-epimerase family [Arabidopsis thaliana]
  misc_feature (2)..(318): NCBI GI NO: 21593295 NR Description: possible apospory-associated like protein
  misc_feature (2)..(318): NCBI GI NO: 7485483 NR Description: hypothetical protein F14M19
  misc_feature (98)..(318): NCBI GI NO: 4538919 NR Description: possible apospory-associated like protein
  misc_feature (25)..(315): NCBI GI NO: 15242099 NR Description: aldose 1-epimerase family [Arabidopsis thaliana]
  misc_feature (35)..(315): NCBI GI NO: 19387263 NR Description: putative apospory-associated protein C
  misc_feature (32)..(315): NCBI GI NO: 38344152 NR Description: OSJNBa0041A02.19
  misc_feature (32)..(315): NCBI GI NO: 2501555 NR Description: POSSIBLE APOSPORY-ASSOCIATED PROTEIN C
  misc_feature (32)..(315): NCBI GI NO: 40253263 NR Description: putative Aldose 1-epimerase
  misc_feature (35)..(314): NCBI GI NO: 15236591 NR Description: aldose 1-epimerase family [Arabidopsis thaliana]
MMGNKRNLGFVIFFWALVVAVVATAIEHRRNERTKGVNGLDKIIIRDRRGRSAEVYLYGGQVSSWKNENGEELLVMSSKAIFQPPTPIRGGIPVLFPQYSNTGPLPSHGFVRQRFWEVETKPPPLPSLSTAHVDLIVRSSNEDLKIWPHKFEYRLRVALGHDGDLTLTSRVKNTDTKPFNFTFALHPYFAVSNISEIHVEGLHNLDYLDQQKNRTRFTDHEKVITFNAQLDRLYLSTPDQLRIVDHKKKKTIVVHKEGQVDAVVWNPWDKKVSDLGVEDYKRFVTVESAAVAKPITVNPGKEWKGILHVSVVPSNRKA

SEQ ID NO: 4148 - protein, 317 aa, Arabidopsis thaliana
  peptide (1)..(317): Ceres Seq. ID no. 13487635
  misc_feature (40)..(309): Pfam Name: Pfam Description:  Aldose 1-epimerase
  misc_feature (1)..(317): NCBI GI NO: 18416643 NR Description: aldose 1-epimerase family [Arabidopsis thaliana]
  misc_feature (1)..(317): NCBI GI NO: 21593295 NR Description: possible apospory-associated like protein
  misc_feature (1)..(317): NCBI GI NO: 7485483 NR Description: hypothetical protein F14M19
  misc_feature (97)..(317): NCBI GI NO: 4538919 NR Description: possible apospory-associated like protein
  misc_feature (24)..(314): NCBI GI NO: 15242099 NR Description: aldose 1-epimerase family [Arabidopsis thaliana]
  misc_feature (34)..(314): NCBI GI NO: 19387263 NR Description: putative apospory-associated protein C
  misc_feature (31)..(314): NCBI GI NO: 38344152 NR Description: OSJNBa0041A02.19
  misc_feature (31)..(314): NCBI GI NO: 2501555 NR Description: POSSIBLE APOSPORY-ASSOCIATED PROTEIN C
  misc_feature (31)..(314): NCBI GI NO: 40253263 NR Description: putative Aldose 1-epimerase
  misc_feature (34)..(313): NCBI GI NO: 15236591 NR Description: aldose 1-epimerase family [Arabidopsis thaliana]
MGNKRNLGFVIFFWALVVAVVATAIEHRRNERTKGVNGLDKIIIRDRRGRSAEVYLYGGQVSSWKNENGEELLVMSSKAIFQPPTPIRGGIPVLFPQYSNTGPLPSHGFVRQRFWEVETKPPPLPSLSTAHVDLIVRSSNEDLKIWPHKFEYRLRVALGHDGDLTLTSRVKNTDTKPFNFTFALHPYFAVSNISEIHVEGLHNLDYLDQQKNRTRFTDHEKVITFNAQLDRLYLSTPDQLRIVDHKKKKTIVVHKEGQVDAVVWNPWDKKVSDLGVEDYKRFVTVESAAVAKPITVNPGKEWKGILHVSVVPSNRKA

SEQ ID NO: 4149 - DNA, 1355 bp, Arabidopsis thaliana
  misc_feature (1)..(1355): Ceres Seq. ID no. 13491947
gacacaacaacaacacatccactcgaattttctatttccgaataacaaaaccgatcggcggagacatgacggcggcacaagggaactctaacgagactctgttttcttcttacaagatgggaagattcgatctctctcatcgagtggttctggcgccgatgacgcggtgcagggcgttgaacggagtaccaaacgcggcgttggcagagtattatgctcaacggaccactcccggcggttttctcatctccgaaggcaccatggtctctcccggatccgcagggttcccacatgtgcctggaatctattcagatgaacaagtagaagcatggaagcaagttgtggaagcagttcacgctaagggaggtttcatcttttgtcaattatggcatgttggacgtgcttctcatgcagtgtatcaacctaatggaggatcaccaatatcgtcaacgaacaaaccaatctcggaaaacaggtggcgagttttgttgcccgatggttcccacgtgaagtacccgaaacctcgggctttagaagcttccgagatacctcgggtggtggaggattattgcctttctgctttgaatgcgattcgagctggtttcgatgggattgagatccacggggcgcatggttacctcattgatcagtttttgaaagacgggatcaatgaccgtactgaccaatacggaggatccattgcaaaccgttgtagattcttgaaacaagtagtggaaggtgtagtttcagccataggagctagtaaagttggtgtgagggtatctccagctatagatcacttggacgcaactgattctaacccattatcactcgggctagccgtggttgatatgctcaataagttacaagatgttaatggcttgaagctcgcttaccttcacgttacacaacctcgctaccacgcctatgggcaaacagagtcgggaaggcaagggagtgatgaggaagaagctaagctaatgaagagcttgagaatggcttataaaggaacctttatgtctagtggaggattcaataaggaactaggcatgcaagctgttcaacaaggtgatgctgatttggtttcatatggcaggctttttatcgcaaacccggatttggtttcgcggttcaagattgatggagagttgaataaatataatcggaagacgttttacactcaagatccagttgttggctacacggattatcctttcttggctccttcttcccgcctctgagtttgataatcggaggagaaaatgtattgatgttgtataaagacaatatattaatatgtaaaatgacaatgttattgttatccacttaatgaatagtcatgtatcttattgttt

SEQ ID NO: 4150 - protein, 412 aa, Arabidopsis thaliana
  peptide (1)..(412): Ceres Seq. ID no. 13491948
  misc_feature (32)..(384): Pfam Name: Pfam Description:  NADH:flavin oxidoreductase / NADH oxidase family
  misc_feature (22)..(412): NCBI GI NO: 6707797 NR Description: 12-oxo-phytodienoate reductase
  misc_feature (22)..(412): NCBI GI NO: 5059115 NR Description: OPDA-reductase homolog [Arabidopsis thaliana]
  misc_feature (22)..(412): NCBI GI NO: 10242314 NR Description: 12-oxo-phytodienoate reductase
  misc_feature (22)..(412): NCBI GI NO: 7688991 NR Description: 12-oxo-phytodienoate reductase
  misc_feature (22)..(412): NCBI GI NO: 15225045 NR Description: 12-oxophytodienoate reductase (OPR3)(DDE1)
  misc_feature (22)..(406): NCBI GI NO: 12056507 NR Description: 12-oxophytodienoate reductase 3
  misc_feature (29)..(412): NCBI GI NO: 5701740 NR Description: LEDI-5a protein [Lithospermum erythrorhizon]
  misc_feature (24)..(310): NCBI GI NO: 7449902 NR Description: probable 12-oxophytodienoate reductase (EC 1
  misc_feature (284)..(410): NCBI GI NO: 7449902 NR Description: probable 12-oxophytodienoate reductase (EC 1
  misc_feature (33)..(406): NCBI GI NO: 23495288 NR Description: 12-oxophytodienoic acid reductase [Oryza sativa]
HNNNTSTRIFYFRITKPIGGDMTAAQGNSNETLFSSYKMGRFDLSHRVVLAPMTRCRALNGVPNAALAEYYAQRTTPGGFLISEGTMVSPGSAGFPHVPGIYSDEQVEAWKQVVEAVHAKGGFIFCQLWHVGRASHAVYQPNGGSPISSTNKPISENRWRVLLPDGSHVKYPKPRALEASEIPRVVEDYCLSALNAIRAGFDGIEIHGAHGYLIDQFLKDGINDRTDQYGGSIANRCRFLKQVVEGVVSAIGASKVGVRVSPAIDHLDATDSNPLSLGLAVVDMLNKLQDVNGLKLAYLHVTQPRYHAYGQTESGRQGSDEEEAKLMKSLRMAYKGTFMSSGGFNKELGMQAVQQGDADLVSYGRLFIANPDLVSRFKIDGELNKYNRKTFYTQDPVVGYTDYPFLAPSSRL

SEQ ID NO: 4151 - protein, 391 aa, Arabidopsis thaliana
  peptide (1)..(391): Ceres Seq. ID no. 13491949
  misc_feature (11)..(363): Pfam Name: Pfam Description:  NADH:flavin oxidoreductase / NADH oxidase family
  misc_feature (1)..(391): NCBI GI NO: 6707797 NR Description: 12-oxo-phytodienoate reductase
  misc_feature (1)..(391): NCBI GI NO: 5059115 NR Description: OPDA-reductase homolog [Arabidopsis thaliana]
  misc_feature (1)..(391): NCBI GI NO: 10242314 NR Description: 12-oxo-phytodienoate reductase
  misc_feature (1)..(391): NCBI GI NO: 7688991 NR Description: 12-oxo-phytodienoate reductase
  misc_feature (1)..(391): NCBI GI NO: 15225045 NR Description: 12-oxophytodienoate reductase (OPR3)(DDE1)
  misc_feature (1)..(385): NCBI GI NO: 12056507 NR Description: 12-oxophytodienoate reductase 3
  misc_feature (8)..(391): NCBI GI NO: 5701740 NR Description: LEDI-5a protein [Lithospermum erythrorhizon]
  misc_feature (3)..(289): NCBI GI NO: 7449902 NR Description: probable 12-oxophytodienoate reductase (EC 1
  misc_feature (263)..(389): NCBI GI NO: 7449902 NR Description: probable 12-oxophytodienoate reductase (EC 1
  misc_feature (12)..(385): NCBI GI NO: 23495288 NR Description: 12-oxophytodienoic acid reductase [Oryza sativa]
MTAAQGNSNETLFSSYKMGRFDLSHRVVLAPMTRCRALNGVPNAALAEYYAQRTTPGGFLISEGTMVSPGSAGFPHVPGIYSDEQVEAWKQVVEAVHAKGGFIFCQLWHVGRASHAVYQPNGGSPISSTNKPISENRWRVLLPDGSHVKYPKPRALEASEIPRVVEDYCLSALNAIRAGFDGIEIHGAHGYLIDQFLKDGINDRTDQYGGSIANRCRFLKQVVEGVVSAIGASKVGVRVSPAIDHLDATDSNPLSLGLAVVDMLNKLQDVNGLKLAYLHVTQPRYHAYGQTESGRQGSDEEEAKLMKSLRMAYKGTFMSSGGFNKELGMQAVQQGDADLVSYGRLFIANPDLVSRFKIDGELNKYNRKTFYTQDPVVGYTDYPFLAPSSRL

SEQ ID NO: 4152 - protein, 374 aa, Arabidopsis thaliana
  peptide (1)..(374): Ceres Seq. ID no. 13491950
  misc_feature (1)..(346): Pfam Name: Pfam Description:  NADH:flavin oxidoreductase / NADH oxidase family
  misc_feature (1)..(374): NCBI GI NO: 6707797 NR Description: 12-oxo-phytodienoate reductase
  misc_feature (1)..(374): NCBI GI NO: 5059115 NR Description: OPDA-reductase homolog [Arabidopsis thaliana]
  misc_feature (1)..(374): NCBI GI NO: 10242314 NR Description: 12-oxo-phytodienoate reductase
  misc_feature (1)..(374): NCBI GI NO: 7688991 NR Description: 12-oxo-phytodienoate reductase
  misc_feature (1)..(374): NCBI GI NO: 15225045 NR Description: 12-oxophytodienoate reductase (OPR3)(DDE1)
  misc_feature (1)..(368): NCBI GI NO: 12056507 NR Description: 12-oxophytodienoate reductase 3
  misc_feature (1)..(374): NCBI GI NO: 5701740 NR Description: LEDI-5a protein [Lithospermum erythrorhizon]
  misc_feature (1)..(272): NCBI GI NO: 7449902 NR Description: probable 12-oxophytodienoate reductase (EC 1
  misc_feature (246)..(372): NCBI GI NO: 7449902 NR Description: probable 12-oxophytodienoate reductase (EC 1
  misc_feature (1)..(368): NCBI GI NO: 23495288 NR Description: 12-oxophytodienoic acid reductase [Oryza sativa]
MGRFDLSHRVVLAPMTRCRALNGVPNAALAEYYAQRTTPGGFLISEGTMVSPGSAGFPHVPGIYSDEQVEAWKQVVEAVHAKGGFIFCQLWHVGRASHAVYQPNGGSPISSTNKPISENRWRVLLPDGSHVKYPKPRALEASEIPRVVEDYCLSALNAIRAGFDGIEIHGAHGYLIDQFLKDGINDRTDQYGGSIANRCRFLKQVVEGVVSAIGASKVGVRVSPAIDHLDATDSNPLSLGLAVVDMLNKLQDVNGLKLAYLHVTQPRYHAYGQTESGRQGSDEEEAKLMKSLRMAYKGTFMSSGGFNKELGMQAVQQGDADLVSYGRLFIANPDLVSRFKIDGELNKYNRKTFYTQDPVVGYTDYPFLAPSSRL

SEQ ID NO: 4153 - DNA, 1297 bp, Arabidopsis thaliana
  misc_feature (1)..(1297): Ceres Seq. ID no. 13488371
gagagagcttgtgtgaagtgacgaagaagacgaagaagacgaagaagaagaacattaatggcggctactccgtggtactttgtcgcagtacttctcaccattcttaccagctctcaggggattctaacaactctttctcaaagtgatggaggttataagtatgattatgctactgttccctttcttgctgaagtttttaagctgatcatttctggtttatttctctggagagagatgcggacatcttcctcaacaacttcaaggattactacggattggaagagtgtgcgattatttgttattccgtctcttatttatctgatacataacaatgtgcagtttgctacattgacttatgtggatacgtccacttatcagataatgggtaatttgaagattgtgaccactggcatactgtttaggttatttttgaaaaggaaactatctaaacttcagtggatggcaattggtcttttagctgttggaacaactaccagccaggttaagggttgtggagaagcttcttgtgattctttattcacggcaccaatacaaggttatttgctgggcatcctctcagctggtttgtccgcgctagctggaatctacacagagtttctgatgaagagaaacaatgacaccttatactggcaaaacttgcagttatatacgtttggttcacttttcaacgtagctcgacttatagcagatgatttcagacacgggtttgaaaagggtccttggtggcaacgtatctttgatgggtacagcatcaccacttggctggtagttctgaatctcggatccactggcttactggtctcgtggttaatgaagtatgcagacaacatcgtcaaggtttattctacatcaatggcgatgctacttactatggttgcatccatatacctttttagcttcaaaccgacactgcagcttttcttgggtattgtcatatgcatcatgtcactccatatgtactttgctcctccacacacgctcgtggacttgcccgtgacaaacgaagcacatgccaagaccttaaagcaagttgtcgtagaagaaaagacagattcttgaattaaattggacgaaaaggttagttgaacttatagaaaacaatttgctaagtaaatgaacacaatgatcttcttctagcttcatttctattagagaatgagaaacttggatgtgagttcttttgaagaaatgatctgatagtttgtttattcacgtaccgattctattctttgtaaatgtacatcgaggtgcctagaaatagtaaattcgattgttg

SEQ ID NO: 4154 - protein, 340 aa, Arabidopsis thaliana
  peptide (1)..(340): Ceres Seq. ID no. 13488372
  misc_feature (61)..(299): Pfam Name: Pfam Description:  Nucleotide-sugar transporter
  misc_feature (1)..(340): NCBI GI NO: 18422134 NR Description: CMP-sialic acid transporter-related protein
  misc_feature (20)..(340): NCBI GI NO: 10177360 NR Description: CMP-sialic acid transporter-like protein
  misc_feature (9)..(308): NCBI GI NO: 34393556 NR Description: putative CMP-sialic acid transporter
  misc_feature (22)..(340): NCBI GI NO: 34907666 NR Description: putative transporter-like protein
  misc_feature (8)..(311): NCBI GI NO: 26450627 NR Description: unknown protein [Arabidopsis thaliana]
  misc_feature (15)..(311): NCBI GI NO: 18411150 NR Description: transporter-related protein [Arabidopsis thaliana]
  misc_feature (15)..(311): NCBI GI NO: 38345234 NR Description: OSJNBa0084K20.12
  misc_feature (7)..(311): NCBI GI NO: 6755558 NR Description: solute carrier family 35
  misc_feature (31)..(311): NCBI GI NO: 22204205 NR Description: SI:bZ30I22
  misc_feature (1)..(312): NCBI GI NO: 3218521 NR Description: /prediction=
MAATPWYFVAVLLTILTSSQGILTTLSQSDGGYKYDYATVPFLAEVFKLIISGLFLWREMRTSSSTTSRITTDWKSVRLFVIPSLIYLIHNNVQFATLTYVDTSTYQIMGNLKIVTTGILFRLFLKRKLSKLQWMAIGLLAVGTTTSQVKGCGEASCDSLFTAPIQGYLLGILSAGLSALAGIYTEFLMKRNNDTLYWQNLQLYTFGSLFNVARLIADDFRHGFEKGPWWQRIFDGYSITTWLVVLNLGSTGLLVSWLMKYADNIVKVYSTSMAMLLTMVASIYLFSFKPTLQLFLGIVICIMSLHMYFAPPHTLVDLPVTNEAHAKTLKQVVVEEKTDS

SEQ ID NO: 4155 - protein, 281 aa, Arabidopsis thaliana
  peptide (1)..(281): Ceres Seq. ID no. 13488373
  misc_feature (2)..(240): Pfam Name: Pfam Description:  Nucleotide-sugar transporter
  misc_feature (1)..(281): NCBI GI NO: 18422134 NR Description: CMP-sialic acid transporter-related protein
  misc_feature (1)..(281): NCBI GI NO: 10177360 NR Description: CMP-sialic acid transporter-like protein
  misc_feature (1)..(249): NCBI GI NO: 34393556 NR Description: putative CMP-sialic acid transporter
  misc_feature (1)..(281): NCBI GI NO: 34907666 NR Description: putative transporter-like protein
  misc_feature (1)..(252): NCBI GI NO: 26450627 NR Description: unknown protein [Arabidopsis thaliana]
  misc_feature (1)..(252): NCBI GI NO: 18411150 NR Description: transporter-related protein [Arabidopsis thaliana]
  misc_feature (1)..(252): NCBI GI NO: 38345234 NR Description: OSJNBa0084K20.12
  misc_feature (1)..(252): NCBI GI NO: 6755558 NR Description: solute carrier family 35
  misc_feature (1)..(252): NCBI GI NO: 22204205 NR Description: SI:bZ30I22
  misc_feature (1)..(253): NCBI GI NO: 3218521 NR Description: /prediction=
MRTSSSTTSRITTDWKSVRLFVIPSLIYLIHNNVQFATLTYVDTSTYQIMGNLKIVTTGILFRLFLKRKLSKLQWMAIGLLAVGTTTSQVKGCGEASCDSLFTAPIQGYLLGILSAGLSALAGIYTEFLMKRNNDTLYWQNLQLYTFGSLFNVARLIADDFRHGFEKGPWWQRIFDGYSITTWLVVLNLGSTGLLVSWLMKYADNIVKVYSTSMAMLLTMVASIYLFSFKPTLQLFLGIVICIMSLHMYFAPPHTLVDLPVTNEAHAKTLKQVVVEEKTDS

SEQ ID NO: 4156 - protein, 232 aa, Arabidopsis thaliana
  peptide (1)..(232): Ceres Seq. ID no. 13488374
  misc_feature (1)..(191): Pfam Name: Pfam Description:  Nucleotide-sugar transporter
  misc_feature (1)..(232): NCBI GI NO: 18422134 NR Description: CMP-sialic acid transporter-related protein
  misc_feature (1)..(232): NCBI GI NO: 10177360 NR Description: CMP-sialic acid transporter-like protein
  misc_feature (1)..(200): NCBI GI NO: 34393556 NR Description: putative CMP-sialic acid transporter
  misc_feature (1)..(232): NCBI GI NO: 34907666 NR Description: putative transporter-like protein
  misc_feature (1)..(203): NCBI GI NO: 26450627 NR Description: unknown protein [Arabidopsis thaliana]
  misc_feature (1)..(203): NCBI GI NO: 18411150 NR Description: transporter-related protein [Arabidopsis thaliana]
  misc_feature (1)..(203): NCBI GI NO: 38345234 NR Description: OSJNBa0084K20.12
  misc_feature (1)..(203): NCBI GI NO: 6755558 NR Description: solute carrier family 35
  misc_feature (1)..(203): NCBI GI NO: 22204205 NR Description: SI:bZ30I22
  misc_feature (1)..(204): NCBI GI NO: 3218521 NR Description: /prediction=
MGNLKIVTTGILFRLFLKRKLSKLQWMAIGLLAVGTTTSQVKGCGEASCDSLFTAPIQGYLLGILSAGLSALAGIYTEFLMKRNNDTLYWQNLQLYTFGSLFNVARLIADDFRHGFEKGPWWQRIFDGYSITTWLVVLNLGSTGLLVSWLMKYADNIVKVYSTSMAMLLTMVASIYLFSFKPTLQLFLGIVICIMSLHMYFAPPHTLVDLPVTNEAHAKTLKQVVVEEKTDS

SEQ ID NO: 4157 - DNA, 1132 bp, Arabidopsis thaliana
  misc_feature (1)..(1132): Ceres Seq. ID no. 13503082
atccactctactcaacatggactcctccaaactctcatctctctctctttgcctcttcctcatttgcattatctatctcccccaacattctctcgcatgcggctcttgcaacccacggaagggcggaaagcactcccctaaagcccctaagctaccggttcctccggtgaccgtccctaagctacccgttcctcctgtgaccatccctaagctacccgttcctccagtgactgtacccaagctacccgttcctccagtgaccgtccccaagctacccgttcctccagtgacagtcccaaagctacccgttcccccagtaactgtccctaagctacccgttcctccggtaaccgtccctaagctacccgttcctccagtaaccgtccctaagctaccccttcctccgatttcagggctacccatacctccagtggtaggtcccaatctgccattgccacctttgccaattgtaggtcctattcttccaccgggaacaaccccaccagccacaggagggaaggactgtcctccaccgccagggagcgtaaagccaccatcagggggcgggaaggcgacatgtccaatagacacgctgaagttaggtgcttgcgtcgacttgttgggaggtttagtaaagatagggcttggggatccagcagttaacaaatgttgtccgttacttaaaggcctcgttgaaatcgaagccgcggcttgtctctgcactaccctcaagctcaaagctcttgacctcaatctttatgtccctgttgctcttcagcttctccttacctgtggcaaaaatccacctccgggctacacttgttccatatgataaactcactccacttataaaggatgctttggagaaaaaagtgagaagagaatggcagagctccaatctttcctgtcttggtttaccaaatacatcatatcaaatcctatccctttgattctttcctctatcgttcccttatgcttgtatcattaattaatgtgtgctttttagattaatgattcttctcttgtattaaagtatgatttgaaatcctttttttttctctatctctttttattgaattgattgaactgcgttcatgatactgtcaaaaagagagaaaaagagtacaatttt

SEQ ID NO: 4158 - protein, 276 aa, Arabidopsis thaliana
  peptide (1)..(276): Ceres Seq. ID no. 13503083
  misc_feature (193)..(274): Pfam Name: Pfam Description:  Protease inhibitor/seed storage/LTP family
  misc_feature (49)..(276): NCBI GI NO: 18396941 NR Description: protease inhibitor/seed storage/lipid transfer
  misc_feature (6)..(204): NCBI GI NO: 24417264 NR Description: unknown [Arabidopsis thaliana]
  misc_feature (6)..(248): NCBI GI NO: 18396941 NR Description: protease inhibitor/seed storage/lipid transfer
  misc_feature (45)..(274): NCBI GI NO: 7446482 NR Description: probable cell wall-plasma membrane linker protein PRPprecursor - rape
  misc_feature (44)..(274): NCBI GI NO: 7446483 NR Description: probable cell wall protein - garden pea
  misc_feature (43)..(274): NCBI GI NO: 1076501 NR Description: cell wall protein - alfalfa
  misc_feature (89)..(276): NCBI GI NO: 17154773 NR Description: extensin-like protein [Cucumis sativus]
  misc_feature (26)..(274): NCBI GI NO: 7446486 NR Description: hypothetical protein - carrot
  misc_feature (38)..(274): NCBI GI NO: 19521 NR Description: proline rich protein [Lycopersicon esculentum]
  misc_feature (38)..(274): NCBI GI NO: 1709767 NR Description: 36.4 KD PROLINE-RICH PROTEIN
STLLNMDSSKLSSLSLCLFLICIIYLPQHSLACGSCNPRKGGKHSPKAPKLPVPPVTVPKLPVPPVTIPKLPVPPVTVPKLPVPPVTVPKLPVPPVTVPKLPVPPVTVPKLPVPPVTVPKLPVPPVTVPKLPLPPISGLPIPPVVGPNLPLPPLPIVGPILPPGTTPPATGGKDCPPPPGSVKPPSGGGKATCPIDTLKLGACVDLLGGLVKIGLGDPAVNKCCPLLKGLVEIEAAACLCTTLKLKALDLNLYVPVALQLLLTCGKNPPPGYTCSI

SEQ ID NO: 4159 - protein, 271 aa, Arabidopsis thaliana
  peptide (1)..(271): Ceres Seq. ID no. 13503084
  misc_feature (188)..(269): Pfam Name: Pfam Description:  Protease inhibitor/seed storage/LTP family
  misc_feature (44)..(271): NCBI GI NO: 18396941 NR Description: protease inhibitor/seed storage/lipid transfer
  misc_feature (1)..(199): NCBI GI NO: 24417264 NR Description: unknown [Arabidopsis thaliana]
  misc_feature (1)..(243): NCBI GI NO: 18396941 NR Description: protease inhibitor/seed storage/lipid transfer
  misc_feature (40)..(269): NCBI GI NO: 7446482 NR Description: probable cell wall-plasma membrane linker protein PRPprecursor - rape
  misc_feature (39)..(269): NCBI GI NO: 7446483 NR Description: probable cell wall protein - garden pea
  misc_feature (38)..(269): NCBI GI NO: 1076501 NR Description: cell wall protein - alfalfa
  misc_feature (84)..(271): NCBI GI NO: 17154773 NR Description: extensin-like protein [Cucumis sativus]
  misc_feature (21)..(269): NCBI GI NO: 7446486 NR Description: hypothetical protein - carrot
  misc_feature (33)..(269): NCBI GI NO: 19521 NR Description: proline rich protein [Lycopersicon esculentum]
  misc_feature (33)..(269): NCBI GI NO: 1709767 NR Description: 36.4 KD PROLINE-RICH PROTEIN
MDSSKLSSLSLCLFLICIIYLPQHSLACGSCNPRKGGKHSPKAPKLPVPPVTVPKLPVPPVTIPKLPVPPVTVPKLPVPPVTVPKLPVPPVTVPKLPVPPVTVPKLPVPPVTVPKLPVPPVTVPKLPLPPISGLPIPPVVGPNLPLPPLPIVGPILPPGTTPPATGGKDCPPPPGSVKPPSGGGKATCPIDTLKLGACVDLLGGLVKIGLGDPAVNKCCPLLKGLVEIEAAACLCTTLKLKALDLNLYVPVALQLLLTCGKNPPPGYTCSI

SEQ ID NO: 4160 - DNA, 679 bp, Arabidopsis thaliana
  misc_feature (1)..(679): Ceres Seq. ID no. 12326166
cttttttaatccctttgtttctctgtggtattcaacaaatttgtctcgaatttatagagctcgaagcttcaaggaagttataatggctagtgaagatgaatcgattgaacaaaaagctgctgctcgtaaagaggcacttaaagctctaagggcagctcaggaactgtctgagaccaagagaggatgaagctgtcgaagaagatggtccagccatgaagtttagaaactatgttccccaagctaaggagcttcaggatggtaaactagcgccaccagagctacccaaattcgaagatccgatcgttgcacttccacctgctgtagagaagaaagaggacccatttgttaacatcgctccaaagaagccaaactgggacctccgaagagatgtgcaaaagaagcttgataagctcgaaaggcggactcaaaaggcaatgcataaactcatggaggagcaagagaaagaacgtgagatggctgaagctgatggtaacaccatagaaagttgaaacccaacgacgtcatcaaagaaagccaccactgaacagtatattctactcgattttgtttaactgttaaagcattcgaagtgagtagaccatgtaaaatcctacggccattggcatagacatagtaggtttatcttcttgtgtgaatcaaagaaagtcgcaatttattt

SEQ ID NO: 4161 - protein, 98 aa, Arabidopsis thaliana
  peptide (1)..(98): Ceres Seq. ID no. 12326167
  misc_feature (1)..(98): NCBI GI NO: 18397111 NR Description: expressed protein; protein id: At3g05070
  misc_feature (1)..(95): NCBI GI NO: 34866382 NR Description: similar to hypothetical protein MGC23918
  misc_feature (1)..(87): NCBI GI NO: 21389497 NR Description: hypothetical protein MGC23918 [Homo sapiens]
  misc_feature (1)..(87): NCBI GI NO: 21756313 NR Description: unnamed protein product [Homo sapiens]
  misc_feature (1)..(87): NCBI GI NO: 20072383 NR Description: Similar to RIKEN cDNA 2700094L05 gene
  misc_feature (1)..(90): NCBI GI NO: 21430888 NR Description: SD23244p [Drosophila melanogaster]
  misc_feature (1)..(90): NCBI GI NO: 24651238 NR Description: CG15525-PA [Drosophila melanogaster]
  misc_feature (1)..(95): NCBI GI NO: 33469009 NR Description: RIKEN cDNA 2700094L05 [Mus musculus]
  misc_feature (1)..(95): NCBI GI NO: 20874062 NR Description: similar to hypothetical protein MGC23918
  misc_feature (41)..(98): NCBI GI NO: 31230214 NR Description: ENSANGP00000019573 [Anopheles gambiae]
MKFRNYVPQAKELQDGKLAPPELPKFEDPIVALPPAVEKKEDPFVNIAPKKPNWDLRRDVQKKLDKLERRTQKAMHKLMEEQEKEREMAEADGNTIES

SEQ ID NO: 4162 - protein, 61 aa, Arabidopsis thaliana
  peptide (1)..(61): Ceres Seq. ID no. 12326168
  misc_feature (28)..(59): NCBI GI NO: 18397111 NR Description: expressed protein; protein id: At3g05070
FFNPFVSLWYSTNLSRIYRARSFKEVIMASEDESIEQKAAARKEALKALRAAQELSETKRG

SEQ ID NO: 4163 - DNA, 1642 bp, Arabidopsis thaliana
  misc_feature (1)..(1642): Ceres Seq. ID no. 13645827
gtatttgttcttgcttgctaaagtttttttgctctgtacggtgacaagaccagagagatgaagttattgagcaatagtctaatgttccttcctctgctggctttggctttaaccgcagtttcgtcgcttaaatacagcagaaatgacttccctccaggctttgtctttggctctggcacatcagcttatcaggtggaaggagctgctgacgaagatgggagaactcctagcatttgggatgtttttgctcatgccggacactccggagtagcagctggaaatgttgcatgtgaccagtatcacaaatacaaggaagatgtgaagctcatggcagacatgggattggaggcttacagattctctatatcctggtcaaggcttttaccaagtggaagaggaccaatcaatcccaaggggctacaatactacaacaatcttattgatgaattgatcactcatggaatccagccacatgttacattgcaccactttgatctcccacaggccttagaagatgagtatggaggttggctcagccaagaaatcgtgagagacttcacagcttatgcagatacttgcttcaaggagtttggagatagagtgtcacattggactactataaacgaggtcaatgtgtttgcccttggagggtatgaccagggaataacaccgcctgctcgatgctctcctccatttggacttaattgtaccaaaggaaactcttccattgagccttacattgccgtacacaacatgttgctcgcacacgcttctgcaacaatcttatacaagcaacagtacaaggcaacagctagagtgaatgacttctatattggttggattttacatccgttggtgtttggtgattatcctgagacgatgaagaccaatgttgggtctagattgccagcttttacagaggaggagtcagaacaagttaaaggcgcatttgatttcgttggagtgataaattacatggcgctttatgtcaaagacaactcttcctctctgaaacctaatctccaggatttcaacacagatatagccgtggaaatgaccttggttggaaacacatcaatcgagaatgagtatgcaaatacaccatggagtctgcaacagatacttttgtatgtcaaagaaacttatggaaaccctcctgtctatatcctagagaatggacaaatgactcctcacagctcatcacttgtggacacaacaagggtgaagtatctgagctcgtacattaaagcagtgcttcattcactcaggaaaggatcggacgtaaaagggtattttcagtggtcgttgatggatgtgtttgagctatttggtgggtacgagaggagctttggattattgtacgtggacttcaaggatccttctcttaagaggagccctaaactctctgctcactggtactcttccttcctcaagggaacactgcaccatccatcatatgcttcgtcttgatcatttgatttcaatggttataatgcttagttgtcggaaatgcaaaccattactatgttttatttttgctaaataaaatcattactatgtttttttctttatcatctttacaataaatcaagatataaacattgtatgttagaaaaagccaaataggtattagtctgttatt

SEQ ID NO: 4164 - protein, 470 aa, Arabidopsis thaliana
  peptide (1)..(470): Ceres Seq. ID no. 13645828
  misc_feature (1)..(470): NCBI GI NO: 18379020 NR Description: glycosyl hydrolase family 1 [Arabidopsis thaliana]
  misc_feature (1)..(470): NCBI GI NO: 30678403 NR Description: glycosyl hydrolase family 1 [Arabidopsis thaliana]
  misc_feature (1)..(249): NCBI GI NO: 25289480 NR Description: F22D16.15 protein - Arabidopsis thaliana
  misc_feature (249)..(469): NCBI GI NO: 25289480 NR Description: F22D16.15 protein - Arabidopsis thaliana
  misc_feature (4)..(249): NCBI GI NO: 22328869 NR Description: glycosyl hydrolase family 1 [Arabidopsis thaliana]
  misc_feature (250)..(460): NCBI GI NO: 22328869 NR Description: glycosyl hydrolase family 1 [Arabidopsis thaliana]
  misc_feature (1)..(253): NCBI GI NO: 18417073 NR Description: glycosyl hydrolase family 1 [Arabidopsis thaliana]
  misc_feature (250)..(462): NCBI GI NO: 18417073 NR Description: glycosyl hydrolase family 1 [Arabidopsis thaliana]
  misc_feature (9)..(249): NCBI GI NO: 22330338 NR Description: glycosyl hydrolase family 1 [Arabidopsis thaliana]
  misc_feature (245)..(460): NCBI GI NO: 22330338 NR Description: glycosyl hydrolase family 1 [Arabidopsis thaliana]
MKLLSNSLMFLPLLALALTAVSSLKYSRNDFPPGFVFGSGTSAYQVEGAADEDGRTPSIWDVFAHAGHSGVAAGNVACDQYHKYKEDVKLMADMGLEAYRFSISWSRLLPSGRGPINPKGLQYYNNLIDELITHGIQPHVTLHHFDLPQALEDEYGGWLSQEIVRDFTAYADTCFKEFGDRVSHWTTINEVNVFALGGYDQGITPPARCSPPFGLNCTKGNSSIEPYIAVHNMLLAHASATILYKQQYKATARVNDFYIGWILHPLVFGDYPETMKTNVGSRLPAFTEEESEQVKGAFDFVGVINYMALYVKDNSSSLKPNLQDFNTDIAVEMTLVGNTSIENEYANTPWSLQQILLYVKETYGNPPVYILENGQMTPHSSSLVDTTRVKYLSSYIKAVLHSLRKGSDVKGYFQWSLMDVFELFGGYERSFGLLYVDFKDPSLKRSPKLSAHWYSSFLKGTLHHPSYASS

SEQ ID NO: 4165 - protein, 462 aa, Arabidopsis thaliana
  peptide (1)..(462): Ceres Seq. ID no. 13645829
  misc_feature (1)..(462): NCBI GI NO: 18379020 NR Description: glycosyl hydrolase family 1 [Arabidopsis thaliana]
  misc_feature (1)..(462): NCBI GI NO: 30678403 NR Description: glycosyl hydrolase family 1 [Arabidopsis thaliana]
  misc_feature (1)..(241): NCBI GI NO: 25289480 NR Description: F22D16.15 protein - Arabidopsis thaliana
  misc_feature (241)..(461): NCBI GI NO: 25289480 NR Description: F22D16.15 protein - Arabidopsis thaliana
  misc_feature (1)..(241): NCBI GI NO: 22328869 NR Description: glycosyl hydrolase family 1 [Arabidopsis thaliana]
  misc_feature (242)..(452): NCBI GI NO: 22328869 NR Description: glycosyl hydrolase family 1 [Arabidopsis thaliana]
  misc_feature (1)..(245): NCBI GI NO: 18417073 NR Description: glycosyl hydrolase family 1 [Arabidopsis thaliana]
  misc_feature (242)..(454): NCBI GI NO: 18417073 NR Description: glycosyl hydrolase family 1 [Arabidopsis thaliana]
  misc_feature (1)..(241): NCBI GI NO: 22330338 NR Description: glycosyl hydrolase family 1 [Arabidopsis thaliana]
  misc_feature (237)..(452): NCBI GI NO: 22330338 NR Description: glycosyl hydrolase family 1 [Arabidopsis thaliana]
MFLPLLALALTAVSSLKYSRNDFPPGFVFGSGTSAYQVEGAADEDGRTPSIWDVFAHAGHSGVAAGNVACDQYHKYKEDVKLMADMGLEAYRFSISWSRLLPSGRGPINPKGLQYYNNLIDELITHGIQPHVTLHHFDLPQALEDEYGGWLSQEIVRDFTAYADTCFKEFGDRVSHWTTINEVNVFALGGYDQGITPPARCSPPFGLNCTKGNSSIEPYIAVHNMLLAHASATILYKQQYKATARVNDFYIGWILHPLVFGDYPETMKTNVGSRLPAFTEEESEQVKGAFDFVGVINYMALYVKDNSSSLKPNLQDFNTDIAVEMTLVGNTSIENEYANTPWSLQQILLYVKETYGNPPVYILENGQMTPHSSSLVDTTRVKYLSSYIKAVLHSLRKGSDVKGYFQWSLMDVFELFGGYERSFGLLYVDFKDPSLKRSPKLSAHWYSSFLKGTLHHPSYASS

SEQ ID NO: 4166 - protein, 380 aa, Arabidopsis thaliana
  peptide (1)..(380): Ceres Seq. ID no. 13645830
  misc_feature (1)..(380): NCBI GI NO: 18379020 NR Description: glycosyl hydrolase family 1 [Arabidopsis thaliana]
  misc_feature (1)..(380): NCBI GI NO: 30678403 NR Description: glycosyl hydrolase family 1 [Arabidopsis thaliana]
  misc_feature (1)..(159): NCBI GI NO: 25289480 NR Description: F22D16.15 protein - Arabidopsis thaliana
  misc_feature (159)..(379): NCBI GI NO: 25289480 NR Description: F22D16.15 protein - Arabidopsis thaliana
  misc_feature (1)..(159): NCBI GI NO: 22328869 NR Description: glycosyl hydrolase family 1 [Arabidopsis thaliana]
  misc_feature (160)..(370): NCBI GI NO: 22328869 NR Description: glycosyl hydrolase family 1 [Arabidopsis thaliana]
  misc_feature (1)..(163): NCBI GI NO: 18417073 NR Description: glycosyl hydrolase family 1 [Arabidopsis thaliana]
  misc_feature (160)..(372): NCBI GI NO: 18417073 NR Description: glycosyl hydrolase family 1 [Arabidopsis thaliana]
  misc_feature (1)..(159): NCBI GI NO: 22330338 NR Description: glycosyl hydrolase family 1 [Arabidopsis thaliana]
  misc_feature (155)..(370): NCBI GI NO: 22330338 NR Description: glycosyl hydrolase family 1 [Arabidopsis thaliana]
MADMGLEAYRFSISWSRLLPSGRGPINPKGLQYYNNLIDELITHGIQPHVTLHHFDLPQALEDEYGGWLSQEIVRDFTAYADTCFKEFGDRVSHWTTINEVNVFALGGYDQGITPPARCSPPFGLNCTKGNSSIEPYIAVHNMLLAHASATILYKQQYKATARVNDFYIGWILHPLVFGDYPETMKTNVGSRLPAFTEEESEQVKGAFDFVGVINYMALYVKDNSSSLKPNLQDFNTDIAVEMTLVGNTSIENEYANTPWSLQQILLYVKETYGNPPVYILENGQMTPHSSSLVDTTRVKYLSSYIKAVLHSLRKGSDVKGYFQWSLMDVFELFGGYERSFGLLYVDFKDPSLKRSPKLSAHWYSSFLKGTLHHPSYASS

SEQ ID NO: 4167 - DNA, 1157 bp, Arabidopsis thaliana
  misc_feature (1)..(1157): Ceres Seq. ID no. 12371955
atccttaaagatctcgttacggtttttgtcggaattgtttcgatttgttgtgtttctcaataagctctcgcttgtcagagaaacaccggcaacgccgttaaaatagtcaccggagaccatttagcatcgtagagttcgccttttatggcgttcacgtggggatctgctctccggatttctgttctccttatccttgtagctgcaattgtcttagcttgttattttctccctgttgagaagctattgaaggattttttgttatgggttgaacaagatctagggccttggggaccttttgccctagctgttgcgtacattcctcttacagttttggctgttcctgcctcggttctcacgctcggtggtggctacctttttgggctgccaattggttttgtggcggactcagtcggtgctacacttggctcaggagctgcatttctacttggccgtacgattggaaaaccttttgtagttgcaaaattaaaggattatcctcagtttcagtcagtggcactcgccattgagaaatccggcttcaagatatgcttgctgctccggcttgctcctcttctcccattcagcatgttgaactacctcttatctgtcacgccaattcggctaggtccatacttgctttcttcgtggttagggatgatgccaataacacttgcgttagtgtatgttggaacaactctaaaagacctttctgatgtaactcacaagtggagcgagttctcgccaggtcgctgggcgttcttaatttcgagccttgtaatatccgtgatattaatggtgtgtgttacaaaggtggcgaaagacgctctaagaaaagctttagcagagcacggaggagacataaacgaagcggttgcagccttaccggagctgaccgttactgatgatacttcgacggatttaagtgagcctctattgataaagatagatcctcaacaacctcaggatcaagtaaaccatagtcattaaaattaagatgatgaatacttactttgtataatctttattttaacatacaaagcttagttttcttggtttgtatgataataacatagattaaaaattatttttaaaaagttatttttcttagtaactttgagatgtaattattagttcacagggatttaaaatattggatg

SEQ ID NO: 4168 - protein, 280 aa, Arabidopsis thaliana
  peptide (1)..(280): Ceres Seq. ID no. 12371956
  misc_feature (1)..(280): NCBI GI NO: 30687125 NR Description: expressed protein [Arabidopsis thaliana]
  misc_feature (1)..(268): NCBI GI NO: 23617115 NR Description: contains EST AU173803
  misc_feature (1)..(269): NCBI GI NO: 40823094 NR Description: At1g03260 [Arabidopsis thaliana]
  misc_feature (1)..(269): NCBI GI NO: 30678508 NR Description: expressed protein [Arabidopsis thaliana]
  misc_feature (1)..(269): NCBI GI NO: 25406732 NR Description: protein F15K9.14 [imported] - Arabidopsis thaliana
  misc_feature (11)..(233): NCBI GI NO: 23042280 NR Description: hypothetical protein
  misc_feature (7)..(233): NCBI GI NO: 23128176 NR Description: hypothetical protein [Nostoc punctiforme]
  misc_feature (5)..(228): NCBI GI NO: 32476849 NR Description: conserved hypothetical protein [Pirellula sp.]
  misc_feature (26)..(232): NCBI GI NO: 23128177 NR Description: hypothetical protein [Nostoc punctiforme]
  misc_feature (10)..(236): NCBI GI NO: 17232678 NR Description: hypothetical protein [Nostoc sp. PCC 7120]
MAFTWGSALRISVLLILVAAIVLACYFLPVEKLLKDFLLWVEQDLGPWGPFALAVAYIPLTVLAVPASVLTLGGGYLFGLPIGFVADSVGATLGSGAAFLLGRTIGKPFVVAKLKDYPQFQSVALAIEKSGFKICLLLRLAPLLPFSMLNYLLSVTPIRLGPYLLSSWLGMMPITLALVYVGTTLKDLSDVTHKWSEFSPGRWAFLISSLVISVILMVCVTKVAKDALRKALAEHGGDINEAVAALPELTVTDDTSTDLSEPLLIKIDPQQPQDQVNHSH

SEQ ID NO: 4169 - DNA, 1133 bp, Arabidopsis thaliana
  misc_feature (1)..(1133): Ceres Seq. ID no. 12336045
atgtttcttctccttctatcttctccctccctctcaaattttaatctccagttttttttttttttttttttgactcagagatcaacaaaacctagtttttgaatttgtttcaatttttctcaaattactctgtttttgagatctctgttttcgttaaattatgtctttgaggtcagaatcttcaacggcagagaagataacagaggatccggtgacgtataagacagcacaaagcagcgtgacgtgcatctaccaagcacatatggttggattctggagaaacgttagggttctatggtctaaaaatctcatgaaccattccttaaccgtgatggtcactagcgtacaaggcgatatgaattactgttgcaaggttgatcttaagccatggcacttttggtacaagaaaggttacaaatcgtttgaggtcgaaggaaaccaagtagatgtctattgggattttaggtctgctaaattcaacggcgggcctgagccgagctccgatttttacgtggcgcttgtatccgaggaagaggttgttttgttgttgggtgatcacaagaagaaagcttttaagagaactaaatctagaccttccttggttgacgctgccttgttctacaagaaagagaatgtgtttgggaagaagattttttcgactagggctaagttccatgataggaagagagagcatgagatcgtagtggagagctctaccggggcgaaagaaccagagatgtggattagcgtagatgggatcgttttggttcaggtgagaaatctgcagtggaaatttagagggaaccagactgttttggttgataaagaacctgttcaagtgttttgggatgtgtatgattggttgttcagcacccccggtacggggcacggcttgttcatctttaaaccggagagcggtgaaagcgaaacgagcaacgaaaccaagaattgcagtgcttcttcttcttcttcttcgtcggagttttgtctctttctttatgcttggaaattggagtaagtctaaatgttttcaatccaaaagcttgcattgatttttttgcctgactaaattcacattcaaaaatcaatcttagcgtgtgaccgactcttgataattttgagttgtcaaattc

SEQ ID NO: 4170 - protein, 285 aa, Arabidopsis thaliana
  peptide (1)..(285): Ceres Seq. ID no. 12336046
  misc_feature (20)..(284): Pfam Name: DUF868 Pfam Description: Plant protein of unknown function
  misc_feature (1)..(285): NCBI GI NO: 15235452 NR Description: putative protein; protein id: At4g12690
  misc_feature (4)..(259): NCBI GI NO: 15228105 NR Description: hypothetical protein; protein id: At2g04220.1
  misc_feature (1)..(250): NCBI GI NO: 15238927 NR Description: putative protein; protein id: At5g48270.1
  misc_feature (251)..(285): NCBI GI NO: 15238927 NR Description: putative protein; protein id: At5g48270.1
  misc_feature (58)..(259): NCBI GI NO: 25334990 NR Description: hypothetical protein At2g04220
  misc_feature (70)..(285): NCBI GI NO: 20804936 NR Description: P0456E05.14
  misc_feature (1)..(65): NCBI GI NO: 20804936 NR Description: P0456E05.14
  misc_feature (25)..(283): NCBI GI NO: 22331055 NR Description: hypothetical protein; protein id: At3g13229.1
  misc_feature (21)..(285): NCBI GI NO: 15241702 NR Description: putative protein; protein id: At5g28150
  misc_feature (21)..(285): NCBI GI NO: 18397034 NR Description: expressed protein; protein id: At3g04860
MSLRSESSTAEKITEDPVTYKTAQSSVTCIYQAHMVGFWRNVRVLWSKNLMNHSLTVMVTSVQGDMNYCCKVDLKPWHFWYKKGYKSFEVEGNQVDVYWDFRSAKFNGGPEPSSDFYVALVSEEEVVLLLGDHKKKAFKRTKSRPSLVDAALFYKKENVFGKKIFSTRAKFHDRKREHEIVVESSTGAKEPEMWISVDGIVLVQVRNLQWKFRGNQTVLVDKEPVQVFWDVYDWLFSTPGTGHGLFIFKPESGESETSNETKNCSASSSSSSSEFCLFLYAWKLE

SEQ ID NO: 4171 - protein, 251 aa, Arabidopsis thaliana
  peptide (1)..(251): Ceres Seq. ID no. 12336047
  misc_feature (1)..(250): Pfam Name: DUF868 Pfam Description: Plant protein of unknown function
  misc_feature (1)..(251): NCBI GI NO: 15235452 NR Description: putative protein; protein id: At4g12690
  misc_feature (1)..(225): NCBI GI NO: 15228105 NR Description: hypothetical protein; protein id: At2g04220.1
  misc_feature (1)..(216): NCBI GI NO: 15238927 NR Description: putative protein; protein id: At5g48270.1
  misc_feature (217)..(251): NCBI GI NO: 15238927 NR Description: putative protein; protein id: At5g48270.1
  misc_feature (24)..(225): NCBI GI NO: 25334990 NR Description: hypothetical protein At2g04220
  misc_feature (36)..(251): NCBI GI NO: 20804936 NR Description: P0456E05.14
  misc_feature (1)..(31): NCBI GI NO: 20804936 NR Description: P0456E05.14
  misc_feature (1)..(249): NCBI GI NO: 22331055 NR Description: hypothetical protein; protein id: At3g13229.1
  misc_feature (1)..(251): NCBI GI NO: 15241702 NR Description: putative protein; protein id: At5g28150
  misc_feature (1)..(251): NCBI GI NO: 18397034 NR Description: expressed protein; protein id: At3g04860
MVGFWRNVRVLWSKNLMNHSLTVMVTSVQGDMNYCCKVDLKPWHFWYKKGYKSFEVEGNQVDVYWDFRSAKFNGGPEPSSDFYVALVSEEEVVLLLGDHKKKAFKRTKSRPSLVDAALFYKKENVFGKKIFSTRAKFHDRKREHEIVVESSTGAKEPEMWISVDGIVLVQVRNLQWKFRGNQTVLVDKEPVQVFWDVYDWLFSTPGTGHGLFIFKPESGESETSNETKNCSASSSSSSSEFCLFLYAWKLE

SEQ ID NO: 4172 - protein, 235 aa, Arabidopsis thaliana
  peptide (1)..(235): Ceres Seq. ID no. 12336048
  misc_feature (1)..(234): Pfam Name: DUF868 Pfam Description: Plant protein of unknown function
  misc_feature (1)..(235): NCBI GI NO: 15235452 NR Description: putative protein; protein id: At4g12690
  misc_feature (1)..(209): NCBI GI NO: 15228105 NR Description: hypothetical protein; protein id: At2g04220.1
  misc_feature (1)..(200): NCBI GI NO: 15238927 NR Description: putative protein; protein id: At5g48270.1
  misc_feature (201)..(235): NCBI GI NO: 15238927 NR Description: putative protein; protein id: At5g48270.1
  misc_feature (8)..(209): NCBI GI NO: 25334990 NR Description: hypothetical protein At2g04220
  misc_feature (20)..(235): NCBI GI NO: 20804936 NR Description: P0456E05.14
  misc_feature (1)..(15): NCBI GI NO: 20804936 NR Description: P0456E05.14
  misc_feature (1)..(233): NCBI GI NO: 22331055 NR Description: hypothetical protein; protein id: At3g13229.1
  misc_feature (1)..(235): NCBI GI NO: 15241702 NR Description: putative protein; protein id: At5g28150
  misc_feature (1)..(235): NCBI GI NO: 18397034 NR Description: expressed protein; protein id: At3g04860
MNHSLTVMVTSVQGDMNYCCKVDLKPWHFWYKKGYKSFEVEGNQVDVYWDFRSAKFNGGPEPSSDFYVALVSEEEVVLLLGDHKKKAFKRTKSRPSLVDAALFYKKENVFGKKIFSTRAKFHDRKREHEIVVESSTGAKEPEMWISVDGIVLVQVRNLQWKFRGNQTVLVDKEPVQVFWDVYDWLFSTPGTGHGLFIFKPESGESETSNETKNCSASSSSSSSEFCLFLYAWKLE

SEQ ID NO: 4173 - DNA, 2928 bp, Arabidopsis thaliana
  misc_feature (1)..(2928): Ceres Seq. ID no. 12330169
aaaaactcctaaaccaaattataattgttagtaagttaagtaacagagaacaaaataatactcgtaactcttgtttccaaactataacgtaacttttgttcatcatcttcacagtttctgtttctgtttctaaagattctaaattttgtgttttttttttcctttttctttcgattatttttgattttctgatggaattccgcaaaccctttaagtctcatagctcgtataaacagattataagcaccggaaatcaaaacgagaagacaaagaagaagaagaaactggcgaatcttgacgatggcgacattgctaaaactcagagctctgggtctagtttcgatggaaacagctataagttctggcaagacattgcaacagatgattatacaaagagcgggagtttcgatttcccgcaataccgtgaggagatcacactcgatgtaaacgaagaaacagaggaaacagaggatgtcagcaacaacaacaatttgtccggttctaaagaaacgagagtctctttcaaaataaacagttcaggaactaataatatgtctggttctgtacgttcttgtacatcttcgacttcgttttcatcggccacaatgcggttaaatttagagcagcagttggaggatgaaggagaggtggttgtaagatgttcatcggtgaggaaaacagagcttgtttcgagggcgaaggcgagatcgaggttgatagatccgccacaagaagaggaacaacaatactcgagctggatcgggacatcggatcagttaagatcaggtttacttgggagacactctgatgatattgatgaagaagatgattcttcggctgaagaagatgttccagtggaatatcgaaagttgaaaatggacgcgataacgttgcttcaatggatgagcttaatcgcactcgtagtggcgttagtgttgagtctagcgcttcatacttggagaaaaatgctactctatggagccttcatctgtggaaatgggaagtggtcttgctggttctcatctgcgggaggctggtttcgggatgcggaatacgaatcatcgtcttctttatcgaaagaaacttcctattgaggaaacgggttctttacttcgtatacggtgtgaagactgctgttcagaactgtctctggcttggcctcgtgctcgtcgcttggcatttcttgttcgacaagaaagtagaaagggaaacacaaagcgacgttcttcttctcgtatctaaaatattagtgtgtttcttgttgagcacggtcttatggctgatcaagacactggtggtgaaagttttagcatcttcgttccacgttagtacctactttgatcggattcaagaagctctgtttcatcattacttgatcgagacgttatctgtacctccaatgcttgagttaagcaggattgaggaagaggaagatcggacgcaagatgagatctacaaggtgcagaaaggaggagctgatttatcacccgaactttgttccgctgcgtttcctcaggaaaaaagtggaagtacaatgaacatgaagttctctccaatcattccgaagacgggtggtgataacggaatcacaatggatgatttacacaagatgaatcagaaaaacgtttcagcttggaacatgaagagactgatgaagattgtgagaaatatttccctgactacgttggacgaacaagcgcttcaaaacacgtgtgaagatgaatccactcgacagatacggagcgaaaaagaagctaaagcagctgcaaggaagattttcaagaacgtagctcaacctggcacaaaacacatatacctggaggacttgatgagatttttgcgagtagacgaggcgatgaagacaatgtgtctcttcgaaggcgccttagtgaccaaaaagattactaaatcagccttgaagaactggctggtaaatgctttcagagagagaagagcacttgccttaacactcaatgacaccaaaacagcagtgaacaaactccatcacatgattagttttctcactgccattgtcatcatagtcatatggctgatccttcttgaaatcgctacttccaagtatcttttatttttaacttcacaagttgtactcttagccttcatgtttgggaactctctcaagaccgtcttcgagtcaatcatcttcctcttcatcattcacccttacgatgttggtgatcggttactcatcgacactgtagagatggtggtggaggaaatgaacattctcacaacagttttcttgagagctgacaatctgaagattgtgtatccaaatattcttctatggcagaaagcgatccacaattacaaccgtagtccggatatgggagatgaagttacatgctgtgtccacattactactcctcctgaaaagattgctgcaatcaaacaaagaatatcaagctacattgatagcaagccagagtattggtatccaaaagctgatatcattgtaaaggatgtggaagatttgaacattgtgaggatagcaatatggctgtgtcataaaattaaccatcaaaacatgggagagagatttacaagaagagcgttgttgatcgaggaagtaatcaaaatcctcctcgaactcgacattcaataccggtttcatccacttgatatcaatgttaaaaccatgccaacagttgtctcgagcagagttccaccaggctggtcacaaaaccctgattcaaggtaattatagagatgatgtgaattgtgttatcttaactcttaagtgtgttttagtatgaggtttgattgttgtattttttttttctttttttgtaaaccggttgttgtatatatatgaaggtgaaagcaaagagtgggatcataaacttgtgttatagaaactttatgaaaatagaaactaatgatatttttagtaatgatttttttttt

SEQ ID NO: 4174 - protein, 607 aa, Arabidopsis thaliana
  peptide (1)..(607): Ceres Seq. ID no. 12330170
  misc_feature (369)..(577): Pfam Name: Pfam Description:  Mechanosensitive ion channel
  misc_feature (26)..(601): NCBI GI NO: 15218429 NR Description: hypothetical protein; protein id: At1g78610.1
  misc_feature (25)..(602): NCBI GI NO: 11994592 NR Description: gb|AAD30575
  misc_feature (19)..(602): NCBI GI NO: 15220793 NR Description: hypothetical protein; protein id: At1g53470.1
  misc_feature (333)..(603): NCBI GI NO: 30679840 NR Description: expressed protein [Arabidopsis thaliana]
  misc_feature (22)..(148): NCBI GI NO: 30679840 NR Description: expressed protein [Arabidopsis thaliana]
  misc_feature (25)..(381): NCBI GI NO: 15231928 NR Description: hypothetical protein; protein id: At3g14810.1
  misc_feature (403)..(602): NCBI GI NO: 15231928 NR Description: hypothetical protein; protein id: At3g14810.1
  misc_feature (227)..(303): NCBI GI NO: 30679840 NR Description: expressed protein [Arabidopsis thaliana]
  misc_feature (23)..(600): NCBI GI NO: 38345847 NR Description: OSJNBa0084K11.11
  misc_feature (333)..(530): NCBI GI NO: 25411771 NR Description: hypothetical protein At2g17010
MDELNRTRSGVSVESSASYLEKNATLWSLHLWKWEVVLLVLICGRLVSGCGIRIIVFFIERNFLLRKRVLYFVYGVKTAVQNCLWLGLVLVAWHFLFDKKVERETQSDVLLLVSKILVCFLLSTVLWLIKTLVVKVLASSFHVSTYFDRIQEALFHHYLIETLSVPPMLELSRIEEEEDRTQDEIYKVQKGGADLSPELCSAAFPQEKSGSTMNMKFSPIIPKTGGDNGITMDDLHKMNQKNVSAWNMKRLMKIVRNISLTTLDEQALQNTCEDESTRQIRSEKEAKAAARKIFKNVAQPGTKHIYLEDLMRFLRVDEAMKTMCLFEGALVTKKITKSALKNWLVNAFRERRALALTLNDTKTAVNKLHHMISFLTAIVIIVIWLILLEIATSKYLLFLTSQVVLLAFMFGNSLKTVFESIIFLFIIHPYDVGDRLLIDTVEMVVEEMNILTTVFLRADNLKIVYPNILLWQKAIHNYNRSPDMGDEVTCCVHITTPPEKIAAIKQRISSYIDSKPEYWYPKADIIVKDVEDLNIVRIAIWLCHKINHQNMGERFTRRALLIEEVIKILLELDIQYRFHPLDINVKTMPTVVSSRVPPGWSQNPDSR

SEQ ID NO: 4175 - protein, 440 aa, Arabidopsis thaliana
  peptide (1)..(440): Ceres Seq. ID no. 12330171
  misc_feature (202)..(410): Pfam Name: Pfam Description:  Mechanosensitive ion channel
  misc_feature (1)..(434): NCBI GI NO: 15218429 NR Description: hypothetical protein; protein id: At1g78610.1
  misc_feature (1)..(435): NCBI GI NO: 11994592 NR Description: gb|AAD30575
  misc_feature (1)..(435): NCBI GI NO: 15220793 NR Description: hypothetical protein; protein id: At1g53470.1
  misc_feature (166)..(436): NCBI GI NO: 30679840 NR Description: expressed protein [Arabidopsis thaliana]
  misc_feature (1)..(214): NCBI GI NO: 15231928 NR Description: hypothetical protein; protein id: At3g14810.1
  misc_feature (236)..(435): NCBI GI NO: 15231928 NR Description: hypothetical protein; protein id: At3g14810.1
  misc_feature (60)..(136): NCBI GI NO: 30679840 NR Description: expressed protein [Arabidopsis thaliana]
  misc_feature (1)..(433): NCBI GI NO: 38345847 NR Description: OSJNBa0084K11.11
  misc_feature (166)..(363): NCBI GI NO: 25411771 NR Description: hypothetical protein At2g17010
  misc_feature (60)..(136): NCBI GI NO: 25411771 NR Description: hypothetical protein At2g17010
MLELSRIEEEEDRTQDEIYKVQKGGADLSPELCSAAFPQEKSGSTMNMKFSPIIPKTGGDNGITMDDLHKMNQKNVSAWNMKRLMKIVRNISLTTLDEQALQNTCEDESTRQIRSEKEAKAAARKIFKNVAQPGTKHIYLEDLMRFLRVDEAMKTMCLFEGALVTKKITKSALKNWLVNAFRERRALALTLNDTKTAVNKLHHMISFLTAIVIIVIWLILLEIATSKYLLFLTSQVVLLAFMFGNSLKTVFESIIFLFIIHPYDVGDRLLIDTVEMVVEEMNILTTVFLRADNLKIVYPNILLWQKAIHNYNRSPDMGDEVTCCVHITTPPEKIAAIKQRISSYIDSKPEYWYPKADIIVKDVEDLNIVRIAIWLCHKINHQNMGERFTRRALLIEEVIKILLELDIQYRFHPLDINVKTMPTVVSSRVPPGWSQNPDSR

SEQ ID NO: 4176 - protein, 395 aa, Arabidopsis thaliana
  peptide (1)..(395): Ceres Seq. ID no. 12330172
  misc_feature (157)..(365): Pfam Name: Pfam Description:  Mechanosensitive ion channel
  misc_feature (1)..(389): NCBI GI NO: 15218429 NR Description: hypothetical protein; protein id: At1g78610.1
  misc_feature (1)..(390): NCBI GI NO: 11994592 NR Description: gb|AAD30575
  misc_feature (1)..(390): NCBI GI NO: 15220793 NR Description: hypothetical protein; protein id: At1g53470.1
  misc_feature (121)..(391): NCBI GI NO: 30679840 NR Description: expressed protein [Arabidopsis thaliana]
  misc_feature (1)..(169): NCBI GI NO: 15231928 NR Description: hypothetical protein; protein id: At3g14810.1
  misc_feature (191)..(390): NCBI GI NO: 15231928 NR Description: hypothetical protein; protein id: At3g14810.1
  misc_feature (15)..(91): NCBI GI NO: 30679840 NR Description: expressed protein [Arabidopsis thaliana]
  misc_feature (1)..(388): NCBI GI NO: 38345847 NR Description: OSJNBa0084K11.11
  misc_feature (121)..(318): NCBI GI NO: 25411771 NR Description: hypothetical protein At2g17010
  misc_feature (15)..(91): NCBI GI NO: 25411771 NR Description: hypothetical protein At2g17010
MNMKFSPIIPKTGGDNGITMDDLHKMNQKNVSAWNMKRLMKIVRNISLTTLDEQALQNTCEDESTRQIRSEKEAKAAARKIFKNVAQPGTKHIYLEDLMRFLRVDEAMKTMCLFEGALVTKKITKSALKNWLVNAFRERRALALTLNDTKTAVNKLHHMISFLTAIVIIVIWLILLEIATSKYLLFLTSQVVLLAFMFGNSLKTVFESIIFLFIIHPYDVGDRLLIDTVEMVVEEMNILTTVFLRADNLKIVYPNILLWQKAIHNYNRSPDMGDEVTCCVHITTPPEKIAAIKQRISSYIDSKPEYWYPKADIIVKDVEDLNIVRIAIWLCHKINHQNMGERFTRRALLIEEVIKILLELDIQYRFHPLDINVKTMPTVVSSRVPPGWSQNPDSR

SEQ ID NO: 4177 - DNA, 1836 bp, Arabidopsis thaliana
  misc_feature (1)..(1836): Ceres Seq. ID no. 12329328
gttaatctttttcttcaatctctcgatctgatcgttatcgaaaccgcgcgattctaaccaagtccaggtgacaaatcagctctgctaaaatactcacaaagtctcgtgatcatattttgtggatcacatcattgtcttatttttggaattgcttatcctcgcactagttcactgatttgagatctgtgcagttaattttgtgctccatagcgattccatggcttctttaatgttatctctcggttccacttctctgttaccgcgcgagattaacaaggataagctaaagcttggaacttctgcttcgaacccgttcctaaaagcaaagtcttttagcagagtgactatgacggttgcagtgaagccttctcgtttcgagggtataactatggctccaccagaccctattcttggagtcagtgaagcattcaaagctgacactaacgggatgaaactcaatcttggtgttggtgcttatcgtactgaggaactccagccttatgtgcttaatgttgttaaaaaggcggagaatttgatgttggagagaggagataacaaagagtatcttccaattgaggggttggcagcattcaacaaggctactgctgagttgctatttggagctggtcatcctgttattaaggaacaaagagtagcaacaattcagggtctttcgggaacaggttcactgcgattagcagcggctcttatagagcgttatttccctggagcaaaagttgtgatctcatcaccaacctggggtaatcacaagaatatcttcaatgatgccaaagttccgtggtccgaataccgctactatgatccaaaaacaattggtttggattttgagggaatgatagcagatataaaggaagctccagaaggatccttcatcttgcttcacggatgtgctcacaacccaactggaattgacccaacaccagaacagtgggtaaaaattgctgatgtcattcaggaaaagaaccatatcccatttttcgatgttgcataccagggctttgctagtggaagccttgatgaagatgcagcatctgtgagattatttgctgagcggggaatggagttttttgttgctcagtcatatagtaaaaatttaggtttgtatgcagaaagaattggggcaatcaatgtcgtgtgctcctcagctgatgctgctacaagggtcaagagccagttgaaaaggattgctcggcctatgtactcgaatccaccagttcatggggcgagaatcgtggccaatgtagtgggtgatgtaactatgttcagtgaatggaaagcagagatggaaatgatggcaggaagaataaagacggttagacaagagctgtatgatagcctcgtttcaaaagacaagagcgggaaggactggtccttcattctgaagcaaattggcatgttctctttcaccggcctaaacaaagctcagagcgataacatgacggacaaatggcacgtgtatatgactaaagacgggaggatatcattggccggattatctctggccaaatgcgagtatcttgctgatgcgatcatcgactcataccataacgtaagctgagcttccatctcagtagatgacaataagaaacagttttatataccctttttagcttcttcttgatctttgattgaaaccagatggctaaattaataagctagcatcacactatgattgctagacaattttcaaggaaacttttgatttgatcgtgtttgacaggccttgttgtattgggagactcccatcgagttatagaagaacttgttacgattgtattttacataatttcacaactatacttgaccggaagagtt

SEQ ID NO: 4178 - protein, 453 aa, Arabidopsis thaliana
  peptide (1)..(453): Ceres Seq. ID no. 12329329
  misc_feature (131)..(449): Pfam Name: Pfam Description:  Aminotransferase class I and II
  misc_feature (1)..(453): NCBI GI NO: 15236129 NR Description: aspartate aminotransferase; protein id: At4g31990
  misc_feature (1)..(453): NCBI GI NO: 531555 NR Description: aspartate aminotransferase [Arabidopsis thaliana]
  misc_feature (1)..(453): NCBI GI NO: 21618222 NR Description: aspartate aminotransferase [Arabidopsis thaliana]
  misc_feature (1)..(453): NCBI GI NO: 1076500 NR Description: aspartate transaminase (EC 2.6.1.1) - alfalfa
  misc_feature (1)..(453): NCBI GI NO: 445118 NR Description: Asp aminotransferase
  misc_feature (1)..(453): NCBI GI NO: 25990362 NR Description: aspartate aminotransferase [Phaseolus vulgaris]
  misc_feature (2)..(453): NCBI GI NO: 2605932 NR Description: aspartate aminotransferase [Lotus corniculatus]
  misc_feature (1)..(453): NCBI GI NO: 485495 NR Description: aspartate transaminase (EC 2
  misc_feature (1)..(453): NCBI GI NO: 7548843 NR Description: aspartate aminotransferase isozyme 5 [Glycine max]
  misc_feature (3)..(453): NCBI GI NO: 112979 NR Description: ASPARTATE AMINOTRANSFERASE-P2
MASLMLSLGSTSLLPREINKDKLKLGTSASNPFLKAKSFSRVTMTVAVKPSRFEGITMAPPDPILGVSEAFKADTNGMKLNLGVGAYRTEELQPYVLNVVKKAENLMLERGDNKEYLPIEGLAAFNKATAELLFGAGHPVIKEQRVATIQGLSGTGSLRLAAALIERYFPGAKVVISSPTWGNHKNIFNDAKVPWSEYRYYDPKTIGLDFEGMIADIKEAPEGSFILLHGCAHNPTGIDPTPEQWVKIADVIQEKNHIPFFDVAYQGFASGSLDEDAASVRLFAERGMEFFVAQSYSKNLGLYAERIGAINVVCSSADAATRVKSQLKRIARPMYSNPPVHGARIVANVVGDVTMFSEWKAEMEMMAGRIKTVRQELYDSLVSKDKSGKDWSFILKQIGMFSFTGLNKAQSDNMTDKWHVYMTKDGRISLAGLSLAKCEYLADAIIDSYHNVS

SEQ ID NO: 4179 - protein, 449 aa, Arabidopsis thaliana
  peptide (1)..(449): Ceres Seq. ID no. 12329330
  misc_feature (127)..(445): Pfam Name: Pfam Description:  Aminotransferase class I and II
  misc_feature (1)..(449): NCBI GI NO: 15236129 NR Description: aspartate aminotransferase; protein id: At4g31990
  misc_feature (1)..(449): NCBI GI NO: 531555 NR Description: aspartate aminotransferase [Arabidopsis thaliana]
  misc_feature (1)..(449): NCBI GI NO: 21618222 NR Description: aspartate aminotransferase [Arabidopsis thaliana]
  misc_feature (1)..(449): NCBI GI NO: 1076500 NR Description: aspartate transaminase (EC 2.6.1.1) - alfalfa
  misc_feature (1)..(449): NCBI GI NO: 445118 NR Description: Asp aminotransferase
  misc_feature (1)..(449): NCBI GI NO: 25990362 NR Description: aspartate aminotransferase [Phaseolus vulgaris]
  misc_feature (1)..(449): NCBI GI NO: 2605932 NR Description: aspartate aminotransferase [Lotus corniculatus]
  misc_feature (1)..(449): NCBI GI NO: 485495 NR Description: aspartate transaminase (EC 2
  misc_feature (1)..(449): NCBI GI NO: 7548843 NR Description: aspartate aminotransferase isozyme 5 [Glycine max]
  misc_feature (1)..(449): NCBI GI NO: 112979 NR Description: ASPARTATE AMINOTRANSFERASE-P2
MLSLGSTSLLPREINKDKLKLGTSASNPFLKAKSFSRVTMTVAVKPSRFEGITMAPPDPILGVSEAFKADTNGMKLNLGVGAYRTEELQPYVLNVVKKAENLMLERGDNKEYLPIEGLAAFNKATAELLFGAGHPVIKEQRVATIQGLSGTGSLRLAAALIERYFPGAKVVISSPTWGNHKNIFNDAKVPWSEYRYYDPKTIGLDFEGMIADIKEAPEGSFILLHGCAHNPTGIDPTPEQWVKIADVIQEKNHIPFFDVAYQGFASGSLDEDAASVRLFAERGMEFFVAQSYSKNLGLYAERIGAINVVCSSADAATRVKSQLKRIARPMYSNPPVHGARIVANVVGDVTMFSEWKAEMEMMAGRIKTVRQELYDSLVSKDKSGKDWSFILKQIGMFSFTGLNKAQSDNMTDKWHVYMTKDGRISLAGLSLAKCEYLADAIIDSYHNVS

SEQ ID NO: 4180 - protein, 410 aa, Arabidopsis thaliana
  peptide (1)..(410): Ceres Seq. ID no. 12329331
  misc_feature (88)..(406): Pfam Name: Pfam Description:  Aminotransferase class I and II
  misc_feature (1)..(410): NCBI GI NO: 15236129 NR Description: aspartate aminotransferase; protein id: At4g31990
  misc_feature (1)..(410): NCBI GI NO: 531555 NR Description: aspartate aminotransferase [Arabidopsis thaliana]
  misc_feature (1)..(410): NCBI GI NO: 21618222 NR Description: aspartate aminotransferase [Arabidopsis thaliana]
  misc_feature (1)..(410): NCBI GI NO: 1076500 NR Description: aspartate transaminase (EC 2.6.1.1) - alfalfa
  misc_feature (1)..(410): NCBI GI NO: 445118 NR Description: Asp aminotransferase
  misc_feature (1)..(410): NCBI GI NO: 25990362 NR Description: aspartate aminotransferase [Phaseolus vulgaris]
  misc_feature (1)..(410): NCBI GI NO: 2605932 NR Description: aspartate aminotransferase [Lotus corniculatus]
  misc_feature (1)..(410): NCBI GI NO: 485495 NR Description: aspartate transaminase (EC 2
  misc_feature (1)..(410): NCBI GI NO: 7548843 NR Description: aspartate aminotransferase isozyme 5 [Glycine max]
  misc_feature (1)..(410): NCBI GI NO: 112979 NR Description: ASPARTATE AMINOTRANSFERASE-P2
MTVAVKPSRFEGITMAPPDPILGVSEAFKADTNGMKLNLGVGAYRTEELQPYVLNVVKKAENLMLERGDNKEYLPIEGLAAFNKATAELLFGAGHPVIKEQRVATIQGLSGTGSLRLAAALIERYFPGAKVVISSPTWGNHKNIFNDAKVPWSEYRYYDPKTIGLDFEGMIADIKEAPEGSFILLHGCAHNPTGIDPTPEQWVKIADVIQEKNHIPFFDVAYQGFASGSLDEDAASVRLFAERGMEFFVAQSYSKNLGLYAERIGAINVVCSSADAATRVKSQLKRIARPMYSNPPVHGARIVANVVGDVTMFSEWKAEMEMMAGRIKTVRQELYDSLVSKDKSGKDWSFILKQIGMFSFTGLNKAQSDNMTDKWHVYMTKDGRISLAGLSLAKCEYLADAIIDSYHNVS

SEQ ID NO: 4181 - DNA, 1160 bp, Arabidopsis thaliana
  misc_feature (1)..(1160): Ceres Seq. ID no. 13488715
aaaaaaacaaacttgtttgttagacaaaacatgaatttccggggaggttgttgtattgcgaggtacggtggtagtggtggtggaaatgatatgtcgaaggttgatcggattatgctccggtaccgtccgattgcaccgagacctgattctggtggatctcctgcttcaccgacggagaagaatggatcggtgataactaacgtttcgtcgagatcacggagaggtaagagaaaatattcaaaggagaataatagtagcagtaccggatccgttaatagtaacggtaacagcaaacgacagagaaacgatgagacgaagaacggatctggtggtggtagagagatcgtgacgttgcctcttcttccagagactcctgagaagaaagactcgccgttgaaggctaaggcggcgccggagttaggtgcggcggcgttgtggctgagttttaatgacggagctagttataacagacgttatcagacagagttaatgacggaaacggttgtgtcgtcgttgttgacggtggagtgtgtaacggagagattgatggagggagagtatgagttagggtgtacggacgaggagaggaagatgaatcttgagagagacacgtgtcctggttttatatcggacggtttagggagagtcatttggacgaacggttcttacagagagttggtggttgggaaagatcatgagcagtgtagtaagatgagtgtgtggcttgtgatgaaggagaagcctttggtaacgtaccggacttttacgtgtagaatgagattgcagtacacgtgtcgtgataaggaggtgagttcgattacttcgttctgtgatgtttggaggatgagtgacggtggctttgcgtggcggcttgatgttgatgctgcactttgccttggacggtgaggattgggccgttggattagagatgatgttagattgatgagatgaggatatttaataacgacatgcaagttagatagatatttggacttccaactttatgagtgtacatacatatttcgcaattttgtagcttttaagttttaacattttgatttcaatgttctgttttaatttgtagtgtttggtgttttattcttcttcttttttggggtttgtataaaaactcttggttagtcggtatctttcttttttcc

SEQ ID NO: 4182 - protein, 301 aa, Arabidopsis thaliana
  peptide (1)..(301): Ceres Seq. ID no. 13488716
  misc_feature (11)..(301): NCBI GI NO: 15240662 NR Description: expressed protein [Arabidopsis thaliana]
  misc_feature (11)..(299): NCBI GI NO: 15242729 NR Description: expressed protein [Arabidopsis thaliana]
  misc_feature (11)..(299): NCBI GI NO: 18408645 NR Description: expressed protein [Arabidopsis thaliana]
  misc_feature (11)..(299): NCBI GI NO: 21537225 NR Description: unknown [Arabidopsis thaliana]
  misc_feature (21)..(299): NCBI GI NO: 15232126 NR Description: expressed protein [Arabidopsis thaliana]
  misc_feature (57)..(299): NCBI GI NO: 15237495 NR Description: hypothetical protein [Arabidopsis thaliana]
  misc_feature (11)..(300): NCBI GI NO: 15237494 NR Description: hypothetical protein [Arabidopsis thaliana]
  misc_feature (25)..(174): NCBI GI NO: 15237495 NR Description: hypothetical protein [Arabidopsis thaliana]
KKTNLFVRQNMNFRGGCCIARYGGSGGGNDMSKVDRIMLRYRPIAPRPDSGGSPASPTEKNGSVITNVSSRSRRGKRKYSKENNSSSTGSVNSNGNSKRQRNDETKNGSGGGREIVTLPLLPETPEKKDSPLKAKAAPELGAAALWLSFNDGASYNRRYQTELMTETVVSSLLTVECVTERLMEGEYELGCTDEERKMNLERDTCPGFISDGLGRVIWTNGSYRELVVGKDHEQCSKMSVWLVMKEKPLVTYRTFTCRMRLQYTCRDKEVSSITSFCDVWRMSDGGFAWRLDVDAALCLGR

SEQ ID NO: 4183 - protein, 291 aa, Arabidopsis thaliana
  peptide (1)..(291): Ceres Seq. ID no. 13488717
  misc_feature (1)..(291): NCBI GI NO: 15240662 NR Description: expressed protein [Arabidopsis thaliana]
  misc_feature (1)..(289): NCBI GI NO: 15242729 NR Description: expressed protein [Arabidopsis thaliana]
  misc_feature (1)..(289): NCBI GI NO: 18408645 NR Description: expressed protein [Arabidopsis thaliana]
  misc_feature (1)..(289): NCBI GI NO: 21537225 NR Description: unknown [Arabidopsis thaliana]
  misc_feature (11)..(289): NCBI GI NO: 15232126 NR Description: expressed protein [Arabidopsis thaliana]
  misc_feature (47)..(289): NCBI GI NO: 15237495 NR Description: hypothetical protein [Arabidopsis thaliana]
  misc_feature (1)..(290): NCBI GI NO: 15237494 NR Description: hypothetical protein [Arabidopsis thaliana]
  misc_feature (15)..(164): NCBI GI NO: 15237495 NR Description: hypothetical protein [Arabidopsis thaliana]
MNFRGGCCIARYGGSGGGNDMSKVDRIMLRYRPIAPRPDSGGSPASPTEKNGSVITNVSSRSRRGKRKYSKENNSSSTGSVNSNGNSKRQRNDETKNGSGGGREIVTLPLLPETPEKKDSPLKAKAAPELGAAALWLSFNDGASYNRRYQTELMTETVVSSLLTVECVTERLMEGEYELGCTDEERKMNLERDTCPGFISDGLGRVIWTNGSYRELVVGKDHEQCSKMSVWLVMKEKPLVTYRTFTCRMRLQYTCRDKEVSSITSFCDVWRMSDGGFAWRLDVDAALCLGR

SEQ ID NO: 4184 - protein, 271 aa, Arabidopsis thaliana
  peptide (1)..(271): Ceres Seq. ID no. 13488718
  misc_feature (1)..(271): NCBI GI NO: 15240662 NR Description: expressed protein [Arabidopsis thaliana]
  misc_feature (1)..(269): NCBI GI NO: 15242729 NR Description: expressed protein [Arabidopsis thaliana]
  misc_feature (1)..(269): NCBI GI NO: 18408645 NR Description: expressed protein [Arabidopsis thaliana]
  misc_feature (1)..(269): NCBI GI NO: 21537225 NR Description: unknown [Arabidopsis thaliana]
  misc_feature (1)..(269): NCBI GI NO: 15232126 NR Description: expressed protein [Arabidopsis thaliana]
  misc_feature (27)..(269): NCBI GI NO: 15237495 NR Description: hypothetical protein [Arabidopsis thaliana]
  misc_feature (1)..(270): NCBI GI NO: 15237494 NR Description: hypothetical protein [Arabidopsis thaliana]
  misc_feature (1)..(144): NCBI GI NO: 15237495 NR Description: hypothetical protein [Arabidopsis thaliana]
MSKVDRIMLRYRPIAPRPDSGGSPASPTEKNGSVITNVSSRSRRGKRKYSKENNSSSTGSVNSNGNSKRQRNDETKNGSGGGREIVTLPLLPETPEKKDSPLKAKAAPELGAAALWLSFNDGASYNRRYQTELMTETVVSSLLTVECVTERLMEGEYELGCTDEERKMNLERDTCPGFISDGLGRVIWTNGSYRELVVGKDHEQCSKMSVWLVMKEKPLVTYRTFTCRMRLQYTCRDKEVSSITSFCDVWRMSDGGFAWRLDVDAALCLGR

SEQ ID NO: 4185 - DNA, 1247 bp, Arabidopsis thaliana
  misc_feature (1)..(1247): Ceres Seq. ID no. 12328176
gccgttgacttcttttcctctgtaagtcaactctctgtttgtctctacatacatccatccatctatctttggatcgtcattttctctttgtggactaaagtttaagagagaacatgggtgtatttcctggatttggtagctggatcaatcaaaacactcaacagcttcctcacaaggcagagtccgagagatctgagaatgcgaaatttaagtcaaagtcagagacaaacactcatgaggcgagagatgaaatgaaacagcaattaaaactttggagagatacagagaagaaggaacaatggaatgatgctcctcctaatgtgaaggtggaaagaagaaatgatctagaatggggtatgtcaactatagaaatgcaatttacattaggattgcctcctcaagcagcttacaacgttttaactaatccagacaaccaaccatacttcagaatcatcaaaggacgccaacttttggtttcttcttttaacttatcatttcattgattcaaataaaataatgataacaagatttgagagtgtgtcatagttttcttcttatgaaaggaaaacatatcaagaaaagttgtgtcgccggataccgggaaagggcagcttgtggacaccaagaaagctgtggcctggaacttcctttggttatctggaactatcccgataattgcaaattttatcgaacaccgacaagtccttaccgtacaatatacggtaaaaaataagatgttcataaacatgtttgtcagtataaagtggagccgctatacgtagattcagaacgcttgtgcaaacaaaagaagccgaagagtacagaagaatacgaaagatgtagccgcggacaaggaaggattgggtcgaaagtgacattggaccagatgtttaagccttcttttatttttaatctgccaccgatttcttggtacgttcgtcggataaccatcaagaccatgaaaactctgatcgaagatcttcaaattacaagtgccatgatccgaggtatttgaaacgtcccaaatccgctacaaattgatagaacatcaaataaagttataaaatcactttttataaatttaaatagcagaatattacatatgactttagaagtgtatgttcttatggtcactttataacatcaaattaaatgtatagaaaatgtttctaaccaatagttcttaattagacgattatacatagtcaatttgtgtcttttcatattttttaatatcatatattttc

SEQ ID NO: 4186 - protein, 129 aa, Arabidopsis thaliana
  peptide (1)..(129): Ceres Seq. ID no. 12328177
  misc_feature (1)..(120): NCBI GI NO: 8778586 NR Description: F28C11.14 [Arabidopsis thaliana]
  misc_feature (1)..(120): NCBI GI NO: 25373400 NR Description: hypothetical protein F5O8.7
  misc_feature (1)..(123): NCBI GI NO: 15220781 NR Description: OBP32pep protein, putative; protein id: At1g23520
  misc_feature (1)..(129): NCBI GI NO: 18395251 NR Description: putative OBP32pep protein; protein id: At1g23510.1
  misc_feature (1)..(123): NCBI GI NO: 25373395 NR Description: hypothetical protein F5O8
  misc_feature (1)..(129): NCBI GI NO: 8778583 NR Description: F28C11.19 [Arabidopsis thaliana]
  misc_feature (1)..(120): NCBI GI NO: 15220821 NR Description: hypothetical protein; protein id: At1g23660.1
  misc_feature (3)..(111): NCBI GI NO: 25373403 NR Description: hypothetical protein F5O8
  misc_feature (1)..(71): NCBI GI NO: 21536644 NR Description: OBP32pep protein, putative [Arabidopsis thaliana]
  misc_feature (1)..(71): NCBI GI NO: 18395270 NR Description: OBP32pep protein, putative; protein id: At1g23670
MGVFPGFGSWINQNTQQLPHKAESERSENAKFKSKSETNTHEARDEMKQQLKLWRDTEKKEQWNDAPPNVKVERRNDLEWGMSTIEMQFTLGLPPQAAYNVLTNPDNQPYFRIIKGRQLLVSSFNLSFH

SEQ ID NO: 4187 - protein, 83 aa, Arabidopsis thaliana
  peptide (1)..(83): Ceres Seq. ID no. 12328178
  misc_feature (1)..(74): NCBI GI NO: 8778586 NR Description: F28C11.14 [Arabidopsis thaliana]
  misc_feature (1)..(74): NCBI GI NO: 25373400 NR Description: hypothetical protein F5O8.7
  misc_feature (1)..(77): NCBI GI NO: 15220781 NR Description: OBP32pep protein, putative; protein id: At1g23520
  misc_feature (1)..(83): NCBI GI NO: 18395251 NR Description: putative OBP32pep protein; protein id: At1g23510.1
  misc_feature (1)..(77): NCBI GI NO: 25373395 NR Description: hypothetical protein F5O8
  misc_feature (1)..(83): NCBI GI NO: 8778583 NR Description: F28C11.19 [Arabidopsis thaliana]
  misc_feature (1)..(74): NCBI GI NO: 15220821 NR Description: hypothetical protein; protein id: At1g23660.1
  misc_feature (1)..(65): NCBI GI NO: 25373403 NR Description: hypothetical protein F5O8
  misc_feature (1)..(25): NCBI GI NO: 21536644 NR Description: OBP32pep protein, putative [Arabidopsis thaliana]
  misc_feature (1)..(25): NCBI GI NO: 18395270 NR Description: OBP32pep protein, putative; protein id: At1g23670
MKQQLKLWRDTEKKEQWNDAPPNVKVERRNDLEWGMSTIEMQFTLGLPPQAAYNVLTNPDNQPYFRIIKGRQLLVSSFNLSFH

SEQ ID NO: 4188 - DNA, 1227 bp, Arabidopsis thaliana
  misc_feature (1)..(1227): Ceres Seq. ID no. 12395444
acgttctattttcttctcctttttctatctttagcaatgaacatatcagtaaacggacagtcacaagtacctcctggctttaggtttcacccaaccgaggaagagctcttgaagtattacctccgcaagaaaatctctaacatcaaaatcgatctcgatgttattcctgacattgatctcaacaagctcgagccttgggatattcaagagatgtgtaagattggaacgaccccgcaaaacgattggtatttctttagccataaggacaagaagtatcccacggggactagaaccaacagagccaccacggtgggattttggaaagcgacgggacgtgacaagaccatatataccaatgatgataggatcgggatgcgaaagacgcttgtcttctacaaaggtcgagcccctcatggtcagaaatccgattggatcatgcaaatatagactcgacgagagtgtattaatctcctcgtgtggcgatgatgacgtcaacgtagaaacgtgtgatgtcataggaagtgacgaaggatgggtggtgtgtcgtgttttcaagaaaaataacctttgcaaaaacatgattagtagtagcccggcgagttcggtgaaaacgccgtcgttcaatgaggagactatcgagcaacttctcgaagttatggggcaatcttgtaaaggagagatagttttagaccctttcttaaaactccctaacctcgaatgccataacaacaccaccatcacgagttatcagcggttaatcgacgaccaagtcaacaactgccacgtcagcaaagttatggatcccagcttcatcactagctgggccgctttggatcggctcgttgcctcacagttaaatgggcccaactcgtattcaataccagccgttagtgagacttcacaatcaccgtatcatggactgaaccggtccggttgtcataccggtttaacaccagattactatataccggagattgatttatggaacgaggcagatttcgcgagaacgacatgccacttgttgaacggtagtggataacggaaatggaagagaggaagtgactaagtgagtgacataccaaaacattgtgtagaaagatataataatcatcataccatatggtatagttgttgaaacttttacggtataaatggtcagattgtgataattacagtacgtagttatgtgatatcattacagaaaataaaagttgtctatatctgtgt

SEQ ID NO: 4189 - protein, 293 aa, Arabidopsis thaliana
  peptide (1)..(293): Ceres Seq. ID no. 12395445
  misc_feature (95)..(293): NCBI GI NO: 21536577 NR Description: NAM-like protein [Arabidopsis thaliana]
  misc_feature (95)..(293): NCBI GI NO: 15228643 NR Description: NAM-like protein; protein id: At3g61910
  misc_feature (95)..(293): NCBI GI NO: 30690500 NR Description: No apical meristem (NAM) protein family
  misc_feature (95)..(293): NCBI GI NO: 27754598 NR Description: putative NAM (no apical meristem) protein
  misc_feature (95)..(290): NCBI GI NO: 7485760 NR Description: NAM (no apical meristem)-like protein
  misc_feature (123)..(148): NCBI GI NO: 6006373 NR Description: Similar to NAM like protein (AC005310)
  misc_feature (122)..(152): NCBI GI NO: 15235031 NR Description: NAM/NAP like protein; protein id: At4g10350.1
  misc_feature (123)..(197): NCBI GI NO: 15217491 NR Description: unknown protein; protein id: At1g33280.1
MLFLTLISTSSSLGIFKRCVRLERPRKTIGISLAIRTRSIPRGLEPTEPPRWDFGKRRDVTRPYIPMMIGSGCERRLSSTKVEPLMVRNPIGSCKYRLDESVLISSCGDDDVNVETCDVIGSDEGWVVCRVFKKNNLCKNMISSSPASSVKTPSFNEETIEQLLEVMGQSCKGEIVLDPFLKLPNLECHNNTTITSYQRLIDDQVNNCHVSKVMDPSFITSWAALDRLVASQLNGPNSYSIPAVSETSQSPYHGLNRSGCHTGLTPDYYIPEIDLWNEADFARTTCHLLNGSG

SEQ ID NO: 4190 - protein, 227 aa, Arabidopsis thaliana
  peptide (1)..(227): Ceres Seq. ID no. 12395446
  misc_feature (29)..(227): NCBI GI NO: 21536577 NR Description: NAM-like protein [Arabidopsis thaliana]
  misc_feature (29)..(227): NCBI GI NO: 15228643 NR Description: NAM-like protein; protein id: At3g61910
  misc_feature (29)..(227): NCBI GI NO: 30690500 NR Description: No apical meristem (NAM) protein family
  misc_feature (29)..(227): NCBI GI NO: 27754598 NR Description: putative NAM (no apical meristem) protein
  misc_feature (29)..(224): NCBI GI NO: 7485760 NR Description: NAM (no apical meristem)-like protein
  misc_feature (57)..(82): NCBI GI NO: 6006373 NR Description: Similar to NAM like protein (AC005310)
  misc_feature (56)..(86): NCBI GI NO: 15235031 NR Description: NAM/NAP like protein; protein id: At4g10350.1
  misc_feature (57)..(131): NCBI GI NO: 15217491 NR Description: unknown protein; protein id: At1g33280.1
MMIGSGCERRLSSTKVEPLMVRNPIGSCKYRLDESVLISSCGDDDVNVETCDVIGSDEGWVVCRVFKKNNLCKNMISSSPASSVKTPSFNEETIEQLLEVMGQSCKGEIVLDPFLKLPNLECHNNTTITSYQRLIDDQVNNCHVSKVMDPSFITSWAALDRLVASQLNGPNSYSIPAVSETSQSPYHGLNRSGCHTGLTPDYYIPEIDLWNEADFARTTCHLLNGSG

SEQ ID NO: 4191 - protein, 226 aa, Arabidopsis thaliana
  peptide (1)..(226): Ceres Seq. ID no. 12395447
  misc_feature (28)..(226): NCBI GI NO: 21536577 NR Description: NAM-like protein [Arabidopsis thaliana]
  misc_feature (28)..(226): NCBI GI NO: 15228643 NR Description: NAM-like protein; protein id: At3g61910
  misc_feature (28)..(226): NCBI GI NO: 30690500 NR Description: No apical meristem (NAM) protein family
  misc_feature (28)..(226): NCBI GI NO: 27754598 NR Description: putative NAM (no apical meristem) protein
  misc_feature (28)..(223): NCBI GI NO: 7485760 NR Description: NAM (no apical meristem)-like protein
  misc_feature (56)..(81): NCBI GI NO: 6006373 NR Description: Similar to NAM like protein (AC005310)
  misc_feature (55)..(85): NCBI GI NO: 15235031 NR Description: NAM/NAP like protein; protein id: At4g10350.1
  misc_feature (56)..(130): NCBI GI NO: 15217491 NR Description: unknown protein; protein id: At1g33280.1
MIGSGCERRLSSTKVEPLMVRNPIGSCKYRLDESVLISSCGDDDVNVETCDVIGSDEGWVVCRVFKKNNLCKNMISSSPASSVKTPSFNEETIEQLLEVMGQSCKGEIVLDPFLKLPNLECHNNTTITSYQRLIDDQVNNCHVSKVMDPSFITSWAALDRLVASQLNGPNSYSIPAVSETSQSPYHGLNRSGCHTGLTPDYYIPEIDLWNEADFARTTCHLLNGSG

SEQ ID NO: 4192 - DNA, 578 bp, Arabidopsis thaliana
  misc_feature (1)..(578): Ceres Seq. ID no. 12323206
acacataagtctctctcttacattttgaaaccctaatttctcaaaaaaaatgtctgaagttgagtacctgctttgtcggcggccttgcctgggccaccaatgatgaagatcttcaaaggacgttctcacagttcggcgacgttatcgattctaagatcattaacgaccgcgagagtggaagatcaaggggattcggattcgtcaccttcaaggacgagaaagccatgagggatgcgattgaagagatgaacggtaaagagctcgatggacgtgtcatcaccgtgaacgaggctcagtcgagaggtagcggcggtggcggaggaggccgtggtggacgccgtgagggaggtggctacggaggcggtgatggtggaagttacggcggcggtggtggcggctggtaatcaaagatagagttgtttgcgtgctgctgctctgtttttggtttagatttggatttgtgtcaccacttctggtttggttatcgttcgtttggtttacttttttgatgaaacagtttcgtttaagtcttctttgtctggatcgaaatgttaattcgcgtgttgtttactaaattt

SEQ ID NO: 4193 - protein, 59 aa, Arabidopsis thaliana
  peptide (1)..(59): Ceres Seq. ID no. 12323207
  misc_feature (1)..(59): NCBI GI NO: 30692254 NR Description: glycine-rich RNA-binding protein 8 (GRP8) (CCR1)
  misc_feature (1)..(58): NCBI GI NO: 15235002 NR Description: glycine-rich RNA-binding protein 8
  misc_feature (1)..(59): NCBI GI NO: 544416 NR Description: Glycine-rich RNA-binding protein 10
  misc_feature (1)..(59): NCBI GI NO: 1346180 NR Description: Glycine-rich RNA-binding protein GRP1A
  misc_feature (1)..(59): NCBI GI NO: 544426 NR Description: Glycine-rich RNA-binding protein
  misc_feature (1)..(59): NCBI GI NO: 30692258 NR Description: glycine-rich RNA-binding protein 8 (GRP8) (CCR1)
  misc_feature (1)..(59): NCBI GI NO: 2226370 NR Description: RNA-binding protein [Nicotiana glutinosa]
  misc_feature (1)..(59): NCBI GI NO: 1346181 NR Description: Glycine-rich RNA-binding protein GRP2A
  misc_feature (1)..(59): NCBI GI NO: 15226605 NR Description: glycine-rich RNA binding protein AtGRP7
  misc_feature (1)..(59): NCBI GI NO: 21553354 NR Description: glycine-rich RNA binding protein 7
MRDAIEEMNGKELDGRVITVNEAQSRGSGGGGGGRGGRREGGGYGGGDGGSYGGGGGGW

SEQ ID NO: 4194 - protein, 52 aa, Arabidopsis thaliana
  peptide (1)..(52): Ceres Seq. ID no. 12323208
  misc_feature (1)..(52): NCBI GI NO: 30692254 NR Description: glycine-rich RNA-binding protein 8 (GRP8) (CCR1)
  misc_feature (1)..(51): NCBI GI NO: 15235002 NR Description: glycine-rich RNA-binding protein 8
  misc_feature (1)..(52): NCBI GI NO: 544416 NR Description: Glycine-rich RNA-binding protein 10
  misc_feature (1)..(52): NCBI GI NO: 1346180 NR Description: Glycine-rich RNA-binding protein GRP1A
  misc_feature (1)..(52): NCBI GI NO: 544426 NR Description: Glycine-rich RNA-binding protein
  misc_feature (1)..(52): NCBI GI NO: 30692258 NR Description: glycine-rich RNA-binding protein 8 (GRP8) (CCR1)
  misc_feature (1)..(52): NCBI GI NO: 2226370 NR Description: RNA-binding protein [Nicotiana glutinosa]
  misc_feature (1)..(52): NCBI GI NO: 1346181 NR Description: Glycine-rich RNA-binding protein GRP2A
  misc_feature (1)..(52): NCBI GI NO: 15226605 NR Description: glycine-rich RNA binding protein AtGRP7
  misc_feature (1)..(52): NCBI GI NO: 21553354 NR Description: glycine-rich RNA binding protein 7
MNGKELDGRVITVNEAQSRGSGGGGGGRGGRREGGGYGGGDGGSYGGGGGGW

SEQ ID NO: 4195 - protein, 42 aa, Arabidopsis thaliana
  peptide (1)..(42): Ceres Seq. ID no. 12323209
MMKIFKGRSHSSATLSILRSLTTARVEDQGDSDSSPSRTRKP

SEQ ID NO: 4196 - DNA, 2337 bp, Arabidopsis thaliana
  misc_feature (1)..(2337): Ceres Seq. ID no. 13645846
caaattatcttctttctctttctctctgatcatttccaaattatttctaagctaagaaaatctttaaaaataacaaagcttctaaaataataatccgacctaccggattcaaaccattgatctgaagatcatctataaaccagtccttgatctataaactaaaataagggaagaaaaaaacaagagagagaaatagagaatgaagtcttttgcggctaaggtagaagagggagttaaaggaatagacggaaagccgtcggtaggtccggtgtaccggaatcttctgtcggaaaaaggttttcctccgattgattctgagatcaccactgcttgggacattttcagtaaatcagtggagaaattccctgacaataatatgcttggatggcgtcgaattgttgatgagaaggttggaccatatatgtggaaaacgtacaaggaagtatacgaagaagttttgcagattggctctgcactacgagccgccggagctgaacctgggagtcgagtggggatctacggtgttaattgtcctcagtggatcatagcaatggaggcttgtgcagctcacactctaatctgtgtacctctatatgatacattgggttcaggagcagtcgattacattgtagagcatgcggaaatcgactttgtgtttgtccaagacaccaaaattaaaggacttcttgagccagattgcaaatgtgctaaacggctaaaagctatagtttccttcactaacgtgagcgacgagcttagccacaaggcttcagaaattggagtcaaaacatactcctggatcgattttctccatatgggacgtgagaaaccggaagacacgaacccgcctaaggcgtttaacatatgcaccataatgtacaccagcggcacaagcggtgatcctaaaggtgtggttttgactcaccaagcggtcgcgacttttgttgttgggatggatctctatatggaccagtttgaagataagatgacacatgatgatgtgtatctctccttcttgccgttggctcatattcttgaccgtatgaatgaggaatacttctttcgcaaaggcgcttccgtcggctattaccatggaaatttgaacgtgttacgtgacgatattcaagaactgaaaccgacttatctagctggagtaccaagagtgtttgagagaatccatgaggggattcaaaaggctcttcaagaacttaatccaagaaggagattcatcttcaatgctctctacaaacacaagcttgcgtggttgaatcgtagatactctcatagtaaagcttcacccatggctgatttcattgctttcagaaagattagagacaaattgggaggtcgcatccggttgttagtatccggaggagcacctttgagccctgagattgaagagtttttgagagttacttgttgttgctttgtcgttcaaggctacggtctaacggagacgcttggaggaacggctttgggtttcccggacgagatgtgtatgctagggacagtcggtattccagcggtttacaacgagatacggcttgaggaggtgtctgaaatgggctatgacccgctcggagaaaatccggcaggagagatctgtataagaggacaatgtatgttttctgggtattacaagaaccctgaactcactgaagaagtcatgaaagatggatggttccacacaggagatataggtgagattcttccaaacggagtactcaagatcatcgatcgcaaaaagaatctgatcaaactttctcaaggagaatatgttgctctcgagcatttggaaaacatcttcgggcaaaactctgttgtccaagatatatgggtttatggagacagcttcaaatctatgcttgtcgcggtggttgttcccaacccagaaaccgtcaacaggtgggctaaagatctcggttttactaaaccattcgtagaactctgttctttcccggagcttaaagaacacatcatttcagaactgaagtccacggcagaaaagaacaagctaagaaagtttgagtacatcaaagcggtggcagtggagacaaaacctttcgacgtagagagagacttagtgactgcgacgctcaagaatcggaggaacaatcttctcaaatattatcaggtgcaaatcgacgaaatgtaccgcaaattggcctcaaagaaaatctgaaagtattgcgatgatgtgtgtgctgttattgatagttatatatgtacgttatatgtatcaataattcatagatatgagctttatgctttatgtaatattttatttttatgttgtatgacatttacatcataattatggattttttttttcttttg

SEQ ID NO: 4197 - protein, 660 aa, Arabidopsis thaliana
  peptide (1)..(660): Ceres Seq. ID no. 13645847
  misc_feature (78)..(345): Pfam Name: Pfam Description:  AMP-binding enzyme
  misc_feature (1)..(658): NCBI GI NO: 15236634 NR Description: long-chain-fatty-acid--CoA ligase
  misc_feature (1)..(659): NCBI GI NO: 7437845 NR Description: probable long-chain-fatty-acid-CoA ligase (EC 6
  misc_feature (4)..(654): NCBI GI NO: 15217631 NR Description: long-chain-fatty-acid--CoA ligase
  misc_feature (2)..(653): NCBI GI NO: 15237023 NR Description: long-chain-fatty-acid--CoA ligase
  misc_feature (2)..(653): NCBI GI NO: 20805871 NR Description: long chain acyl-CoA synthetase 5
  misc_feature (20)..(653): NCBI GI NO: 34898260 NR Description: similar to long-chain-fatty-acid--CoA ligase 1
  misc_feature (8)..(652): NCBI GI NO: 22330132 NR Description: long-chain-fatty-acid--CoA ligase
  misc_feature (8)..(659): NCBI GI NO: 7437844 NR Description: probable long-chain-fatty-acid-CoA ligase (EC 6
  misc_feature (36)..(657): NCBI GI NO: 13516481 NR Description: long-chain acyl-CoA synthetase
  misc_feature (36)..(657): NCBI GI NO: 18397422 NR Description: AMP-binding protein, putative
MKSFAAKVEEGVKGIDGKPSVGPVYRNLLSEKGFPPIDSEITTAWDIFSKSVEKFPDNNMLGWRRIVDEKVGPYMWKTYKEVYEEVLQIGSALRAAGAEPGSRVGIYGVNCPQWIIAMEACAAHTLICVPLYDTLGSGAVDYIVEHAEIDFVFVQDTKIKGLLEPDCKCAKRLKAIVSFTNVSDELSHKASEIGVKTYSWIDFLHMGREKPEDTNPPKAFNICTIMYTSGTSGDPKGVVLTHQAVATFVVGMDLYMDQFEDKMTHDDVYLSFLPLAHILDRMNEEYFFRKGASVGYYHGNLNVLRDDIQELKPTYLAGVPRVFERIHEGIQKALQELNPRRRFIFNALYKHKLAWLNRRYSHSKASPMADFIAFRKIRDKLGGRIRLLVSGGAPLSPEIEEFLRVTCCCFVVQGYGLTETLGGTALGFPDEMCMLGTVGIPAVYNEIRLEEVSEMGYDPLGENPAGEICIRGQCMFSGYYKNPELTEEVMKDGWFHTGDIGEILPNGVLKIIDRKKNLIKLSQGEYVALEHLENIFGQNSVVQDIWVYGDSFKSMLVAVVVPNPETVNRWAKDLGFTKPFVELCSFPELKEHIISELKSTAEKNKLRKFEYIKAVAVETKPFDVERDLVTATLKNRRNNLLKYYQVQIDEMYRKLASKKI

SEQ ID NO: 4198 - protein, 601 aa, Arabidopsis thaliana
  peptide (1)..(601): Ceres Seq. ID no. 13645848
  misc_feature (19)..(286): Pfam Name: Pfam Description:  AMP-binding enzyme
  misc_feature (1)..(599): NCBI GI NO: 15236634 NR Description: long-chain-fatty-acid--CoA ligase
  misc_feature (1)..(600): NCBI GI NO: 7437845 NR Description: probable long-chain-fatty-acid-CoA ligase (EC 6
  misc_feature (1)..(595): NCBI GI NO: 15217631 NR Description: long-chain-fatty-acid--CoA ligase
  misc_feature (1)..(594): NCBI GI NO: 15237023 NR Description: long-chain-fatty-acid--CoA ligase
  misc_feature (1)..(594): NCBI GI NO: 20805871 NR Description: long chain acyl-CoA synthetase 5
  misc_feature (1)..(594): NCBI GI NO: 34898260 NR Description: similar to long-chain-fatty-acid--CoA ligase 1
  misc_feature (1)..(593): NCBI GI NO: 22330132 NR Description: long-chain-fatty-acid--CoA ligase
  misc_feature (1)..(600): NCBI GI NO: 7437844 NR Description: probable long-chain-fatty-acid-CoA ligase (EC 6
  misc_feature (1)..(598): NCBI GI NO: 13516481 NR Description: long-chain acyl-CoA synthetase
  misc_feature (1)..(598): NCBI GI NO: 18397422 NR Description: AMP-binding protein, putative
MLGWRRIVDEKVGPYMWKTYKEVYEEVLQIGSALRAAGAEPGSRVGIYGVNCPQWIIAMEACAAHTLICVPLYDTLGSGAVDYIVEHAEIDFVFVQDTKIKGLLEPDCKCAKRLKAIVSFTNVSDELSHKASEIGVKTYSWIDFLHMGREKPEDTNPPKAFNICTIMYTSGTSGDPKGVVLTHQAVATFVVGMDLYMDQFEDKMTHDDVYLSFLPLAHILDRMNEEYFFRKGASVGYYHGNLNVLRDDIQELKPTYLAGVPRVFERIHEGIQKALQELNPRRRFIFNALYKHKLAWLNRRYSHSKASPMADFIAFRKIRDKLGGRIRLLVSGGAPLSPEIEEFLRVTCCCFVVQGYGLTETLGGTALGFPDEMCMLGTVGIPAVYNEIRLEEVSEMGYDPLGENPAGEICIRGQCMFSGYYKNPELTEEVMKDGWFHTGDIGEILPNGVLKIIDRKKNLIKLSQGEYVALEHLENIFGQNSVVQDIWVYGDSFKSMLVAVVVPNPETVNRWAKDLGFTKPFVELCSFPELKEHIISELKSTAEKNKLRKFEYIKAVAVETKPFDVERDLVTATLKNRRNNLLKYYQVQIDEMYRKLASKKI

SEQ ID NO: 4199 - protein, 586 aa, Arabidopsis thaliana
  peptide (1)..(586): Ceres Seq. ID no. 13645849
  misc_feature (4)..(271): Pfam Name: Pfam Description:  AMP-binding enzyme
  misc_feature (1)..(584): NCBI GI NO: 15236634 NR Description: long-chain-fatty-acid--CoA ligase
  misc_feature (1)..(585): NCBI GI NO: 7437845 NR Description: probable long-chain-fatty-acid-CoA ligase (EC 6
  misc_feature (1)..(580): NCBI GI NO: 15217631 NR Description: long-chain-fatty-acid--CoA ligase
  misc_feature (1)..(579): NCBI GI NO: 15237023 NR Description: long-chain-fatty-acid--CoA ligase
  misc_feature (1)..(579): NCBI GI NO: 20805871 NR Description: long chain acyl-CoA synthetase 5
  misc_feature (1)..(579): NCBI GI NO: 34898260 NR Description: similar to long-chain-fatty-acid--CoA ligase 1
  misc_feature (1)..(578): NCBI GI NO: 22330132 NR Description: long-chain-fatty-acid--CoA ligase
  misc_feature (1)..(585): NCBI GI NO: 7437844 NR Description: probable long-chain-fatty-acid-CoA ligase (EC 6
  misc_feature (1)..(583): NCBI GI NO: 13516481 NR Description: long-chain acyl-CoA synthetase
  misc_feature (1)..(583): NCBI GI NO: 18397422 NR Description: AMP-binding protein, putative
MWKTYKEVYEEVLQIGSALRAAGAEPGSRVGIYGVNCPQWIIAMEACAAHTLICVPLYDTLGSGAVDYIVEHAEIDFVFVQDTKIKGLLEPDCKCAKRLKAIVSFTNVSDELSHKASEIGVKTYSWIDFLHMGREKPEDTNPPKAFNICTIMYTSGTSGDPKGVVLTHQAVATFVVGMDLYMDQFEDKMTHDDVYLSFLPLAHILDRMNEEYFFRKGASVGYYHGNLNVLRDDIQELKPTYLAGVPRVFERIHEGIQKALQELNPRRRFIFNALYKHKLAWLNRRYSHSKASPMADFIAFRKIRDKLGGRIRLLVSGGAPLSPEIEEFLRVTCCCFVVQGYGLTETLGGTALGFPDEMCMLGTVGIPAVYNEIRLEEVSEMGYDPLGENPAGEICIRGQCMFSGYYKNPELTEEVMKDGWFHTGDIGEILPNGVLKIIDRKKNLIKLSQGEYVALEHLENIFGQNSVVQDIWVYGDSFKSMLVAVVVPNPETVNRWAKDLGFTKPFVELCSFPELKEHIISELKSTAEKNKLRKFEYIKAVAVETKPFDVERDLVTATLKNRRNNLLKYYQVQIDEMYRKLASKKI

SEQ ID NO: 4200 - DNA, 1917 bp, Arabidopsis thaliana
  misc_feature (1)..(1917): Ceres Seq. ID no. 12371118
gtacttgatatttaaaatcgatttctgatacacttgttagattgagacaatgagcaagggggcggcaataatagcttatgcaaatcccatctttcatattcgacatctaaagcttgaatctttcttgtggaacatcatcattcgtgccattgttcacaatgtttcgtcgcctcaacgacattctccgatctcagtctacctccgtatgcgcaaccatcgcgtctctcccgattttcatacctttccgtttcttctcccttctttccacaatccgcttcatcttcctcttgggcaacgaactcatgctcagattcttctttttggacttgacaaagacccatttgtccgaacttcactgctcaacatgtattcttcctgtggcgacttgagatcagctcagcgagttttcgatgactcgggctcgaaggatttaccggcctggaactctgtggtcaatgcttatgccaaagctgggttgatcgatgatgcgcggaaactgttcgacgaaatgcctgaaagaaacgtgatttcctggagctgcttgattaacggctacgttatgtgtgggaaatacaaagaagcgcttgatttgttccgggagatgcaattacctaaaccaaacgaagcattcgtcagacccaacgagtttacaatgtcgactgtactctcggcttgtgggcgattgggtgcgctcgagcaagggaaatgggttcacgcttacatcgataagtaccacgttgagattgacattgtcttaggcacagctctcattgatatgtacgccaaatgtgggagcctcgagagggcgaaaagggttttcaatgccttgggatccaagaaagatgtcaaagcttacagtgctatgatatgttgcttagcaatgtacggtctcacagatgagtgcttccaactgttctctgagatgaccacgagtgacaacataaacccaaactctgtgacatttgtgggcattctcggtgcttgtgtacatcgaggtctaataaacgaaggaaaatcttactttaaaatgatgattgaggaatttggtatacgccatcaatccagcattatggttgtatggttgatctctacggaagatctggtttgatcaaagaagcagagagctttatagcatctatgcctatggagcctgatgtacttatttgggggtctctcttaagcggatcaagaatgcttggggatatcaagacttgtgaaggtgccctcaagcgactcatcgagctagatcctatgaacagtggagcatatgtgcttctctctaacgtctatgccaaaacagggaggtggatggaagtcaagtgtatcagacacgaaatggaggcaatgcaaaactatttccctcttttccaactcttttcttaactgttgcacagtttctgaagtaaatacagattctctctacaggtaaagggcattaataaagttccgggatgtagctatgttgaagtagagggagtggttcacgagtttgttgtaggagacgaatctcaacaagagagcgaaaggatctatgctatgctcgatgagataatgcagaggctgagagaagctggatatgttacagacactaaggaggttttacttgatcttaacgagaaagataaagagatagctttgtcttaccacagtgagaaactggctattgcgttctgtttgatgaagacaaggcctggaactccagtgagaatcatcaagaacctcagaatctgtggagattgtcatcttgtaatgaagatgatctcgaagctttttagtagagaaattgttgtgagagattgtaatagatttcaccattttagagacgggtcttgctcttgcagagatttttggtgataacaattgcagcaatgtttgtgttggattgaataaacatattactgaattttggaggttttg

SEQ ID NO: 4201 - protein, 352 aa, Arabidopsis thaliana
  peptide (1)..(352): Ceres Seq. ID no. 12371119
  misc_feature (1)..(334): NCBI GI NO: 15229340 NR Description: putative protein; protein id: At3g62890.1
  misc_feature (8)..(340): NCBI GI NO: 15223099 NR Description: unknown protein; protein id: At1g08070.1
  misc_feature (10)..(337): NCBI GI NO: 10178152 NR Description: selenium-binding protein-like
  misc_feature (10)..(334): NCBI GI NO: 15239745 NR Description: selenium-binding protein-like
  misc_feature (1)..(334): NCBI GI NO: 15240085 NR Description: selenium-binding protein-like
  misc_feature (29)..(334): NCBI GI NO: 34915288 NR Description: similar to selenium-binding protein
  misc_feature (10)..(337): NCBI GI NO: 15242684 NR Description: putative protein; protein id: At5g40410.1
  misc_feature (85)..(334): NCBI GI NO: 34910594 NR Description: putative selenium-binding protein
  misc_feature (47)..(334): NCBI GI NO: 9279687 NR Description: gb|AAC35225
  misc_feature (47)..(334): NCBI GI NO: 15228829 NR Description: hypothetical protein; protein id: At3g22690.1
MSKGAAIIAYANPIFHIRHLKLESFLWNIIIRAIVHNVSSPQRHSPISVYLRMRNHRVSPDFHTFPFLLPSFHNPLHLPLGQRTHAQILLFGLDKDPFVRTSLLNMYSSCGDLRSAQRVFDDSGSKDLPAWNSVVNAYAKAGLIDDARKLFDEMPERNVISWSCLINGYVMCGKYKEALDLFREMQLPKPNEAFVRPNEFTMSTVLSACGRLGALEQGKWVHAYIDKYHVEIDIVLGTALIDMYAKCGSLERAKRVFNALGSKKDVKAYSAMICCLAMYGLTDECFQLFSEMTTSDNINPNSVTFVGILGACVHRGLINEGKSYFKMMIEEFGIRHQSSIMVVWLISTEDLV

SEQ ID NO: 4202 - protein, 300 aa, Arabidopsis thaliana
  peptide (1)..(300): Ceres Seq. ID no. 12371120
  misc_feature (1)..(282): NCBI GI NO: 15229340 NR Description: putative protein; protein id: At3g62890.1
  misc_feature (1)..(288): NCBI GI NO: 15223099 NR Description: unknown protein; protein id: At1g08070.1
  misc_feature (1)..(285): NCBI GI NO: 10178152 NR Description: selenium-binding protein-like
  misc_feature (1)..(282): NCBI GI NO: 15239745 NR Description: selenium-binding protein-like
  misc_feature (1)..(282): NCBI GI NO: 15240085 NR Description: selenium-binding protein-like
  misc_feature (1)..(282): NCBI GI NO: 34915288 NR Description: similar to selenium-binding protein
  misc_feature (1)..(285): NCBI GI NO: 15242684 NR Description: putative protein; protein id: At5g40410.1
  misc_feature (33)..(282): NCBI GI NO: 34910594 NR Description: putative selenium-binding protein
  misc_feature (1)..(282): NCBI GI NO: 9279687 NR Description: gb|AAC35225
  misc_feature (1)..(282): NCBI GI NO: 15228829 NR Description: hypothetical protein; protein id: At3g22690.1
MRNHRVSPDFHTFPFLLPSFHNPLHLPLGQRTHAQILLFGLDKDPFVRTSLLNMYSSCGDLRSAQRVFDDSGSKDLPAWNSVVNAYAKAGLIDDARKLFDEMPERNVISWSCLINGYVMCGKYKEALDLFREMQLPKPNEAFVRPNEFTMSTVLSACGRLGALEQGKWVHAYIDKYHVEIDIVLGTALIDMYAKCGSLERAKRVFNALGSKKDVKAYSAMICCLAMYGLTDECFQLFSEMTTSDNINPNSVTFVGILGACVHRGLINEGKSYFKMMIEEFGIRHQSSIMVVWLISTEDLV

SEQ ID NO: 4203 - protein, 247 aa, Arabidopsis thaliana
  peptide (1)..(247): Ceres Seq. ID no. 12371121
  misc_feature (1)..(229): NCBI GI NO: 15229340 NR Description: putative protein; protein id: At3g62890.1
  misc_feature (1)..(235): NCBI GI NO: 15223099 NR Description: unknown protein; protein id: At1g08070.1
  misc_feature (1)..(232): NCBI GI NO: 10178152 NR Description: selenium-binding protein-like
  misc_feature (1)..(229): NCBI GI NO: 15239745 NR Description: selenium-binding protein-like
  misc_feature (1)..(229): NCBI GI NO: 15240085 NR Description: selenium-binding protein-like
  misc_feature (1)..(229): NCBI GI NO: 34915288 NR Description: similar to selenium-binding protein
  misc_feature (1)..(232): NCBI GI NO: 15242684 NR Description: putative protein; protein id: At5g40410.1
  misc_feature (1)..(229): NCBI GI NO: 34910594 NR Description: putative selenium-binding protein
  misc_feature (1)..(229): NCBI GI NO: 9279687 NR Description: gb|AAC35225
  misc_feature (1)..(229): NCBI GI NO: 15228829 NR Description: hypothetical protein; protein id: At3g22690.1
MYSSCGDLRSAQRVFDDSGSKDLPAWNSVVNAYAKAGLIDDARKLFDEMPERNVISWSCLINGYVMCGKYKEALDLFREMQLPKPNEAFVRPNEFTMSTVLSACGRLGALEQGKWVHAYIDKYHVEIDIVLGTALIDMYAKCGSLERAKRVFNALGSKKDVKAYSAMICCLAMYGLTDECFQLFSEMTTSDNINPNSVTFVGILGACVHRGLINEGKSYFKMMIEEFGIRHQSSIMVVWLISTEDLV

SEQ ID NO: 4204 - DNA, 2250 bp, Arabidopsis thaliana
  misc_feature (1)..(2250): Ceres Seq. ID no. 13497578
gtatcttgctctgtctccgataccaaaaggtttttgtattctattgaagattataaactaaagggaggagctttgagaatttgattgttgatatccaaggatttgcaagctagtttttttttttacgacgttatacttttcgattatgagtgcatcatgggctgatgtagctgactcagagaacacgggttctgggtcttctaatcagaattctcatccttcacgacctgcttatgttcctccacatctaaggaacaggccagcagcttctgagcctgttgctccattgccagctaatgatcgtgtaggttatggtggtccaccttctggctctcgatgggctcctggtggtagtggtgttggtgttggaggtggtggtggttatagggctgatgcaggtcgtcctggctctggctctggctatggtggacgaggaggtggtggttggaacaacagaagcggagggtgggaccgtagggaacgtgaagtaaacccctttgaaaatgatgattccgaaccagaaccagcttttactgagcaggataatacggttattaattttgatgcctatgaagatattccgattgagaccagtggggataatgtgcctcctcctgttaacacattcgcagagatagatctcggggaggcattgaatctaaatatccgtagatgcaaatatgttaagccaacacctgttcagcgtcatgcgattccgatattgcttgaagggagggatttgatggcctgtgctcagacagggtcggggaagacagctgctttttgctttccaatcattagtggaataatgaaagatcagcatgtacagagaccccgtggttcacgaacagtctaccctcttgcagttattctctcaccaacaagagagttggcaagtcagatacatgatgaggctaaaaggttctcttaccaaactggtgtgaaggtggttgttgcatatggaggaacacctattaaccagcagctccgggaacttgagaggggagtcgatattcttgtggcaacgcctggtcgattaaatgatttgctcgagagagctagagtctcaatgcagatgattagatttttagctcttgatgaggccgataggatgcttgacatgggttttgaaccacaaattagaaagattgtcgaacaaatggacatgcctccacgtggagttagacagacactgttgtttagtgctacatttccaagagaaattcagagactcgcagctgacttcctagcaaattatatatttttggctgtgggtagagtgggttcaagtaccgatttaattgtccaaagggttgagtttgtccttgactctgacaaaagaagtcatctcatggacctgcttcacgctcagagagagaatggcatccaaggcaagcaagccctgaccttagtttttgtggagacaaagagaggagctgactctttggaaaattggttgtgcatcaatgggtttccagcaacctccattcacggtgacagaacacagcaggaaagagaagtggcattgaaagccttcaagagtgggagaacaccgattttggttgcaactgatgtagcagcacgtggccttgacattccccacgtggctcatgtggtcaacttcgatctgccaaatgacattgatgactatgtccaccgtattggacgaacaggacgtgctggcaaatcaggactagcaactgccttcttcaacgatggcaacacctcactggccagaccgctcgctgagctgatgcaagaagctaaccaagaagtccctgagtggctcactcggtatgcgtcacggtcctcttttggtggtggtaagaaccggcggtctggtggtcgatttggtggccgtgactttagaagggaagggtctttcggtagcggtagaggaggctatggcggtggaggaggagggtatggcggcggaggaggctatggtggtggaggaggctatggcggcggaggaggctatggtggtggatatggtggtgcttcaagtggtggatatggtggagaacctccaagtgcttgggactaagcttccaatgttctttttgttttggttacaacttttgacaaaaaaaatatttcttctacattcacaaagagagtatgtattgccccttacacctatgagatttcactcaggagatggatatataacaattgttgatgttttaggtgttttgatctttttaggctattattaggggttgtcataaaaacagtcatcagtttcgc

SEQ ID NO: 4205 - protein, 633 aa, Arabidopsis thaliana
  peptide (1)..(633): Ceres Seq. ID no. 13497579
  misc_feature (172)..(389): Pfam Name: Pfam Description:  DEAD/DEAH box helicase
  misc_feature (1)..(633): NCBI GI NO: 18410973 NR Description: DEAD box RNA helicase, putative
  misc_feature (1)..(619): NCBI GI NO: 11267530 NR Description: ATP-dependent RNA helicase-like protein
  misc_feature (2)..(626): NCBI GI NO: 15231074 NR Description: DEAD box RNA helicase, putative
  misc_feature (26)..(633): NCBI GI NO: 11267530 NR Description: ATP-dependent RNA helicase-like protein
  misc_feature (1)..(633): NCBI GI NO: 34393986 NR Description: putative DEAD-box RNA helicase DEAD3(i|6753620)
  misc_feature (200)..(633): NCBI GI NO: 17064740 NR Description: ATP-dependent RNA helicase-like protein
  misc_feature (60)..(626): NCBI GI NO: 17985987 NR Description: belle CG9748-PA [Drosophila melanogaster]
  misc_feature (9)..(111): NCBI GI NO: 17985987 NR Description: belle CG9748-PA [Drosophila melanogaster]
  misc_feature (60)..(626): NCBI GI NO: 19528473 NR Description: RE28061p [Drosophila melanogaster]
  misc_feature (9)..(111): NCBI GI NO: 19528473 NR Description: RE28061p [Drosophila melanogaster]
MSASWADVADSENTGSGSSNQNSHPSRPAYVPPHLRNRPAASEPVAPLPANDRVGYGGPPSGSRWAPGGSGVGVGGGGGYRADAGRPGSGSGYGGRGGGGWNNRSGGWDRREREVNPFENDDSEPEPAFTEQDNTVINFDAYEDIPIETSGDNVPPPVNTFAEIDLGEALNLNIRRCKYVKPTPVQRHAIPILLEGRDLMACAQTGSGKTAAFCFPIISGIMKDQHVQRPRGSRTVYPLAVILSPTRELASQIHDEAKRFSYQTGVKVVVAYGGTPINQQLRELERGVDILVATPGRLNDLLERARVSMQMIRFLALDEADRMLDMGFEPQIRKIVEQMDMPPRGVRQTLLFSATFPREIQRLAADFLANYIFLAVGRVGSSTDLIVQRVEFVLDSDKRSHLMDLLHAQRENGIQGKQALTLVFVETKRGADSLENWLCINGFPATSIHGDRTQQEREVALKAFKSGRTPILVATDVAARGLDIPHVAHVVNFDLPNDIDDYVHRIGRTGRAGKSGLATAFFNDGNTSLARPLAELMQEANQEVPEWLTRYASRSSFGGGKNRRSGGRFGGRDFRREGSFGSGRGGYGGGGGGYGGGGGYGGGGGYGGGGGYGGGYGGASSGGYGGEPPSAWD

SEQ ID NO: 4206 - protein, 434 aa, Arabidopsis thaliana
  peptide (1)..(434): Ceres Seq. ID no. 13497580
  misc_feature (1)..(190): Pfam Name: Pfam Description:  DEAD/DEAH box helicase
  misc_feature (1)..(434): NCBI GI NO: 18410973 NR Description: DEAD box RNA helicase, putative
  misc_feature (1)..(420): NCBI GI NO: 11267530 NR Description: ATP-dependent RNA helicase-like protein
  misc_feature (1)..(427): NCBI GI NO: 15231074 NR Description: DEAD box RNA helicase, putative
  misc_feature (1)..(434): NCBI GI NO: 11267530 NR Description: ATP-dependent RNA helicase-like protein
  misc_feature (1)..(434): NCBI GI NO: 34393986 NR Description: putative DEAD-box RNA helicase DEAD3(i|6753620)
  misc_feature (1)..(434): NCBI GI NO: 17064740 NR Description: ATP-dependent RNA helicase-like protein
  misc_feature (1)..(427): NCBI GI NO: 17985987 NR Description: belle CG9748-PA [Drosophila melanogaster]
  misc_feature (1)..(427): NCBI GI NO: 19528473 NR Description: RE28061p [Drosophila melanogaster]
  misc_feature (1)..(433): NCBI GI NO: 11267519 NR Description: probable ATP-dependent RNA helicase DED1
  misc_feature (1)..(427): NCBI GI NO: 113825 NR Description: Putative ATP-dependent RNA helicase An3
MACAQTGSGKTAAFCFPIISGIMKDQHVQRPRGSRTVYPLAVILSPTRELASQIHDEAKRFSYQTGVKVVVAYGGTPINQQLRELERGVDILVATPGRLNDLLERARVSMQMIRFLALDEADRMLDMGFEPQIRKIVEQMDMPPRGVRQTLLFSATFPREIQRLAADFLANYIFLAVGRVGSSTDLIVQRVEFVLDSDKRSHLMDLLHAQRENGIQGKQALTLVFVETKRGADSLENWLCINGFPATSIHGDRTQQEREVALKAFKSGRTPILVATDVAARGLDIPHVAHVVNFDLPNDIDDYVHRIGRTGRAGKSGLATAFFNDGNTSLARPLAELMQEANQEVPEWLTRYASRSSFGGGKNRRSGGRFGGRDFRREGSFGSGRGGYGGGGGGYGGGGGYGGGGGYGGGGGYGGGYGGASSGGYGGEPPSAWD

SEQ ID NO: 4207 - protein, 412 aa, Arabidopsis thaliana
  peptide (1)..(412): Ceres Seq. ID no. 13497581
  misc_feature (1)..(168): Pfam Name: Pfam Description:  DEAD/DEAH box helicase
  misc_feature (1)..(412): NCBI GI NO: 18410973 NR Description: DEAD box RNA helicase, putative
  misc_feature (1)..(398): NCBI GI NO: 11267530 NR Description: ATP-dependent RNA helicase-like protein
  misc_feature (1)..(405): NCBI GI NO: 15231074 NR Description: DEAD box RNA helicase, putative
  misc_feature (1)..(412): NCBI GI NO: 11267530 NR Description: ATP-dependent RNA helicase-like protein
  misc_feature (1)..(412): NCBI GI NO: 34393986 NR Description: putative DEAD-box RNA helicase DEAD3(i|6753620)
  misc_feature (1)..(412): NCBI GI NO: 17064740 NR Description: ATP-dependent RNA helicase-like protein
  misc_feature (1)..(405): NCBI GI NO: 17985987 NR Description: belle CG9748-PA [Drosophila melanogaster]
  misc_feature (1)..(405): NCBI GI NO: 19528473 NR Description: RE28061p [Drosophila melanogaster]
  misc_feature (1)..(411): NCBI GI NO: 11267519 NR Description: probable ATP-dependent RNA helicase DED1
  misc_feature (1)..(405): NCBI GI NO: 113825 NR Description: Putative ATP-dependent RNA helicase An3
MKDQHVQRPRGSRTVYPLAVILSPTRELASQIHDEAKRFSYQTGVKVVVAYGGTPINQQLRELERGVDILVATPGRLNDLLERARVSMQMIRFLALDEADRMLDMGFEPQIRKIVEQMDMPPRGVRQTLLFSATFPREIQRLAADFLANYIFLAVGRVGSSTDLIVQRVEFVLDSDKRSHLMDLLHAQRENGIQGKQALTLVFVETKRGADSLENWLCINGFPATSIHGDRTQQEREVALKAFKSGRTPILVATDVAARGLDIPHVAHVVNFDLPNDIDDYVHRIGRTGRAGKSGLATAFFNDGNTSLARPLAELMQEANQEVPEWLTRYASRSSFGGGKNRRSGGRFGGRDFRREGSFGSGRGGYGGGGGGYGGGGGYGGGGGYGGGGGYGGGYGGASSGGYGGEPPSAWD

SEQ ID NO: 4208 - DNA, 1143 bp, Arabidopsis thaliana
  misc_feature (1)..(1143): Ceres Seq. ID no. 12329706
attctctaggcttttttatattctgaaagttttgattttttgtatcttgttttgtttctcaatcatcaatttgtggtagtagctcactagcaaacaatggaggggaggttgaataatatgtggaggttgactgtgaatgagagcaaattcgttgaatctgcgttgcaatctgagctcagagtcgatggtcgtggcctttatgattaccgcaagcttactattaagtttggcaaggaatatggcagctcacaagttcaactgggtcagactcatgtaatggcttttgtgactgctcagctagtacaaccttacaaagacagacctagtgaaggctccttctctatcttcaccgagttttctccaatggctgatccatcgtttgagccagggcatcctggtgaatctgctgttgagcttggccgtattatagaccgtgctctacgagaaagccgtgcagtagatacagagtcgctttgtgttctagccggaaagctggtttggtctgttcgcattgatcttcacattttggacaatggagggaacttggttgatgctgctaatgttgctgccttagccgcactcatgactttcaggagacctgattgcactgtaggaggggacaacagtcaagacgtgatcatacatccacccgaagaaagggaaccacttcctttgataatacatcatctcccaatagccttcacgtttggattttttaataaaggcagtatcttggtgatggacccaacttacgttgaagaagctgttatgtgtgggagaatgactgtgacagtcaatgccaatggcgatatatgcgcaatccaaaaaccaggagaagaaggcgtgaaccagagtgtaatccttcattgcctgcgtcttgcttcttcaagagcttctgcaacaacaaagataattagagatgcagttgaagcatacaaccgtgagaggagctcacagaaggtggagcggcatcatactttggctaagtctgaagttttgggacctattgtagttgtgtaggaagagacataaataaaacatttgctgtggtcgtcgattgtaaataaagattttagttgtagaaatcttatcagcaacactaagctataaaaacgtcgatatgatcaagacatgttgagactc

SEQ ID NO: 4209 - protein, 307 aa, Arabidopsis thaliana
  peptide (1)..(307): Ceres Seq. ID no. 12329707
  misc_feature (36)..(168): Pfam Name: Pfam Description:  3' exoribonuclease family, domain 1
  misc_feature (1)..(307): NCBI GI NO: 21536581 NR Description: nucleolar autoantigen-like protein
  misc_feature (1)..(307): NCBI GI NO: 18399822 NR Description: expressed protein; protein id: At3g12990
  misc_feature (1)..(307): NCBI GI NO: 15232342 NR Description: nucleolar autoantigen - like protein
  misc_feature (12)..(287): NCBI GI NO: 19075183 NR Description: putative exosome 3'-5' exoribonuclease complex
  misc_feature (15)..(278): NCBI GI NO: 28172864 NR Description: polymyositis/scleroderma autoantigen 1
  misc_feature (15)..(278): NCBI GI NO: 28172868 NR Description: polymyositis/scleroderma autoantigen 1
  misc_feature (15)..(284): NCBI GI NO: 9506981 NR Description: polymyositis/scleroderma autoantigen 1
  misc_feature (15)..(284): NCBI GI NO: 12847890 NR Description: unnamed protein product [Mus musculus]
  misc_feature (15)..(284): NCBI GI NO: 34856829 NR Description: similar to polymyositis scleroderma overlap syndrome
  misc_feature (28)..(278): NCBI GI NO: 14285675 NR Description: Exosome complex exonuclease RRP45
MEGRLNNMWRLTVNESKFVESALQSELRVDGRGLYDYRKLTIKFGKEYGSSQVQLGQTHVMAFVTAQLVQPYKDRPSEGSFSIFTEFSPMADPSFEPGHPGESAVELGRIIDRALRESRAVDTESLCVLAGKLVWSVRIDLHILDNGGNLVDAANVAALAALMTFRRPDCTVGGDNSQDVIIHPPEEREPLPLIIHHLPIAFTFGFFNKGSILVMDPTYVEEAVMCGRMTVTVNANGDICAIQKPGEEGVNQSVILHCLRLASSRASATTKIIRDAVEAYNRERSSQKVERHHTLAKSEVLGPIVVV

SEQ ID NO: 4210 - protein, 300 aa, Arabidopsis thaliana
  peptide (1)..(300): Ceres Seq. ID no. 12329708
  misc_feature (29)..(161): Pfam Name: Pfam Description:  3' exoribonuclease family, domain 1
  misc_feature (1)..(300): NCBI GI NO: 21536581 NR Description: nucleolar autoantigen-like protein
  misc_feature (1)..(300): NCBI GI NO: 18399822 NR Description: expressed protein; protein id: At3g12990
  misc_feature (1)..(300): NCBI GI NO: 15232342 NR Description: nucleolar autoantigen - like protein
  misc_feature (5)..(280): NCBI GI NO: 19075183 NR Description: putative exosome 3'-5' exoribonuclease complex
  misc_feature (8)..(271): NCBI GI NO: 28172864 NR Description: polymyositis/scleroderma autoantigen 1
  misc_feature (8)..(271): NCBI GI NO: 28172868 NR Description: polymyositis/scleroderma autoantigen 1
  misc_feature (8)..(277): NCBI GI NO: 9506981 NR Description: polymyositis/scleroderma autoantigen 1
  misc_feature (8)..(277): NCBI GI NO: 12847890 NR Description: unnamed protein product [Mus musculus]
  misc_feature (8)..(277): NCBI GI NO: 34856829 NR Description: similar to polymyositis scleroderma overlap syndrome
  misc_feature (21)..(271): NCBI GI NO: 14285675 NR Description: Exosome complex exonuclease RRP45
MWRLTVNESKFVESALQSELRVDGRGLYDYRKLTIKFGKEYGSSQVQLGQTHVMAFVTAQLVQPYKDRPSEGSFSIFTEFSPMADPSFEPGHPGESAVELGRIIDRALRESRAVDTESLCVLAGKLVWSVRIDLHILDNGGNLVDAANVAALAALMTFRRPDCTVGGDNSQDVIIHPPEEREPLPLIIHHLPIAFTFGFFNKGSILVMDPTYVEEAVMCGRMTVTVNANGDICAIQKPGEEGVNQSVILHCLRLASSRASATTKIIRDAVEAYNRERSSQKVERHHTLAKSEVLGPIVVV

SEQ ID NO: 4211 - protein, 247 aa, Arabidopsis thaliana
  peptide (1)..(247): Ceres Seq. ID no. 12329709
  misc_feature (1)..(108): Pfam Name: Pfam Description:  3' exoribonuclease family, domain 1
  misc_feature (1)..(247): NCBI GI NO: 21536581 NR Description: nucleolar autoantigen-like protein
  misc_feature (1)..(247): NCBI GI NO: 18399822 NR Description: expressed protein; protein id: At3g12990
  misc_feature (1)..(247): NCBI GI NO: 15232342 NR Description: nucleolar autoantigen - like protein
  misc_feature (1)..(227): NCBI GI NO: 19075183 NR Description: putative exosome 3'-5' exoribonuclease complex
  misc_feature (1)..(218): NCBI GI NO: 28172864 NR Description: polymyositis/scleroderma autoantigen 1
  misc_feature (1)..(218): NCBI GI NO: 28172868 NR Description: polymyositis/scleroderma autoantigen 1
  misc_feature (1)..(224): NCBI GI NO: 9506981 NR Description: polymyositis/scleroderma autoantigen 1
  misc_feature (1)..(224): NCBI GI NO: 12847890 NR Description: unnamed protein product [Mus musculus]
  misc_feature (1)..(224): NCBI GI NO: 34856829 NR Description: similar to polymyositis scleroderma overlap syndrome
  misc_feature (1)..(218): NCBI GI NO: 14285675 NR Description: Exosome complex exonuclease RRP45
MAFVTAQLVQPYKDRPSEGSFSIFTEFSPMADPSFEPGHPGESAVELGRIIDRALRESRAVDTESLCVLAGKLVWSVRIDLHILDNGGNLVDAANVAALAALMTFRRPDCTVGGDNSQDVIIHPPEEREPLPLIIHHLPIAFTFGFFNKGSILVMDPTYVEEAVMCGRMTVTVNANGDICAIQKPGEEGVNQSVILHCLRLASSRASATTKIIRDAVEAYNRERSSQKVERHHTLAKSEVLGPIVVV

SEQ ID NO: 4212 - DNA, 1141 bp, Arabidopsis thaliana
  misc_feature (1)..(1141): Ceres Seq. ID no. 12422273
attatctgggcagttgttggaacatacacgagctggtgagcgtgttgctgttgattcgagaaagcgtaaccctgctgattttgcattatggaaggcggcaaagcctgatgagccaagttgggagagcccttggggtccaggaagaccaggatggcacatcgagtgcagtgcaatgagtgttcattatctgtctccgaaatttgatattcatggaggtggtgcagatcttaaattcccgcatcatgaaaatgagatcgcccagacatgtgctgcatgtgaggatagtggtgtaaattactggttgcataatgggcatgtcactatcaacaacgagaagatggcaaaatcaaagcacaactttaaaacgattagagaaataaccgctagctaccatccattggctctgaggcacttcttgatgagtgcacagtaccggtctcctctgagtttcactgcctcacagctagagagttcgtcagaagctttatactatgtttaccagactttacaagatcttgatgaaggtctgtcaccatatcaagacgcattgtctgaagatggtggaaaatctgaacaaactgcagaaggaaaagacatcattaagaagcagcgaatgtcaatgcttgtgtcactcgttgagattgagaaagcagcaagggaagttcttgatgtacttggtttactcactacactgagctatgccgagattttgaaagaaatgaaactaaaaacactaataagagcagaaattggagaagaaggtatttcgcagttaatagaagaaaggataacagccaggaagaataaagatttcacgaaaagtgatgagattagagagaaactgacaagaaaaggaatagcgttaatggacattggcaaagaaactgtatggagaccatgcttcccttctcaggctgattccagcacttgagcttagagcagagtcatggagatagttaacggtttcttcatttctctaactcttcttctttagccttttgtttgaggctctttctttataactctgtttttggaattttgcaatgacttcaaaatatacacttgttgctgtttgttgtattcttaccattcacaatgacattgtaacaatattgttactttggatattggttctatagcc

SEQ ID NO: 4213 - protein, 309 aa, Arabidopsis thaliana
  peptide (1)..(309): Ceres Seq. ID no. 12422274
  misc_feature (1)..(296): NCBI GI NO: 15241557 NR Description: cysteine-tRNA ligase -like protein
  misc_feature (1)..(296): NCBI GI NO: 9758060 NR Description: cysteine-tRNA ligase [Arabidopsis thaliana]
  misc_feature (1)..(302): NCBI GI NO: 15228880 NR Description: cysteine-tRNA ligase-like protein
  misc_feature (1)..(186): NCBI GI NO: 23055378 NR Description: hypothetical protein [Geobacter metallireducens]
  misc_feature (211)..(298): NCBI GI NO: 23055378 NR Description: hypothetical protein [Geobacter metallireducens]
  misc_feature (1)..(296): NCBI GI NO: 18402580 NR Description: putative cysteinyl-tRNA synthetase
  misc_feature (1)..(296): NCBI GI NO: 25293240 NR Description: probable cysteinyl-tRNA synthetase
  misc_feature (1)..(177): NCBI GI NO: 39998454 NR Description: cysteinyl-tRNA synthetase
  misc_feature (167)..(298): NCBI GI NO: 39998454 NR Description: cysteinyl-tRNA synthetase
  misc_feature (1)..(298): NCBI GI NO: 34497201 NR Description: cysteinyl-tRNA synthetase
LSGQLLEHTRAGERVAVDSRKRNPADFALWKAAKPDEPSWESPWGPGRPGWHIECSAMSVHYLSPKFDIHGGGADLKFPHHENEIAQTCAACEDSGVNYWLHNGHVTINNEKMAKSKHNFKTIREITASYHPLALRHFLMSAQYRSPLSFTASQLESSSEALYYVYQTLQDLDEGLSPYQDALSEDGGKSEQTAEGKDIIKKQRMSMLVSLVEIEKAAREVLDVLGLLTTLSYAEILKEMKLKTLIRAEIGEEGISQLIEERITARKNKDFTKSDEIREKLTRKGIALMDIGKETVWRPCFPSQADSST

SEQ ID NO: 4214 - protein, 252 aa, Arabidopsis thaliana
  peptide (1)..(252): Ceres Seq. ID no. 12422275
  misc_feature (1)..(239): NCBI GI NO: 15241557 NR Description: cysteine-tRNA ligase -like protein
  misc_feature (1)..(239): NCBI GI NO: 9758060 NR Description: cysteine-tRNA ligase [Arabidopsis thaliana]
  misc_feature (1)..(245): NCBI GI NO: 15228880 NR Description: cysteine-tRNA ligase-like protein
  misc_feature (1)..(129): NCBI GI NO: 23055378 NR Description: hypothetical protein [Geobacter metallireducens]
  misc_feature (154)..(241): NCBI GI NO: 23055378 NR Description: hypothetical protein [Geobacter metallireducens]
  misc_feature (1)..(239): NCBI GI NO: 18402580 NR Description: putative cysteinyl-tRNA synthetase
  misc_feature (1)..(239): NCBI GI NO: 25293240 NR Description: probable cysteinyl-tRNA synthetase
  misc_feature (1)..(120): NCBI GI NO: 39998454 NR Description: cysteinyl-tRNA synthetase
  misc_feature (110)..(241): NCBI GI NO: 39998454 NR Description: cysteinyl-tRNA synthetase
  misc_feature (1)..(241): NCBI GI NO: 34497201 NR Description: cysteinyl-tRNA synthetase
MSVHYLSPKFDIHGGGADLKFPHHENEIAQTCAACEDSGVNYWLHNGHVTINNEKMAKSKHNFKTIREITASYHPLALRHFLMSAQYRSPLSFTASQLESSSEALYYVYQTLQDLDEGLSPYQDALSEDGGKSEQTAEGKDIIKKQRMSMLVSLVEIEKAAREVLDVLGLLTTLSYAEILKEMKLKTLIRAEIGEEGISQLIEERITARKNKDFTKSDEIREKLTRKGIALMDIGKETVWRPCFPSQADSST

SEQ ID NO: 4215 - protein, 197 aa, Arabidopsis thaliana
  peptide (1)..(197): Ceres Seq. ID no. 12422276
  misc_feature (1)..(184): NCBI GI NO: 15241557 NR Description: cysteine-tRNA ligase -like protein
  misc_feature (1)..(184): NCBI GI NO: 9758060 NR Description: cysteine-tRNA ligase [Arabidopsis thaliana]
  misc_feature (1)..(190): NCBI GI NO: 15228880 NR Description: cysteine-tRNA ligase-like protein
  misc_feature (1)..(74): NCBI GI NO: 23055378 NR Description: hypothetical protein [Geobacter metallireducens]
  misc_feature (99)..(186): NCBI GI NO: 23055378 NR Description: hypothetical protein [Geobacter metallireducens]
  misc_feature (1)..(184): NCBI GI NO: 18402580 NR Description: putative cysteinyl-tRNA synthetase
  misc_feature (1)..(184): NCBI GI NO: 25293240 NR Description: probable cysteinyl-tRNA synthetase
  misc_feature (1)..(65): NCBI GI NO: 39998454 NR Description: cysteinyl-tRNA synthetase
  misc_feature (55)..(186): NCBI GI NO: 39998454 NR Description: cysteinyl-tRNA synthetase
  misc_feature (1)..(186): NCBI GI NO: 34497201 NR Description: cysteinyl-tRNA synthetase
MAKSKHNFKTIREITASYHPLALRHFLMSAQYRSPLSFTASQLESSSEALYYVYQTLQDLDEGLSPYQDALSEDGGKSEQTAEGKDIIKKQRMSMLVSLVEIEKAAREVLDVLGLLTTLSYAEILKEMKLKTLIRAEIGEEGISQLIEERITARKNKDFTKSDEIREKLTRKGIALMDIGKETVWRPCFPSQADSST

SEQ ID NO: 4216 - DNA, 1130 bp, Arabidopsis thaliana
  misc_feature (1)..(1130): Ceres Seq. ID no. 12330197
atttttctcctaccgtcgaactaaatcctagggcacaggtgaaatcgccgagtgacgtctagccaccgcaccgcctccttctccggttatctcgctactaatcagactattccacagctatgtcacaggtagacagcagaaattcatcagcagccaagcgtgctagaactgacggggggcgtagagaagatgattggatctgcccaagttgtggcaatgtcaacttttcattcaggacaacttgcaatatgcgtaattgcactcagcctagacctgcagatcataatggaaagtctgctcccaaacctatgcaacatcaacaaggtttctcatcacccggggcatacttaggatctgggggtccccctccagtatatatgggcgggtcaccatatggatctcctctctttaatggatcgtctatgcctccttatgacgtcccattttctgggggttcgccttaccattttaactataatagccgaatgcctgccggagctcattacagaccattacatatgtctggaccaccaccataccatggcggatctatgatgggaagtggtggtatgtatggaatgcctccaccaatagacaggtatggccttggtatggcaatgggtcctggttctgccgctgccatgatgccaagaccaaggttttacccagatgaaaaatcacaaaagagagattcaactcgcgataatgattggacatgtccgaattgtggtaatgtaaacttctcattcagaactgtatgtaacatgaggaagtgcaacactccaaagcctggttctcagcagggtggaagctcagataaaatatccaaacaaaatgcaccggaagggagctggaagtgtgataactgtggaaatataaactacccattcaggagcaaatgcaacaggcaaaactgtggagctgataagcctggggatcggtcgaatggatctccgtcccgtgcaccagaagagaacgatcaggtttgtaagatgtatctatgtggtcacaactgtttgttaataaaatgtttgcctctgaaactcgtaaatgtaacaacctgtgtagattttatgccttgtgaaagcagaggttatatgtttatgaaaaaattgactccgactacgttt

SEQ ID NO: 4217 - protein, 337 aa, Arabidopsis thaliana
  peptide (1)..(337): Ceres Seq. ID no. 12330198
  misc_feature (48)..(141): Pfam Name: Pfam Description:  Extensin-like region
  misc_feature (1)..(288): NCBI GI NO: 22330480 NR Description: similar to RRM-containing RNA-binding protein
  misc_feature (44)..(288): NCBI GI NO: 25404955 NR Description: protein F1N21.14 [imported] - Arabidopsis thaliana
  misc_feature (1)..(286): NCBI GI NO: 27817857 NR Description: OJ1081_B12.5
  misc_feature (1)..(271): NCBI GI NO: 33146999 NR Description: putative p53 binding protein
  misc_feature (191)..(271): NCBI GI NO: 18698995 NR Description: p53 binding protein [Oryza sativa]
  misc_feature (177)..(226): NCBI GI NO: 18698995 NR Description: p53 binding protein [Oryza sativa]
  misc_feature (10)..(53): NCBI GI NO: 18698995 NR Description: p53 binding protein [Oryza sativa]
  misc_feature (194)..(273): NCBI GI NO: 15865325 NR Description: putative non-ribosomal nucleolar protein
  misc_feature (191)..(262): NCBI GI NO: 23510073 NR Description: hypothetical protein [Plasmodium falciparum 3D7]
  misc_feature (89)..(284): NCBI GI NO: 33146999 NR Description: putative p53 binding protein
MSQVDSRNSSAAKRARTDGGRREDDWICPSCGNVNFSFRTTCNMRNCTQPRPADHNGKSAPKPMQHQQGFSSPGAYLGSGGPPPVYMGGSPYGSPLFNGSSMPPYDVPFSGGSPYHFNYNSRMPAGAHYRPLHMSGPPPYHGGSMMGSGGMYGMPPPIDRYGLGMAMGPGSAAAMMPRPRFYPDEKSQKRDSTRDNDWTCPNCGNVNFSFRTVCNMRKCNTPKPGSQQGGSSDKISKQNAPEGSWKCDNCGNINYPFRSKCNRQNCGADKPGDRSNGSPSRAPEENDQVCKMYLCGHNCLLIKCLPLKLVNVTTCVDFMPCESRGYMFMKKLTPTTF

SEQ ID NO: 4218 - protein, 294 aa, Arabidopsis thaliana
  peptide (1)..(294): Ceres Seq. ID no. 12330199
  misc_feature (5)..(98): Pfam Name: Pfam Description:  Extensin-like region
  misc_feature (1)..(245): NCBI GI NO: 22330480 NR Description: similar to RRM-containing RNA-binding protein
  misc_feature (1)..(245): NCBI GI NO: 25404955 NR Description: protein F1N21.14 [imported] - Arabidopsis thaliana
  misc_feature (1)..(243): NCBI GI NO: 27817857 NR Description: OJ1081_B12.5
  misc_feature (1)..(228): NCBI GI NO: 33146999 NR Description: putative p53 binding protein
  misc_feature (148)..(228): NCBI GI NO: 18698995 NR Description: p53 binding protein [Oryza sativa]
  misc_feature (134)..(183): NCBI GI NO: 18698995 NR Description: p53 binding protein [Oryza sativa]
  misc_feature (151)..(230): NCBI GI NO: 15865325 NR Description: putative non-ribosomal nucleolar protein
  misc_feature (148)..(219): NCBI GI NO: 23510073 NR Description: hypothetical protein [Plasmodium falciparum 3D7]
  misc_feature (46)..(241): NCBI GI NO: 33146999 NR Description: putative p53 binding protein
  misc_feature (144)..(222): NCBI GI NO: 30962835 NR Description: Unknown (protein for MGC:56597) [Danio rerio]
MRNCTQPRPADHNGKSAPKPMQHQQGFSSPGAYLGSGGPPPVYMGGSPYGSPLFNGSSMPPYDVPFSGGSPYHFNYNSRMPAGAHYRPLHMSGPPPYHGGSMMGSGGMYGMPPPIDRYGLGMAMGPGSAAAMMPRPRFYPDEKSQKRDSTRDNDWTCPNCGNVNFSFRTVCNMRKCNTPKPGSQQGGSSDKISKQNAPEGSWKCDNCGNINYPFRSKCNRQNCGADKPGDRSNGSPSRAPEENDQVCKMYLCGHNCLLIKCLPLKLVNVTTCVDFMPCESRGYMFMKKLTPTTF

SEQ ID NO: 4219 - protein, 274 aa, Arabidopsis thaliana
  peptide (1)..(274): Ceres Seq. ID no. 12330200
  misc_feature (1)..(78): Pfam Name: Pfam Description:  Extensin-like region
  misc_feature (1)..(225): NCBI GI NO: 22330480 NR Description: similar to RRM-containing RNA-binding protein
  misc_feature (1)..(225): NCBI GI NO: 25404955 NR Description: protein F1N21.14 [imported] - Arabidopsis thaliana
  misc_feature (1)..(223): NCBI GI NO: 27817857 NR Description: OJ1081_B12.5
  misc_feature (1)..(208): NCBI GI NO: 33146999 NR Description: putative p53 binding protein
  misc_feature (128)..(208): NCBI GI NO: 18698995 NR Description: p53 binding protein [Oryza sativa]
  misc_feature (114)..(163): NCBI GI NO: 18698995 NR Description: p53 binding protein [Oryza sativa]
  misc_feature (131)..(210): NCBI GI NO: 15865325 NR Description: putative non-ribosomal nucleolar protein
  misc_feature (128)..(199): NCBI GI NO: 23510073 NR Description: hypothetical protein [Plasmodium falciparum 3D7]
  misc_feature (26)..(221): NCBI GI NO: 33146999 NR Description: putative p53 binding protein
  misc_feature (124)..(202): NCBI GI NO: 30962835 NR Description: Unknown (protein for MGC:56597) [Danio rerio]
MQHQQGFSSPGAYLGSGGPPPVYMGGSPYGSPLFNGSSMPPYDVPFSGGSPYHFNYNSRMPAGAHYRPLHMSGPPPYHGGSMMGSGGMYGMPPPIDRYGLGMAMGPGSAAAMMPRPRFYPDEKSQKRDSTRDNDWTCPNCGNVNFSFRTVCNMRKCNTPKPGSQQGGSSDKISKQNAPEGSWKCDNCGNINYPFRSKCNRQNCGADKPGDRSNGSPSRAPEENDQVCKMYLCGHNCLLIKCLPLKLVNVTTCVDFMPCESRGYMFMKKLTPTTF
